(19) United States
(12) Patent Application Publication
(10) Pub. No.: US 2025/0041412 A1
(43) Pub. Date: Feb. 6, 2025

(54) TRANSMEMBRANE NEOANTIGENIC PEPTIDES

(71) Applicants: INSTITUT CURIE, Paris (FR); MNEMO THERAPEUTICS, Paris (FR); INSERM, Paris (FR)

(72) Inventors: Sebastian AMIGORENA, Paris (FR); Marianne BURBAGE, Paris (FR); Alexandre HOUY, Vitry-sur-Seine (FR); Joshua WATERFALL, Paris (FR); Marc-Henri STERN, Paris (FR); Benjamin SADACCA, Paris (FR); Antonela MERLOTTI IPPOLITO, Paris (FR); Christel GOUDOT, Le Blanc Mesnil (FR); Silvia LOPEZ LASTRA, Paris (FR); Yago ARRIBAS DE SANDOVAL, Paris (FR)

(21) Appl. No.: 18/549,991

(22) PCT Filed: Mar. 11, 2022
(86) PCT No.: PCT/EP2022/056318

§ 371 Date: Sep. 11, 2023

(30) Foreign Application Priority Data
Mar. 11, 2021 (EP) 21305296.2
Mar. 2, 2022 (EP) 22305236.6

(51) Int. Cl. A61K 39/00; C07K 14/47; C07K 14/725; C07K 16/30

(52) U.S. Cl. CPC A61K 39/4611; A61K 39/4631; A61K 39/4632; A61K 39/4644; C07K 14/4748; C07K 14/7051; C07K 16/30; C07K 2317/92; C07K 2319/02; C07K 2319/03

(57) ABSTRACT

The present disclosure provides transmembrane chimeric proteins derived from transposable element (TE)-exon fusion transcripts, as well as nucleic acids, antibodies, CARs, non-HLA restricted TCR and immune cells targeting such chimeric proteins that can be used in cancer therapy.

### FIELD OF THE DISCLOSURE

[0001] The present disclosure provides transmembrane chimeric proteins and tumor neoantigenic peptides encoded by transposable element (TE)-exon fusion transcripts, nucleic acids, vaccines, antibodies and immune cells that can be used in cancer therapy.

### BACKGROUND

[0002] High precision tumor targeting has been revolutionized by the emergence of T cell-based immunotherapies using the infusion of activated, genetically engineered T cells and other immune cells, or by delivery of mono- or bi-specific antibodies (such as BiTEs). Chimeric antigen receptor (CAR) T cells and BiTEs are the main forms of T cell redirection immunotherapies, using single chain variable fragment (scFv) targeting of tumours to induce target cell death. Using these approaches to redirect the immune cell-targeting has enabled the elimination of malignant cells, previously ‘invisible’ to the immune system, and provided excellent therapeutic results in patients with certain relapsed or refractory tumours. This occurs particularly efficiently in the case of CAR T cells, where the fusion of antibody binding domains to T cell signaling proteins such as CD3, has the capacity to redirect the T cell specificity for antigens. A major advantage of a CAR is that the T cells are activated and can exert effector functions such as release of cytotoxic granules and cytokines without recognition of peptide presentation by major histocompatibility complex (MHC) as the CAR interacts directly with cell surface molecules.

[0003] Despite the ability to engineer, redirect and influence cell functions and interactions, there are challenges associated with targeting proteins expressed on tumour cells. The lack of real tumor-specific antigens (TSA) and the development of antigen escape within the tumor remain major challenges to effective targeted therapies, and approaches such as dual antigen targeting have shown promising early results. These challenges resulted in a strong effort to discover biomarkers for hematological and solid malignancies.

[0004] TSA are exclusively expressed on malignant tumors and are usually thought of in the context of mutations in proteins presented on the cell surface via MHC. However, the category of TSA can be expanded to include proteins derived from tumor-specific fusion transcripts, tumor specific glycosylation, tumor specific mutations in cell surface proteins and misfolded proteins that escape refolding within the endoplasmic reticulum.

[0005] Therapeutic targeting of tumour associated antigens (TAA) has been successful in some cases, but also served as a warning of the potential off tumour effects that can be associated with therapy. This class of targets are broadly defined as either having a greater level of expression in malignant tissue compared to matched healthy tissues, such as human epidermal growth factor receptor 2 (HER2), or are lineage restricted in their expression, such as CD19. Unlike TSA, TAA will often have on-target side effects which make it more difficult to disentangle direct treatment related side-effects with on-target/off-tumor toxicities. CD19 targeted CAR T cell therapy in CD19-expressing tumors was the breakthrough therapy to show that CAR T cells could be clinically effective. Therefore, the targeting of lineage specific TAAs is possible, but only justified when the healthy tissue is considered to be dispensable or there is an acceptable level of toxicity.

[0006] Identifying shared true TSA (absent from tissues) or TAA with minimum on-target/off-tumor risk is a major challenge for the immune-oncology field.

[0007] A few prior reports regarding transposable elements (TE) in tumors include (Helman, E. et al. (2014). Genome Res.) (Schiavetti, F. et al. (2002). Cancer Res., Takahashi, Y. et al. (2008). J. Clin. Invest.). (Chiappinelli, K. B. et al. (2015). Cell, Roulois, D. et al. (2015). Cell). However, the relationship of TE to the antigenic landscape expressed by tumor cells has not been investigated in depth.

[0008] New tumor neoantigens would be of interest and might improve or reduce the cost of cancer therapy in particular in the case of adoptive cell therapy, targeted therapies with antigen binding domains and vaccination strategies.

### SUMMARY

[0009] The present disclosure provides chimeric polypeptides (or proteins) and nucleotide sequences encoding such polypeptide sequences; an antibody, or an antigen-binding fragment thereof, a T cell receptor (TCR) in particular a non-HLA restricted TCR, or a chimeric antigen receptor (CAR) that specifically binds such chimeric polypeptides or proteins; methods of producing such antibodies, TCRs or CARs; polynucleotides encoding such neoantigenic peptides, antibodies, CARs or TCRs, optionally linked to a heterologous regulatory control sequence; immune cells that specifically bind to such chimeric polynucleotides or proteins; and methods, notably therapeutics methods of using such products.

[0010] The present disclosure provides a tumor chimeric polypeptide (or protein) comprising or consisting of any one of SEQ ID NO:1 to 21542 and containing neoantigenic sequences, wherein said protein is located at the cell membrane.

[0011] Most particularly, the present disclosure further provides an isolated tumor neoantigenic sequence (typically an epitope), wherein the sequence is from any one of chimeric proteins of SEQ ID NO:1-8202, including a fragment thereof, and comprises at least a portion of a TE-derived amino acid sequence or is from any one of SEQ ID NO:1424-8202, 8203-10163, and 12831-21542, notably derives from chimeric fusion transcript sequences wherein the donor is the TE. In some embodiments, the tumor neoantigenic sequence overlaps the breakpoint between, the TE-derived amino acid sequence and the exon-derived amino acid sequence. In other embodiments, the tumor neoantigenic sequence is derived from a pure TE sequence. In yet other embodiments, the tumor neoantigenic sequence is encoded by a non-canonical ORF downstream of the junction between the TE-derived amino acid sequence and the exon-derived amino acid sequence. Typically, the tumor neoantigenic sequence is from the extracellular portion of the chimeric protein to which it belongs.

[0012] Typically, the transmembrane chimeric protein is expressed in more than 1%, notably more than 5%, and typically more than 10% of the tumor samples.

[0013] Typically, the transmembrane chimeric protein is expressed at higher levels in tumor samples as compared to normal samples.

[0014] Typically, the chimeric protein is expressed in less than 20%, notably less than 10%, less than 5% or less than 1% of the normal samples.

[0015] In certain embodiments, the part of the sequence of the chimeric protein derived from the TE nucleotide sequence is exposed at the cell surface.

[0016] The present disclosure further encompasses an antigen binding domain that binds a transmembrane chimeric protein as herein defined and in particular that binds a tumor neoantigenic sequence (typically an epitope) from any one of the chimeric proteins of SEQ ID 1-8202 with a Kd binding affinity of less than about 10-7 M. Antibodies, TCRs or CARs that specifically bind the transmembrane chimeric polypeptides or proteins as herein disclosed may bind a tumor neoantigenic peptide sequence of at least 4, at least 5, at least 6, or at least 7 amino acids.

[0017] In some embodiments, the antigen binding domain binds a sequence from any one of the chimeric proteins as herein disclosed that comprises at least a portion of a TE-derived amino acid sequence or is from any one of SEQ ID NO:1424-8202, 8203-10163, and 12831-21542, notably derives from chimeric fusion transcript sequences wherein the donor is the TE. In some embodiments, the sequence or fragment of the chimeric proteins bound by the antigen binding domain overlaps the breakpoint between, the TE-derived amino acid sequence and the exon-derived amino acid sequence. In other embodiments, the neoantigenic peptide is derived from a pure TE sequence. In yet other embodiments, the sequence or fragment of the chimeric proteins bound by the antigen binding domain is encoded by a non-canonical ORF downstream of the junction between the TE-derived amino acid sequence and the exon-derived amino acid sequence.

[0018] In certain embodiments, the antigen binding domain comprises one or more, typically one or two immunoglobulin region(s).

[0019] Notably, the antigen binding domain can comprise a heavy chain variable region (VH) of an antibody and/or a light chain variable region (VL) of an antibody.

[0020] The present disclosure also encompasses an antibody comprising an antigen binding domain as herein defined wherein the antibody is selected from a full IgG, an scFv, a BiTE, or a multispecific antibody. The antibody can be of human murine or camelid origin.

[0021] The present disclosure also encompasses a chimeric antigen receptor (CAR) or a non-HLA restricted recombinant T cell receptor (TCR) comprising an antigen-binding domain as herein defined.

[0022] Typically non-HLA restricted recombinant TCR of the present disclosure comprises an extracellular antigen-binding domain which is capable of dimerizing with a second extracellular antigen-binding domain. In some embodiments, the second extracellular antigen-binding domain binds a tumor antigen, preferably wherein the tumor antigen is selected from pHER95, CD19, MUC16, MUC1, CAIX, CEA, CD8, CD7, CD10, CD20, CD22, CD30, CD70, CLL1, CD33, CD34, CD38, CD41, CD44, CD49f, CD56, CD74, CD133, CD138, EGP-2, EGP-40, EpCAM, Erb-B2, Erb-B3, Erb-B4, FBP, Fetal acetylcholine receptor, folate receptor-a, GD2, GD3, HER-2, hTERT, IL-13R-a2, κ-light chain, KDR, LeY, L1 cell adhesion molecule, MAGE-A1, Mesothelin, MAGEA3, p53, MART1, GP100, Proteinase3 (PR1), Tyrosinase, Survivin, hTERT, EphA2, NKG2D ligands, NY-ESO-1, oncofetal antigen (h5T4), PSCA, PSMA, ROR1, TAG-72, VEGF-R2, WT-1, BCMA, CD123, CD44V6, NKCS1, EGF1R, EGFR-VIII, CD99, CD70, ADGRE2, CCR1, LILRB2, LILRB4, PRAME, and ERBB.

[0023] The present disclosure further encompasses a CAR comprising:
[0024] a) an extracellular domain comprising one or more antigen binding domain(s) at least one of which is selected from the antigen-binding domains as herein described,
[0025] b) a transmembrane domain,
[0026] c) optionally one or more costimulatory domains, for example selected from CD28, 4-1BB (CD137), ICOS-1, CD27, OX 40 (CD137), DAP10, and GITR (AITR)
[0027] d) one or more intracellular signaling domain(s) comprising one or more ITAMs, for example: the intracellular signaling domain or a portion thereof from CD3-zeta, or a variant thereof lacking one or two ITAMs (e.g.: ITAM3 and/or ITAM2 see also as detailed above and bibliographic references), FcR gamma, FcR beta, CD3 gamma, CD3 delta, CD3 epsilon, CDS, CD22, CD79a, CD79b, and/or CD66d, notably an intracellular signaling domain comprising a modified CD3zeta intracellular signaling domain in which ITAM2 and ITAM3 have been inactivated,
[0028] In some embodiments, the CAR as herein disclosed comprises a transmembrane domain selected from CD28, CD8 or CD3-zeta.

[0029] In some embodiments, the CAR as herein disclosed comprises one or more costimulatory domains which can be selected from the group consisting of: CD28, 4-1BB (CD137), ICOS-1, CD27, OX 40 (CD137), DAP10, and GITR (AITR).

[0030] In some embodiments, the CAR as herein disclosed comprises an intracellular signaling domain comprising the intracellular signaling domain of a CD3-zeta polypeptide, or a fragment thereof, optionally a CD3-zeta polypeptide wherein immunoreceptor tyrosine-based activation motif 2 (ITAM2) and immunoreceptor tyrosine-based activation motif 3 (ITAM3) are inactivated.

[0031] The present disclosure also encompasses:
[0032] an antibody, or an antigen-binding fragment thereof, a T cell receptor (TCR), or a chimeric antigen receptor (CAR) that has been selected for its binding affinity to a chimeric protein from any one of SEQ ID NO:1-21542, including a portion thereof, e.g. of a length at least 4, 5, 6 7, or 8 amino acids, or a composition comprising such antibody, antigen-binding fragment thereof, TCR or CAR.
[0033] a polynucleotide encoding a neoantigenic peptide, an antibody, a CAR or a TCR as herein defined, typically operatively linked to a heterologous regulatory control nucleotide sequence, and a vector encoding such polynucleotide,;
[0034] an immune cell, or a population or immune cells that targets one or more chimeric proteins from any one of SEQ ID NO:1-21542, including a portion thereof, e.g. of a length at least 4, 5, 6 7, or 8 amino acids, wherein the population of immune cells preferably targets a plurality of different chimeric proteins or fragment(s) thereof as herein disclosed, or a composition comprising such immune cells or population of immune cells optionally in combination with a physiologically or pharmacologically acceptable buffer, carrier, excipient, immunostimulant and/or adjuvant.

[0035] Typically, the antibody or antigen-binding fragment thereof, TCR or CAR binds a chimeric protein or a fragment thereof expressed on the surface of a cell, with a Kd affinity of about 10⁻⁶ M or less.

[0036] The present disclosure further provides a method of producing an antibody, a non-HLA restricted TCR or a CAR as herein defined comprising an antigen-binding domain as herein defined comprising the step of selecting an antibody, non-HLA restricted TCR or a CAR that binds to a chimeric protein, or a fragment thereof, of the present disclosure, typically any one of the transmembrane chimeric polypeptide sequences of SEQ ID NO:1-21542, with a Kd affinity constant of about 10⁻⁷ M or less. The present disclosure also encompasses antibodies, CAR and TCRs produced by such method.

[0037] The present disclosure further encompasses a polynucleotide encoding a chimeric protein or polypeptide, an antibody, a CAR and/or a non-HLA restricted TCR as herein defined, optionally linked to a heterologous regulatory control sequence and vectors comprising thereof. The present disclosure also encompasses an immune cell comprising a CAR and or a TCR, in particular a non-HLA restricted TCR as defined herein. Said immune cell can be allogenic or autologous. It is typically selected from T cells, Natural Killer T cells, CD4+/CD8+ T cells, TILs/tumor derived CD8 T cells, central memory CD8+ T cells, Treg, MAIT, Yδ T cells, human embryonic stem cells, and pluripotent stem cells from which lymphoid cells may be differentiated. In certain embodiment, the immune cell is defective for Suv39h1, in particular in said immune cell the Suv39h1 gene is disrupted by deletion of the entire gene, exon, or region, replacement with an exogenous sequence, and/or mutation by frameshift or missense mutation within the gene suv39h1 gene. The Suv39h1 gene is typically the human Suv39h1 gene encoding the human Suv39h1 protein referenced 043463 in UniProt. Methods of preparing such immune cells are also contemplated, for example, by delivering a nucleic acid or vector encoding any of the antibody, TCR, or CAR described herein to the cell, in vivo or ex vivo.

[0038] The present disclosure further encompasses a pharmaceutical composition comprising an effective amount of an immune cell as defined herein and a pharmaceutically acceptable excipient.

[0039] The present disclosure also encompasses therapeutic use, in particular for inhibiting cancer cell proliferation or for cancer treatment of a chimeric protein or polypeptide, an antibody a non-HLA restricted TCR, a CAR, a polynucleotide, a vector, an immune cell as herein defined or of a composition comprising thereof in a subject in need thereof. Typically, the composition further comprises a pharmaceutical excipient. Treatment as used herein includes both prophylactic and therapeutic treatment.

[0040] The present disclosure also encompasses the use in cell therapy of cancer, of a chimeric protein or polypeptide, an antibody a non-HLA restricted TCR, a CAR, a polynucleotide, a vector, an immune cell as herein defined or of a composition comprising thereof in a subject in need thereof. Typically, the composition further comprises a pharmaceutical excipient.

[0041] Pharmaceutical compositions comprising any of the foregoing, optionally with a sterile pharmaceutically acceptable excipient(s), carrier, and/or buffer are also contemplated as well as methods of using them.

[0042] In any of the embodiments described herein, the Cancer Therapeutic Products (i.e., the transmembrane chimeric protein or polypeptide, the antibody the non-HLA restricted TCR, the CAR, the polynucleotide, the vector, the immune cell as herein defined or the composition comprising thereof) as above defined can be administered in combination with at least one further therapeutic agent. Such further therapeutic agent can typically be a chemotherapeutic agent, or an immunotherapeutic agent, optionally a checkpoint inhibitor.

[0043] For example, according to the present disclosure, any of the Cancer Therapeutic Products can be administered in combination with an anti-immunosuppressive/immunostimulatory agent. For example, the subject is further administered with one or more checkpoint inhibitors typically selected from PD-1 inhibitors, PD-L1 inhibitors, Lag-3 inhibitors, Tim-3 inhibitors, TIGIT inhibitors, BTLA inhibitors, V-domain Ig suppressor of T-cell activation (VISTA) inhibitors and CTLA-4 inhibitors, or IDO inhibitors.

[0044] Various embodiments of the methods, chimeric proteins or polypeptides and Cancer Therapeutic Products are described in detailed below. Except for alternatives clearly mentioned, combinations of such embodiments are encompassed by the present application.

### DETAILED DISCLOSURE

[0045] Transposable elements (TEs) expression in normal tissues is silenced by DNA methylation established early during embryonic development. An additional layer of inhibition is provided by histone modifications. TEs can be re-activated in tumor cells. The inventors have discovered and provided clear evidence that non-canonical alternative splicing events between exons and TEs can be a source of tumor antigens, in particular of tumor-specific antigens.

[0046] The Inventors have developed a method for identifying a tumor antigen, and notably a tumor specific antigen. In particular, the inventors have identified a method for identifying tumor antigens derived from junctions between TEs and exons (JETs). In some embodiments, the present invention therefore relates to a method and identifying and selecting a tumor neoantigenic peptide encoded by a fusion (i.e. chimeric also named herein Junction Exon TE-JET) transcript sequence comprising a part of a TE sequence and a part of an exonic sequence.

[0047] The inventors further herein provide a set of transmembrane tumor chimeric proteins or polypeptides that represent excellent cell surface tumor neoantigen target candidates.

[0048] The neoantigenic tumor specific peptides identified by the method according to the present disclosure are highly immunogenic. Indeed, because they are derived from a fusion transcript (composed of a transposable element—TE—and an exonic sequence) from normal cells absent or expressed at low level, the peptides of the present disclosure are expected to exhibit very low immunological tolerance.

[0049] The present disclosure also allows selecting peptides having shared tumor neoepitopes among a population of patients. Such shared tumor peptides are of high therapeutic interest since they may be used in immunotherapy for a large population of patients.

### Definitions

[0050] According to the present disclosure, the term “disease” refers to any pathological state, including cancer diseases, in particular those forms of cancer diseases described herein.

[0051] The term “normal” refers to the healthy state or the conditions in a healthy subject or tissue, i.e., non-pathological conditions, wherein “healthy” preferably means non-cancerous.

[0052] Cancer (medical term: malignant neoplasm) is a class of diseases in which a group of cells display uncontrolled growth (division beyond the normal limits), invasion (intrusion on and destruction of adjacent tissues), and sometimes metastasis (spread to other locations in the body via lymph or blood). These three malignant properties of cancers differentiate them from benign tumors, which are self-limited, and do not invade or metastasize. Most cancers form a tumor but some, like leukemia, do not.

[0053] Malignant tumor is essentially synonymous with cancer. Malignancy, malignant neoplasm, and malignant tumor are essentially synonymous with cancer.

[0054] As used herein, the term “tumor” or “tumor disease” refers to an abnormal growth of cells (called neoplastic cells, tumorigenous cells or tumor cells) preferably forming a swelling or lesion. By “tumor cell” is meant an abnormal cell that grows by a rapid, uncontrolled cellular proliferation and continues to grow after the stimuli that initiated the new growth cease. Tumors show partial or complete lack of structural organization and functional coordination with the normal tissue, and usually form a distinct mass of tissue, which may be either benign, pre-malignant or malignant.

[0055] A benign tumor is a tumor that lacks all three of the malignant properties of a cancer. Thus, by definition, a benign tumor does not grow in an unlimited, aggressive manner, does not invade surrounding tissues, and does not spread to non-adjacent tissues (metastasize).

[0056] Neoplasm is an abnormal mass of tissue as a result of neoplasia. Neoplasia (new growth in Greek) is the abnormal proliferation of cells. The growth of the cells exceeds, and is uncoordinated with that of the normal tissues around it. The growth persists in the same excessive manner even after cessation of the stimuli. It usually causes a lump or tumor. Neoplasms may be benign, pre-malignant or malignant.

[0057] “Growth of a tumor” or “tumor growth” according to the present disclosure relates to the tendency of a tumor to increase its size and/or to the tendency of tumor cells to proliferate.

[0058] For purposes of the present disclosure, the terms “cancer” and “cancer disease” are used interchangeably with the terms “tumor” and “tumor disease”.

[0059] Cancers are classified by the type of cell that resembles the tumor and, therefore, the tissue presumed to be the origin of the tumor. These are the histology and the location, respectively.

[0060] According to the present application, cancer may affect any one of the following tissues or organs: breast; liver; kidney; heart, mediastinum, pleura; floor of mouth; lip; salivary glands; tongue; gums; oral cavity; palate; tonsil; larynx; trachea; bronchus, lung; pharynx, hypopharynx, oropharynx, nasopharynx; esophagus; digestive organs such as stomach, intrahepatic bile ducts, biliary tract, pancreas, small intestine, colon; rectum; urinary organs such as bladder, gallbladder, ureter; rectosigmoid junction; anus, anal canal; skin; bone; joints, articular cartilage of limbs; eye and adnexa; brain; peripheral nerves, autonomic nervous system; spinal cord, cranial nerves, meninges; and various parts of the central nervous system; connective, subcutaneous and other soft tissues; retroperitoneum, peritoneum; adrenal gland; thyroid gland; endocrine glands and related structures; female genital organs such as ovary, uterus, cervix uteri; corpus uteri, vagina, vulva; male genital organs such as penis, testis and prostate gland; hematopoietic and reticuloendothelial systems; blood; lymph nodes; thymus.

[0061] The term “cancer” according to the disclosure therefore comprises leukemias, seminomas, melanomas, teratomas, lymphomas, neuroblastomas, gliomas, rectal cancer, endometrial cancer, kidney cancer, adrenal cancer, thyroid cancer, blood cancer, skin cancer, cancer of the brain, cervical cancer, intestinal cancer, liver cancer, colon cancer, stomach cancer, intestine cancer, head and neck cancer, gastrointestinal cancer, lymph node cancer, esophagus cancer, colorectal cancer, pancreas cancer, ear, nose and throat (ENT) cancer, breast cancer, prostate cancer, cancer of the uterus, ovarian cancer and lung cancer and the metastases thereof. Examples thereof are lung carcinomas, mamma carcinomas, prostate carcinomas, colon carcinomas, renal cell carcinomas, cervical carcinomas, or metastases of the cancer types or tumors described above. The term cancer according to the present disclosure also comprises cancer metastases and relapse of cancer.

[0062] The main types of lung cancer are small cell lung carcinoma (SCLC) and non-small cell lung carcinoma (NSCLC). There are three main sub-types of the non-small cell lung carcinomas: squamous cell lung carcinoma, lung adenocarcinoma (LUAD), and large cell lung carcinoma. Adenocarcinomas account for approximately 10% of lung cancers. This cancer usually is seen peripherally in the lungs, as opposed to small cell lung cancer and squamous cell lung cancer, which both tend to be more centrally located.

[0063] By “metastasis” is meant the spread of cancer cells from its original site to another part of the body. The formation of metastasis is a very complex process and depends on detachment of malignant cells from the primary tumor, invasion of the extracellular matrix, penetration of the endothelial basement membranes to enter the body cavity and vessels, and then, after being transported by the blood, infiltration of target organs. Finally, the growth of a new tumor, i.e. a secondary tumor or metastatic tumor, at the target site depends on angiogenesis. Tumor metastasis often occurs even after the removal of the primary tumor because tumor cells or components may remain and develop metastatic potential. In one embodiment, the term “metastasis” according to the present disclosure relates to “distant metastasis” which relates to a metastasis which is remote from the primary tumor and the regional lymph node system.

[0064] The cells of a secondary or metastatic tumor are like those in the original tumor. This means, for example, that, if ovarian cancer metastasizes to the liver, the secondary tumor is made up of abnormal ovarian cells, not of abnormal liver cells. The tumor in the liver is then called metastatic ovarian cancer, not liver cancer.

[0065] A relapse or recurrence occurs when a person is affected again by a condition that affected them in the past. For example, if a patient has suffered from a tumor disease, has received a successful treatment of said disease and again develops said disease said newly developed disease may be considered as relapse or recurrence. However, according to the present disclosure, a relapse or recurrence of a tumor disease may but does not necessarily occur at the site of the original tumor disease. Thus, for example, if a patient has suffered from ovarian tumor and has received a successful treatment a relapse or recurrence may be the occurrence of an ovarian tumor or the occurrence of a tumor at a site different to ovary. A relapse or recurrence of a tumor also includes situations wherein a tumor occurs at a site different to the site of the original tumor as well as at the site of the original tumor. Preferably, the original tumor for which the patient has received a treatment is a primary tumor and the tumor at a site different to the site of the original tumor is a secondary or metastatic tumor.

[0066] By “treat” is meant to administer a compound or composition as described herein to a subject in order to prevent or eliminate a disease, including reducing the size of a tumor or the number of tumors in a subject; arrest or slow a disease in a subject; inhibit or slow the development of a new disease in a subject; decrease the frequency or severity of symptoms and/or recurrences in a subject who currently has or who previously has had a disease; and/or prolong, i.e. increase the lifespan of the subject. In particular, the term “treatment of a disease” includes curing, shortening the duration, ameliorating, preventing, slowing down or inhibiting progression or worsening, or preventing or delaying the onset of a disease or the symptoms thereof.

[0067] By “being at risk” is meant a subject, i.e. a patient, that is identified as having a higher than normal chance of developing a disease, in particular cancer, compared to the general population.

[0068] In addition, a subject who has had, or who currently has, a disease, in particular cancer, is a subject who has an increased risk for developing a disease, as such a subject may continue to develop a disease. Subjects who currently have, or who have had, a cancer also have an increased risk for cancer metastases.

[0069] The therapeutically active agents, vaccines and compositions described herein may be administered via any conventional route, including by injection or infusion.

[0070] The agents described herein are administered in effective amounts. An “effective amount” refers to the amount which achieves a desired reaction or a desired effect alone or together with further doses or together with further therapeutic agents. In the case of treatment of a particular disease or of a particular condition, the desired reaction preferably relates to inhibition of the course of the disease. This comprises slowing down the progress of the disease and, in particular, interrupting or reversing the progress of the disease. The desired reaction in a treatment of a disease or of a condition may also be delay of the onset or a prevention of the onset of said disease or said condition.

[0071] An effective amount of an agent described herein will depend on the condition to be treated, the severity of the disease, the individual parameters of the patient, including age, physiological condition, size and weight, the duration of treatment, the type of an accompanying therapy (if present), the specific route of administration and similar factors. Accordingly, the doses administered of the agents described herein may depend on various of such parameters. In the case that a reaction in a patient is insufficient with an initial dose, higher doses (or effectively higher doses achieved by a different, more localized route of administration) may be used.

[0072] The pharmaceutical compositions as herein described are preferably sterile and contain an effective amount of the therapeutically active substance to generate the desired reaction or the desired effect.

[0073] The pharmaceutical compositions as herein described are generally administered in pharmaceutically compatible amounts and in pharmaceutically compatible preparation. The term “pharmaceutically compatible” refers to a nontoxic material which does not interact with the action of the active component of the pharmaceutical composition. Preparations of this kind may usually contain salts, buffer substances, preservatives, carriers, supplementing immunity-enhancing substances such as adjuvants, e.g. CpG oligonucleotides, cytokines, chemokines, saponin, GM-CSF and/or RNA and, where appropriate, other therapeutically active compounds. When used in medicine, the salts should be pharmaceutically compatible.

[0074] As used herein, the term “nucleic acid molecules” include any nucleic acid molecule that encodes a polypeptide of interest or a fragment thereof. Such nucleic acid molecules need not be 100% homologous or identical with an endogenous nucleic acid sequence but may exhibit substantial identity. Polynucleotides having “substantial identity” or “substantial homology” to an endogenous sequence are typically capable of hybridizing with at least one strand of a double-stranded nucleic acid molecule. By “hybridize” is meant a pair to form a double-stranded molecule between complementary polynucleotide sequences (e.g., a gene described herein), or portions thereof, under various conditions of stringency. (See, e.g., Wahl, G. M. and S. L. Berger (1987) Methods Enzymol. 152:399; Kimmel, A. R. (1987) Methods Enzymol. 152:507). For example, stringent salt concentration will ordinarily be less than about 750 mM NaCl and 75 mM trisodium citrate, e.g., less than about 500 mM NaCl and 50 mM trisodium citrate, or less than about 250 mM NaCl and 25 mM trisodium citrate. Low stringency hybridization can be obtained in the absence of organic solvent, e.g., formamide, while high stringency hybridization can be obtained in the presence of at least about 35% formamide, e.g., at least about 50% formamide. Stringent temperature conditions will ordinarily include temperatures of at least about 30° C., at least about 37° C., or at least about 42° C. Varying additional parameters, such as hybridization time, the concentration of detergent, e.g., sodium dodecyl sulfate (SDS), and the inclusion or exclusion of carrier DNA, are well known to those skilled in the art. Various levels of stringency are accomplished by combining these various conditions as needed. In certain embodiments, hybridization will occur at 30° C. in 750 mM NaCl, 75 mM trisodium citrate, and 1% SDS. In certain embodiments, hybridization will occur at 37° C. in 500 mM NaCl, 50 mM trisodium citrate, 1% SDS, 35% formamide, and 100 μg/ml denatured salmon sperm DNA (ssDNA). In certain embodiments, hybridization will occur at 42° C. in 250 mM NaCl, 25 mM trisodium citrate, 1% SDS, 50% formamide, and 200 μg/ml ssDNA. ETseful variations on these conditions will be readily apparent to those skilled in the art. For most applications, washing steps that follow hybridization will also vary in stringency. Wash stringency conditions can be defined by salt concentration and by temperature. As above, wash stringency can be increased by decreasing salt concentration or by increasing temperature. For example, stringent salt concentration for the wash steps can be less than about 30 mM NaCl and 3 mM trisodium citrate, e.g., less than about 15 mM NaCl and 1.5 mM trisodium citrate. Stringent temperature conditions for the wash steps will ordinarily include a temperature of at least about 25° C., of at least about 42° C., or of at least about 68° C. In certain embodiments, wash steps will occur at 25° C. in 30 mM NaCl, 3 mM trisodium citrate, and 0.1% SDS. In certain embodiments, wash steps will occur at 42° C. in 15 mM NaCl, 1.5 mM trisodium citrate, and 0.1% SDS. In certain embodiments, wash steps will occur at 68° C. in 15 mM NaCl, 1.5 mM trisodium citrate, and 0.1% SDS. Additional variations on these conditions will be readily apparent to those skilled in the art. Hybridization techniques are well known to those skilled in the art and are described, for example, in Benton and Davis (Science 196:180, 1977); Grunstein and Rogness (Proc. Natl. Acad. Sci., USA 72:3961, 1975); Ausubel et al. (Current Protocols in Molecular Biology, Wiley Interscience, New York, 2001); Berger and Kimmel (Guide to Molecular Cloning Techniques, 1987, Academic Press, New York); and Sambrook et al., Molecular Cloning: A Laboratory Manual, Cold Spring Harbor Laboratory Press, New York.

[0075] By “substantially identical” or “substantially homologous” is meant a polypeptide or nucleic acid molecule exhibiting at least about 50% homologous or identical to a reference amino acid sequence (for example, any one of the amino acid sequences described herein) or nucleic acid sequence (for example, any one of the nucleic acid sequences described herein). In certain embodiments, such a sequence is at least about 60%, at least about 65%, at least about 70%, at least about 75%, at least about 80%, at least about 85%, at least about 90%, at least about 95%, at least about 99%, or at least about 100% homologous or identical to the sequence of the amino acid or nucleic acid used for comparison.

[0076] Sequence identity can be measured by using sequence analysis software (for example, Sequence Analysis Software Package of the Genetics Computer Group, University of Wisconsin Biotechnology Center, 1710 University Avenue, Madison, Wis. 53705, BLAST, BESTFIT, GAP, or PILEUP/PRETTYBOX programs). Such software matches identical or similar sequences by assigning degrees of homology to various substitutions, deletions, and/or other modifications. Conservative substitutions typically include substitutions within the following groups: glycine, alanine; valine, isoleucine, leucine; aspartic acid, glutamic acid, asparagine, glutamine; serine, threonine; lysine, arginine; and phenylalanine, tyrosine. In an exemplary approach to determining the degree of identity, a BLAST program may be used, with a probability score between e-3 and e-100 indicating a closely related sequence.

[0077] By “analog” is meant a structurally related polypeptide or nucleic acid molecule having the function of a reference polypeptide or nucleic acid molecule.

[0078] Unless specifically stated or obvious from context, as used herein, the term “about” is to be understood as within a range of normal tolerance in the art, for example within 2 standard deviations of the mean. About can be understood as within 50%, 45%, 40%, 35%, 30%, 25%, 20%, 15%, 10%, 9%, 8%, 7%, 6%, 5%, 4%, 3%, 2%, 1%, 0.5%, 0.1%, 0.05%, or 0.01% of the stated value. Unless otherwise clear from context, all numerical values provided herein are modified by the term about.

[0079] A “transposable element” as used herein is a repeated DNA sequence DNA sequences that is able to move from one location to another in the genome either through an RNA copy generated by a reverse transcriptase (Class I TEs, retrotransposons), or by excising themselves from their original location (Class II TEs, or DNA transposons). It thus includes both class I (retrotransposons, including those containing LTRs, LINEs and SINEs) and class II (DNA transposons) endogenously part of the genome (i.e.: not from infection). This includes both autonomous and non-autonomous elements from both classes. According to the present disclosure the TE sequences can be for example selected from TE of class I, such as retrotransposons including Endogenous RetroVirus (ERVs), Long interspersed nuclear elements (LINEs) and short interspersed nuclear element (SINEs) and mammalian long terminal repeat transposon (MaLR), and TE of class II, such as DNA transposons endogenously part of the genome.

[0080] Retrotransposons are by far more abundant and their characteristics are similar to retroviruses, such as HIV. Retrotransposons function via reverse transcription of an RNA intermediate replicative mechanism. They are commonly grouped into three main orders: retrotransposons with long terminal repeats (LTRs) flanking the retroelement main body, which encode reverse transcriptase, similar to retroviruses; retroposons with long interspersed nuclear elements (LINEs, LINE-1s, or L1s), which encode reverse transcriptase but lack LTRs, and are transcribed by RNA polymerase II; and retrotransposons with short interspersed nuclear elements (SINEs) that do not encode reverse transcriptase and are transcribed by RNA polymerase III. DNA transposons have a transposition mechanism that do not involve an RNA intermediate. The transpositions are catalyzed by several transposase enzymes. LTRs include endogenous retroviruses (ERVs), while non-LTR TEs subdivide into long-interspersed (LINEs) and short interspersed elements (SINEs), nonautonomous transposons mobilized by the LINE integration machinery. These lineages are composed of phylogenetically related families, further branching out into multiple subfamilies, each originating from one precursor copy. With time, the accumulation of mutations introduced divergence in the consensus sequence within members of each subfamily. For review on TE retrotransposon, see Richardson, Sandra R et al. “The Influence of LINE-1 and SINE Retrotransposons on Mammalian Genomes.” Microbiology spectrum vol. 3, 2 (2015): MDNA3-0061-2014.

[0081] A typical L1 element is approximately 6,000 base pairs (bp) long and consists of two non-overlapping open reading frames (ORF) which are flanked by untranslated regions (UTR) and target site duplications. LINE-1 retrotransposons have been amplifying in mammalian genomes for greater than 160 million years. In humans, the vast majority of LINE-1 sequences have amplified since the divergence of the ancestral mouse and human lineages approximately 65-75 million years ago. Sequence comparisons between individual genomic LINE-1 sequences and a consensus sequence derived from modern, active LINE-1s can be used to estimate the age of genomic LINE-1s (Khan H, Smit A, Boissinot S; Genome Res. 2006 January; 16 (1): 78-87). L1 subfamilies typically categorize into old (L1M, AluJ), intermediate (L1P, L1PB, AluS), young (L1HS, L1PA, AluY) and related (HAL, FAM) subfamilies. In humans, the only autonomously active family is the long-interspersed element-1 (LINE-1 or L1), however a few L1 copies are still retrotransposition competent, all of them belonging to the youngest human-specific L1HS subfamily.

[0082] SVA elements comprise an evolutionarily young, non-autonomous retrotransposon family that arose in primate lineages approximately 25 million years ago (Hancks D C, Kazazian H H Jr, Semin Cancer Biol. 2010 August; 20 (4): 234-45). A typical SVA element is approximately 2,000 bp and has a composite structure that consists of: 1) a hexameric CCCTCT repeat; 2) an inverted Alu-like element repeat; 3) a set of GC-rich variable nucleotide tandem repeats (VNTRs); 4) a SINE-R sequence that shares homology with HERVK-10, an inactive LTR retrotransposon; and 5) a canonical cleavage polyadenylation specificity factor (CPSF) binding site that is followed by a poly (A) tract. The youngest SVA subfamilies include SVA-D, SVA-E, SVA-F, and SVA-F1 subfamilies.

[0083] A “messenger RNA (mRNA)” is a single-stranded RNA molecule that corresponds to the genetic sequence of a gene and is read by the ribosome in the process of producing a protein. mRNA is created during the process of transcription, where the enzyme RNA polymerase converts genes into primary transcript mRNA (also known as pre-mRNA). This pre-mRNA usually still contains introns, regions that will not go on to code for the final amino acid sequence. These are removed in the process of RNA splicing, leaving only exons, regions that will encode the protein. This exon sequence constitutes mature mRNA. Mature mRNA is then read by the ribosome, and, utilizing amino acids carried by transfer RNA (tRNA), the ribosome creates the peptide sequence a process called translation.

[0084] A “transcript” as herein intended is a messenger RNA (or mRNA) or a part of a mRNA which is expressed by an organism, notably in a particular tissue or even in a particular tissue. Expression of a transcript varies depending on many factors. Expression of a transcript may be modified in a cancer cell as compared to a normal healthy cell.

[0085] A “transcriptome” as herein intended is the full set of messenger RNA, or mRNA, molecules expressed or transcribed by the gene of a cell. In some embodiments, the term “transcriptome” can also be used to describe the array of mRNA transcripts produced in a particular cell (or tissue type). In contrast with the genome, which is characterized by its stability, the transcriptome actively changes. In fact, an organism's transcriptome varies depending on many factors, including stage of development, environmental and physiological conditions. Typically, also, the transcriptome is modified in a cancer cell as compared to a corresponding normal healthy cell. Typically, the transcriptome as herein intended is the human transcriptome. The terms “transcriptomic pattern” and “transcriptome” are used herein as synonyms.

[0086] A reading frame is a way of dividing the sequence of nucleotides in a nucleic acid (DNA or RNA) molecule into a set of consecutive, non-overlapping triplets.

[0087] An open reading frame (ORF) is the part of a reading frame that has the ability to be translated into a peptide. An ORF is a continuous stretch of codons that contain a start codon (for example AUG) at a transcription starting site (TSS) and a stop codon (for example UAA, UAG or UGA). An ATG codon within the ORF (not necessarily the first) may indicate where translation starts. The transcription termination site is located after the ORF, beyond the translation stop codon. In eukaryotic genes with multiple exons, ORFs span intron/exon regions, which may be spliced together after transcription of the ORF to yield the final mRNA for protein translation.

[0088] A “canonical ORF” as herein intended is a protein coding sequence with specified reading frame within a mRNA sequence which is described or annotated in databases such as for example Ensembl genome/transcriptome/proteome database collection (typically HG19). Typically, a canonical ORF is the same as one of the exons in normal healthy cells.

[0089] A “non-canonical ORF” as herein intended is a protein coding sequence with specified reading frame within a mRNA sequence which is not described (i.e. unannotated) in genome databases such as for example in Ensembl genome/transcriptome/proteome database. Typically a non-canonical ORF means thus that the reading frame is shifted compared to the usual reading frame of exons in normal healthy cells. In some embodiments however, a non-canonical can be described in genome databases (such as Ensembl database), but the mRNA sequence represents minor species in normal cells. By minor species it is typically intended less that 5%, notably less than 2%, or preferentially less than 1% species in normal cells.

[0090] An exon is any part of a gene that will encode a part of the final mature RNA produced by that gene after introns have been removed by RNA splicing. The term exon refers to both the DNA sequence within a gene and to the corresponding sequence in RNA transcripts. In RNA splicing, introns are removed and exons are covalently joined to one another as part of generating the mature messenger RNA. An exonic sequence as per the present applicant comprises at least a portion of one or more exon. Typically, the exonic sequence comprises at least a portion of one or 2 exons.

[0091] The untranslated sequences in 3′end and in 5′ end (3′UTR and 5′UTR) present in mature RNA after splicing are exonic sequences, but are non-coding sequences because these sequences are located upstream of the start codon for the translation (5′UTR) or downstream of the stop codon ending the translation (3′UTR).

[0092] In the present application, the terms “fusion transcript”, “chimeric transcripts” “TE-exon transcript”, or “Junction Exon-TE” (JET) are used indifferently as synonyms. A “fusion or a chimeric” “transcript or sequence”, as per the present disclosure is defined as a transcript that aligns in part with an exon sequence and in part with a transposable element (TE) sequence. A fusion, or chimeric, transcript is also shortly named herein JET (junction between exon and TE). Typically, a fusion transcript according to the present description has a normalized number of read greater than 2.10-6. The normalized number of reads is defined as the number of reads that cover the fusion divided by the library size of the sample.

[0093] The term “polypeptide,” is used in the present specification to designate a series of residues, typically L-amino acids, connected one to the other, typically by peptide bonds between the α-amino and carboxyl groups of adjacent amino acids. The polypeptides or peptides can be a variety of lengths, either in their neutral (uncharged) forms or in forms which are salts, and either free of modifications such as glycosylation, side chain oxidation, or phosphorylation or containing these modifications, subject to the condition that the modification not destroy the biological activity of the polypeptides as herein described. Except is expressively mentioned the terms “polypeptide”, peptide and proteins are interchangeably with reference to the JET derived neoantigenic peptides, polypeptides or proteins as herein described.

[0094] As used herein pJETs are peptides or polypeptides derived from (i.e. encoded by) chimeric/fusion transcripts or JETs. pJETs are also named herein translated JETs.

[0095] A “reference genome, or “representative genome” is a digital nucleic acid sequence data base, assembled by scientists as a representative example of species set of genes. As they are often assembled from the sequencing of DNA from a number of donors, reference genomes do not accurately represent the set of genes of any single individual (animal or person). Instead a reference provides a haploid mosaic of different DNA sequences from each donor.

[0096] RNA-Seq (named as an abbreviation of RNA sequencing) is a sequencing technique which uses next-generation sequencing (NGS) to reveal the presence and quantity of RNA (typically messenger RNA, mRNA) in a biological sample and generates an enormous numbers of raw sequencing reads (typically at least in the tens of millions). Single-cell RNA sequencing (scRNA-Seq) provides the expression profiles of an individual cell. A read refers to an RNA sequence from one RNA fragment from a biological sample or a single cell. The RNA sample that was sequenced is called the RNA library. RNA sequencing data are thus typically called RNA reads.

[0097] In the present application, “MHC molecule” or “HLA molecule” refers to at least one MHC/HLA class I molecule or at least one MHC/HLA Class II molecule. MHC class I proteins form a functional receptor on most nucleated cells of the body. There are 3 major MHC class I genes in HLA: HLA-A, HLA-B, HLA-C and three minor genes HLA-E, HLA-F and HLA-G. 32-microglobulin binds with major and minor gene subunits to produce a heterodimer. MHC molecules of class I consist of a heavy chain and a light chain and can bind a peptide of about 8 to 11 amino acids, but usually 8 or 9 amino acids, if this peptide has suitable binding motifs, and presenting it to cytotoxic T-lymphocytes. The binding of the peptide is stabilized at its two ends by contacts between atoms in the main chain of the peptide and invariant sites in the peptide-binding groove of all MHC class I molecules. There are invariant sites at both ends of the groove which bind the amino and carboxy termini of the peptide. Variations in peptide length are accommodated by a kinking in the peptide backbone, often at proline or glycine residues that allow the required flexibility. The peptide bound by the MHC molecules of class I usually originates from an endogenous protein antigen. As an example, the heavy chain of the MHC molecules of class I is typically an HLA-A, HLA-B or HLA-C monomer, and the light chain is β-2-microglobulin, in humans. There are 3 major and 2 minor MHC class II proteins encoded by the HLA. The genes of the class II combine to form heterodimeric (αβ) protein receptors that are typically expressed on the surface of antigen-presenting cells. The peptide bound by the MHC molecules of class II usually originates from an extracellular or exogenous protein antigen. As an example, the α-chain and the β-chain are in particular HLA-DR, HLA-DQ and HLA-DP monomers, in humans. MHC class II molecules are capable of binding a peptide of about 8 to 20 amino acids, notably from 10 to 25 amino acids or from 13 to 25 amino acids if this peptide has suitable binding motifs, and of presenting it to T-helper cells. The peptide lies in an extended conformation along the MHC II peptide-binding groove which (unlike the MHC class I peptide-binding groove) is open at both ends. It is held in place mainly by main-chain atom contacts with conserved residues that line the peptide-binding groove.

[0098] The term “peptidome” refers to the complete set of peptides expressed by a particular genome, or present within a particular organism or cell type (such as a cancer cell). Proteomic analysis (proteomics) thus refers to the separation, identification, and quantification of the entire set of peptides or proteins expressed by a genome, a cell, or a tissue at a specific point in time.

[0099] Proteomics analysis are typically based on two major techniques, namely two-dimensional gel electrophoresis (2-DGE) (Harper S et al., In: Coligan J E, Dunn B M, Speicher D W, Wing-field P T, editors. Current Protocols in Protein Science. John Wiley & Sons; Hoboken, N.J.: 1998. pp. 10.4.1-10.4.36.) and Mass Spectrometry (MS) (Aebersold & Mann, 2003), which are both powerful methods for the analysis of complex mixtures of proteins. HPLC is an alternative separation technique for proteomic studies, especially in separation and identification of low-molecular-weight proteins and peptides (Garbis et al., 2005). MS allows the determination of the molecular mass of proteins or peptides based on the mass to charge ratio (m/z) of ions in the gas phase. The terms “gel-based” or “gel-free” proteomics are used in relation to the applied separation techniques, 2-DGE or HPLC; proteomics approaches can also be “bottom-up” or “top-down,” which basically identify proteins from their protease (e.g., trypsin) digests or, as a whole, via a mass spectrometer, respectively.

[0100] Bottom-up proteomics is a common method to identify proteins from a biological sample (tissue(s) or cells) and characterize their amino acid sequences and post-translational modifications by proteolytic digestion of proteins prior to analysis by mass spectrometry. The crude protein extract is enzymatically digested, followed by one or more dimensions of separation of the peptides typically by liquid chromatography coupled to mass spectrometry, a technique known as shotgun proteomics. By comparing the masses of the proteolytic peptides or their tandem mass spectra with those predicted from a sequence database or annotated peptide spectral in a peptide spectral library, peptides can be identified, and multiple peptide identifications assembled into a protein identification.

[0101] In top-down proteomics, intact proteins are purified prior to digestion and/or fragmentation either within the mass spectrometer or by 2D electrophoresis. Top-down proteomics either uses an ion trapping mass spectrometer to store an isolated protein ion for mass measurement and tandem mass spectrometry (MS/MS) analysis or other protein purification methods such as two-dimensional gel electrophoresis in conjunction with MS/MS.

[0102] From the data generated by the MS, the protein is either sequenced de novo by manual mass analyses of the spectra or processed automatically via sequence search engines such as SEQUEST, Mascot, Phenyx, X!Tandem, and OMSSA. These algorithms are developed based on the correlation between experimental and theoretical MS/MS data; the latter being generated from in silico digestion of protein databases such as UniProt/Swiss-Prot (Deutsch, Lam, & Aebersold, 2008).

[0103] The term “immunopeptidome”, also commonly named “immunopeptidomic pattern”, “pMHC repertoire”, or “MHC-ligandome” or “HLA ligandome”, refers to the complete set of peptides within a particular cell type, which are bound to at least one MHC/HLA molecule at the cell surface. Correspondingly, “immunopeptidomics” has emerged as a term to describe analysis of the MHC/HLA-ligandome. The most common immunopeptidomics methods rely on mass spectrometry (MS). Immunopeptidomics samples are generally prepared by isolating MHCs, for example by using an allele-specific antibody, pan-specific antibody, or engineered affinity tag system, from lysed cells or tissues. Isolated complexes are acid eluted, and peptides are purified from the MHC molecules using molecular weight cut-off filtration (MWCO), solid phase extraction or other techniques, and are subsequently analyzed by MS (see for example for review L. E. Stopfer et al., Immuno-Oncology and Technology, Volume 11, 2021, 100042).

[0104] As used herein, the term “antibody” means not only intact antibody molecules, but also fragments of antibody molecules that retain immunogen-binding ability. Such fragments are also well known in the art and are regularly employed both in vitro and in vivo. Accordingly, as used herein, the term “antibody” means not only intact immunoglobulin molecules but also the well-known active fragments F(ab′)2, and Fab.

[0105] F(ab′)2, and Fab fragments that lack the Fc fragment of intact antibody, clear more rapidly from the circulation, and may have less non-specific tissue binding of an intact antibody (Wahl et ah, J. Nucl. Med. 24:316-325 (1983).

[0106] As used herein, antibodies include whole native antibodies, bispecific antibodies; chimeric antibodies; Fab, Fab′, single chain V region fragments (scFv), fusion polypeptides, and unconventional antibodies.

[0107] In certain embodiments, an antibody is a glycoprotein comprising at least two heavy (H) chains and two light (L) chains inter-connected by disulfide bonds. Each heavy chain is comprised of a heavy chain variable region (abbreviated herein as V_{H}) and a heavy chain constant (CH) region. The heavy chain constant region is comprised of three domains, CH1, CH2 and CH3. Each light chain is comprised of a light chain variable region (abbreviated herein as V_{L}) and a light chain constant C_{L} region. The light chain constant region is comprised of one domain, C_{L}. The V_{H} and V_{L} regions can be further sub-divided into regions of hypervariability, termed complementarity determining regions (CDR), interspersed with regions that are more conserved, termed framework regions (FR). Each V_{H} and V_{L} is composed of three CDRs and four FRs arranged from amino-terminus to carboxy-terminus in the following order: FR1, CDR1, FR2, CDR2, FR3, CDR3, FR4.

[0108] The variable regions of the heavy and light chains contain a binding domain that interacts with an antigen. The constant regions of the antibodies may mediate the binding of the immunoglobulin to host tissues or factors, including various cells of the immune system (e.g., effector cells) and the first component (C1 q) of the classical complement system.

[0109] As used herein, “CDRs” are defined as the complementarity determining region amino acid sequences of an antibody which are the hypervariable regions of immunoglobulin heavy and light chains (See, e.g., Rabat et al., Sequences of Proteins of Immunological Interest, 4th U. S. Department of Health and Human Services, National Institutes of Health (1987). Generally, antibodies comprise three heavy chain and three light chain CDRs or CDR regions in the variable region. CDRs provide the majority of contact residues for the binding of the antibody to the antigen or epitope. In certain embodiments, the CDRs regions are delineated using the Rabat system (Rabat, E. A., et al. (1991) Sequences of Proteins of Immunological Interest, Fifth Edition, ET.S. Department of Health and Human Services, NIH Publication No. 91-3242).

[0110] As used herein, the term “single-chain variable fragment” or “scFv” is a fusion protein of the variable regions of the heavy (V_{H}) and light chains (V_{L}) of an immunoglobulin covalently linked to form a V_{H}::V_{L} heterodimer. The V_{H} and V_{L} are either joined directly or joined by a peptide-encoding linker (e.g., 10, 15, 20, 25 amino acids), which connects the N-terminus of the V_{H} with the C-terminus of the V_{L}, or the C-terminus of the V_{H} with the N-terminus of the V_{L}. The linker is usually rich in glycine for flexibility, as well as serine or threonine for solubility. Despite removal of the constant regions and the introduction of a linker, scFv proteins retain the specificity of the original immunoglobulin. Single chain Fv polypeptide antibodies can be expressed from a nucleic acid including V_{H}- and V_{L}-encoding sequences as described by Huston, et al. (Proc. Nat. Acad. Sci. USA, 85:5879-5883, 1988). See, also, U.S. Pat. Nos. 5,091,513, 5,132,405 and 4,956,778; and U.S. Patent Publication Nos. 20050196754 and 20050196754.

[0111] As used herein, the term “affinity” is meant a measure of binding strength. Affinity can depend on the closeness of stereochemical fit between antibody combining sites and antigen determinants, on the size of the area of contact between them, and/or on the distribution of charged and hydrophobic groups. As used herein, the term “affinity” also includes “avidity”, which refers to the strength of the antigen-antibody bond after formation of reversible complexes. Methods for calculating the affinity of an antibody for an antigen are known in the art, including, but not limited to, various antigen-binding experiments, e.g., functional assays (e.g., flow cytometry assay). surface plasmon resonance assays such as BIACORE assays, and kinetic exclusion assays such as KINEXA assays

[0112] The term “chimeric antigen receptor” or “CAR” as used herein refers to a molecule comprising an extracellular antigen-binding domain that is fused to an intracellular signalling domain that is capable of activating or stimulating an immunoresponsive cell, and a transmembrane domain. In certain embodiments, the extracellular antigen-binding domain of a CAR comprises a scFv.

[0113] The scFv can be derived from fusing the variable heavy and light regions of an antibody. Alternatively or additionally, the scFv may be derived from Fab's (instead of from an antibody, e.g., obtained from Fab libraries). In certain embodiments, the scFv is fused to the transmembrane domain and then to the intracellular signaling domain. In certain embodiments, the CAR has a high binding affinity or avidity for the antigen.

[0114] The term “antigen-binding domain” as used herein refers to a domain capable of specifically binding a particular antigenic determinant or set of antigenic determinants present on a cell.

[0115] The term “immune cell” as herein intended typically encompasses T cells, Natural Killer T cells, CD4+/CD8+ T cells, TILs/tumor derived CD8 T cells, central memory CD8+ T cells, Treg, MAIT, Yδ T cells, human embryonic stem cells, and pluripotent stem cells from which lymphoid cells may be differentiated.

[0116] By “isolated cell” is meant a cell that is separated from the molecular and/or cellular components that naturally accompany the cell.

[0117] The terms “isolated,” “purified,” or “biologically pure” refer to material that is free to varying degrees from components which normally accompany it as found in its native state. “Isolate” denotes a degree of separation from original source or surroundings. “Purify” denotes a degree of separation that is higher than isolation. A “purified” or “biologically pure” protein is sufficiently free of other materials such that any impurities do not materially affect the biological properties of the protein or cause other adverse consequences. That is, a nucleic acid or peptide is purified if it is substantially free of cellular material, viral material, or culture medium when produced by recombinant DNA techniques, or chemical precursors or other chemicals when chemically synthesized. Purity and homogeneity are typically determined using analytical chemistry techniques, for example, polyacrylamide gel electrophoresis or high performance liquid chromatography. The term “purified” can denote that a nucleic acid or protein gives rise to essentially one band in an electrophoretic gel. For a protein that can be subjected to modifications, for example, phosphorylation or glycosylation, different modifications may give rise to different isolated proteins, which can be separately purified.

### Method for Selecting a Tumor Neoantigenic Peptide

[0118] The method for selecting a tumor neoantigenic peptide as per the present disclosure comprises:
[0119] a step of identifying, among mRNA sequences from a cancer cell sample of a subject, a fusion transcript (or JET) sequence comprising a transposable element (TE) sequence and an exonic sequence, and including an open reading frame (ORF), and
[0120] a step of selecting a tumor neoantigenic peptide of at least 8 amino acids, encoded by a part of said ORF of the fusion transcript sequence,
   wherein said ORF overlaps the junction between the TE and the exonic sequence, is pure TE and/or is non-canonical, and
   wherein said tumor neoantigenic peptide binds to at least one Major Histocompatibility Complex (MHC) molecule of said subject.

[0121] Typically, a peptide translated from a part of non-canonical ORF of an exonic sequence is recognized as non-self by the immune system.

[0122] In some embodiments, the exonic sequence is from an oncogene and/or a tumor suppressor gene and/or from one of their mutated variants.

[0123] Conceptually, cancer is a result of consecutive somatic mutation accumulation. Many studies have shown that both the gain of function in oncogenes and the loss of function in tumor-suppressor genes are required for the development of cancer from a normal cell. For a diploid organism, gain-of-function mutations are often dominant or semi-dominant, whereas loss-of-function mutations are usually recessive. Two-hit hypothesis of oncogenesis proposes that the development of cancer is initiated by the loss of both alleles of a tumor-suppressor gene.

[0124] Oncogenes (also named cancer genes) are genes whose action positively promotes cell proliferation or growth. The normal nonmutant versions are known as proto-oncogenes. The mutant versions are excessively or inappropriately active leading to tumor growth. Oncogenes can be identified in the Cancer Gene Marker Database (CGMD) (Pradeepkiran, J., Sainath, S., Kramthi Kumar, K. et al. CGMD: Sci Rep 5, 12035 (2015) “An integrated database of cancer genes and markers”). Oncogenes (ONCs) can also be downloaded from Network of Cancer Genes database (NCG 5.0) (An O, Dall'Olio G M, Mourikis T P, Ciccarelli F D, Nucleic Acids Res. 2016 Jan. 4; 44 (D1): D992-9; “NCG 5.0: updates of a manually curated repository of cancer genes and associated properties from cancer mutational screenings”). Non-limitatives examples of oncogenes include: L-MYC, LYL-1, LYT-10, LYT-10/Cal, MAS, MDM-2, MLL, MOS, MTG8 AML1, MYB, MYH11 CBFB, NEU, N-MYC, OST, PAX-5, PBX1/E2A, PIM-1, PRAD-1, RAF, RAR PML, RAS-H, RAS-K, RAS-N, REL NRG, RET, RHOM1, RHOM2, ROS, SKI, SIS, SET CAN, SRC, TAL1, TAL2, TAN-1, TIAM1, TSC2, and TRK.

[0125] Tumor suppressor genes (also named anti-oncogenes) represent the opposite side of cell growth control, normally acting to inhibit cell proliferation and tumor development. Thus tumor suppressor genes are genes that normally suppress cell division or growth. Loss of TSG function promotes uncontrolled cell division and tumor growth. Rb, a tumor suppressor gene that was identified by the genetic analysis of retinoblastoma an encoding atranscriptional regulatory protein, served as the prototype for the identification of additional tumor suppressor genes that contribute to the development of many different human cancers. Tumor suppressor genes are notably described in “Cooper G M. The Cell: A Molecular Approach. 2nd edition. Sunderland (MA): Sinauer Associates; 2000. Tumor Suppressor Genes”. Tumor-suppressor genes (TSGs) can also be downloaded from Tumor Suppressor Gene database (TSGene 2.0) (see for reference Zhao M, Kim P, Mitra R, Zhao J, Zhao Z; Nucleic Acids Res. 2016 Jan. 4; 44 (D1): D1023-31; “TSGene 2.0: an updated literature-based knowledgebase for tumor suppressor genes”). In this context, non-limitative examples of tumor suppressor genes include: APC, BRCA1, BRCA2, DPC4, INK4, MADR2, NF1, NF2, p53, PTC, PTEN, Rb, RB1, VHL, WT1, BUB1, BUBR1, TGF-βRII, Axin, DPC4, p300, PPARγ, p16, DPC4, PTEN, and hSNF5.

[0126] Oncogenes, tumor suppressor genes or “double agent” genes (with both oncogenic and tumor-suppressor functions) can be systematically identified through database search and text mining. Indeed, information on oncogenes or tumor suppressor genes can typically be found in Ensembl database (but see also Shen L, Shi Q, Wang W. Double agents: genes with both oncogenic and tumor-suppressor functions. Oncogenesis. 2018; 7 (3): 25. Published 2018 Mar. 13). Double agent genes may be identified as genes overlapped between the two above mentioned databases (see also Shen et al., Oncogenesis 2018 above).

[0127] Without to be bound by any theory, the inventors believe that selection of fusion wherein the exonic sequence is from an oncogene and/or a tumor suppressor gene is of high relevance for the reason below:

[0128] TE insertion in oncogenes can alter their oncogenic activity. Insertion of TE sequences in oncogene active domains could therefore result in constitutive activity of the oncogenes, similar to driver mutations. These fusions giving chimeric oncogenes could thus represent a new family of oncogenic proteins. If this is the case, targeting the activity of these new “fusion oncogenes” with small molecule antagonists could represent a potential therapeutic approach for cancer where these chimeric oncogenes are expressed.

[0129] TE insertions in tumor suppressors could inactivate their suppressor functions, leading typically to a loss of function (for example through introduction of stop codons, changes in ORF or disruptive amino acid stretches), thereby contributing to the oncogenic process.

[0130] Fusions implicating cancer driver genes would be excellent targets for adoptive cell therapies, antibodies, ADCs, T cell engagers, etc. If they are involved in oncogenesis, fusions oncogenes are expected to be more specific for cancer cells, and thus to reduce the development of resistances (because of the oncogenic activity of the target).

[0131] In some embodiments, the TE sequence is located in 5′ end of the fusion transcript sequence (it is also said that the TE sequence is the donor sequence) and the exonic sequence is located in 3′ end of the fusion transcript sequence with respect to the junction (the exon sequence is thus called an acceptor sequence). The expression “is located in 5′ end of the fusion transcript sequence” means that the element is located upstream of the junction in the fusion transcript sequence. The expression “is located in 3′ end of the fusion transcript sequence” means that the element is located downstream of the junction in the fusion transcript sequence.

[0132] In more particular embodiments, the TE sequence is located in 5′ end of the fusion transcript sequence and the exonic sequence is located in 3′ end of the fusion transcript sequence, and the part of the ORF of said fusion transcript sequence, which encodes the neoantigenic peptide, overlaps the junction. In this case, the ORF can be canonical or non-canonical. It is understood that the ORF may include the junction but the neoantigenic peptide sequence may not derive from the junction. In some embodiments, where the neoantigenic peptide sequence comprises a sequence which is derived from the junction, the obtained peptide is thus encoded by both TE sequence and exonic sequence.

[0133] The expression “the part of the ORF is overlapping or overlaps the junction between the TE sequence and the exonic sequence”, means that said junction is contained in the part of the ORF of the fusion transcript sequence, which encodes said neoantigenic peptide.

[0134] In embodiments wherein (i) the part of the ORF encoding the neoantigenic peptide is overlapping the junction between the TE sequence and the exonic sequence, and (ii) the TE sequence and the exonic sequence are respectively in 5′ end and 3′end of the fusion transcript sequence, said part of the ORF typically encodes a neoantigenic peptide of at least 8 amino acids, including at least between 1 to 6 amino acids, notably 2 to 6 from the TE sequence and at least between 1 and 6, notably 2 to 6 amino acids from the exonic sequence.

[0135] In another embodiment wherein the TE sequence is located in 5′ end of the fusion transcript sequence and the exonic sequence is located in 3′ end of the fusion transcript sequence, the part of ORF which encodes said neoantigenic peptide, is downstream of the junction and the ORF is thus non-canonical.

[0136] The expression “the part of the ORF is downstream of the junction” means that the part of the ORF encoding the neoantigenic peptide is not overlapping the junction, but it is contained in the 3′end part of said fusion transcript sequence with respect to the junction. In this embodiment, as the 3′ end part with respect to the junction, is the exonic sequence, the part of the ORF encoding the neoantigenic peptide is thus contained in the exonic sequence. Thus, as the part of the ORF is only located in the exonic sequence, the obtained peptide is therefore encoded by the exonic sequence, in a non-canonical ORF. Thus, in the particular embodiment wherein the exonic sequence is located in 3′ end of the fusion transcript sequence with respect to the junction, and wherein the part of the ORF which encodes the neoantigenic peptide is downstream of the junction with a non-canonical reading frame, the part of the ORF of the fusion transcript sequence encodes a neoantigenic peptide including 0 amino acid from the TE sequence, and at least 8 amino acids from the exonic sequence.

[0137] In another embodiment, the TE sequence is located in 3′ end of the fusion transcript sequence and the exonic sequence is located in 5′ end of the fusion transcript sequence with respect to the junction.

[0138] In some embodiments, the TE sequence is located in 3′ end of the fusion transcript sequence and the exonic sequence is located in 5′ end of the fusion transcript sequence and the part of the ORF of said fusion transcript sequence, which encodes a neoantigenic peptide, is overlapping the junction between the TE sequence and the exonic sequence. In this case, the ORF can also be canonical or non-canonical. The obtained peptide is encoded by both TE sequence and exonic sequence.

[0139] In the particular embodiment wherein the part of the ORF encoding the neoantigenic peptide, is overlapping the junction between the exonic sequence and the TE sequence, and wherein the exonic sequence and the TE sequence are respectively in 5′ end and 3′end of the fusion transcript sequence, said part of the ORF encodes a neoantigenic peptide of at least 8 amino acids, including at least between 1 to 6, notably 2 to 6 amino acids from the TE sequence and at least between 1 and 6, notably 2 to 6 amino acids from the exonic sequence.

[0140] In still another embodiment, the TE sequence is located in 3′ end of the fusion transcript sequence, the exonic sequence is located in 5′ end of the fusion transcript sequence, and the part of the ORF which encodes a neoantigenic peptide, is downstream of the junction between the exonic sequence and the TE sequence. Optionally, the peptide sequence which is thus encoded by the pure TE sequence is non-canonical.

[0141] In this embodiment, as the 3′ end part with respect to the junction is the TE sequence, the part of the ORF encoding the neoantigenic peptide is therefore encoded by the TE sequence. Thus, the part of the ORF encodes a neoantigenic peptide including no amino acid from the exonic sequence and at least 8 amino acids from the TE sequence. In the particular embodiment wherein the TE sequence is located in 3′ end of the fusion transcript sequence with respect to the junction, and the part of the ORF which encodes the neoantigenic peptide is downstream the junction, the part of the ORF of the fusion transcript sequence encodes a neoantigenic peptide including 0 amino acid from the exonic sequence, and at least 8 amino acids from the TE sequence.

[0142] A tumor neoantigenic peptide is a peptide that arises from somatic alterations (classically mutations in the DNA sequence), is recognized as different from self, and is presented by antigen-presenting cells (APC), such as dendritic cells (DC) and tumor cells themselves. Cross-presentation plays an important role as the APC is able to translocate exogenous antigens from the phagosome into the cytosol for proteolytic cleavage into the major histocompatibility complex I (MHC I) epitopes by the proteasome.

[0143] In the present disclosure the alteration corresponds to the transcription of fusion mRNA sequences that comprise a transposable element (TE) sequence and an exonic sequence. This may arise from somatic (i.e.: specifically in the tumor clone) transposition. It may also arise not from de novo transposition but from tumor specific transcriptional de-repression such that a TE and nearby gene are co-transcribed.

[0144] A neoantigenic peptide according to the present disclosure may be completely absent from normal healthy samples (i.e., not expressed in normal healthy samples) and thus be specific to tumor samples. Alternatively, it may be expressed at low levels in normal cells and/or disproportionately expressed on tumor samples as compared to normal (healthy) samples.

[0145] It can also be selectively expressed by the cell lineage from which the cancer evolved.

[0146] Cancer or tumor samples according to the present disclosure can be isolated from any solid tumor or non-solid tumor of any of the tissues or organs as defined previously, for example, breast cancer, lung cancer and/or melanoma. In some embodiments cancer samples are from Acute Myeloid Leukemia, Adrenocortical Carcinoma, Bladder Urothelial Carcinoma, Breast Ductal Carcinoma, Breast Lobular Carcinoma, Cervical Carcinoma, Cholangiocarcinoma, Colorectal Adenocarcinoma, Esophageal Carcinoma, Gastric Adenocarcinoma, Glioblastoma Multiforme, Head and Neck Squamous Cell Carcinoma, Hepatocellular Carcinoma, Kidney Chromophobe Carcinoma, Kidney Clear Cell Carcinoma, Kidney Papillary Cell Carcinoma, Lower Grade Glioma, Lung Adenocarcinoma, Lung Squamous Cell Carcinoma, Mesothelioma, Ovarian Serous Adenocarcinoma, Pancreatic Ductal Adenocarcinoma, Paraganglioma & Pheochromocytoma, Prostate Adenocarcinoma, Sarcoma, Skin Cutaneous Melanoma, Testicular Germ Cell Cancer, Thymoma, Thyroid Papillary Carcinoma, Uterine Carcinosarcoma, Uterine Corpus Endometrioid Carcinoma or Uveal Melanoma samples. In a particular embodiment, cancer samples are from lung cancer samples, notably from LUAD samples.

[0147] Typically as per the present disclosure, the step of identifying said fusion transcript sequence is carried out by mapping mRNA sequences from cancer sample against a reference genome, and then distinguishing normal and abnormal (non-annotated or non-canonical based on database information) junctions.

[0148] According to the present disclosure, normal junctions typically correspond to junctions, wherein donor and acceptor are on the same strand and not too far apart (e.g.: not on different chromosomes).

[0149] According to the present disclosure, abnormal junctions typically correspond to junctions between donor and acceptor sequences on different chromosomes, or in cis (same chromosomes) but on different strands (no matter the order and the 5′-3′ sense).

[0150] mRNA sequences typically usable according to the present disclosure are RNA seq data (as illustrated in the results herein). RNA seq data are typically obtained from purified RNA obtained from a cell or a tissue sample, fragmented and reverse-transcribed into cDNA. The obtained cDNA are then amplified and sequenced (next-generation sequencing-NGS) on a high-throughput platform (such as for example the Illumina GA/HiSeq-see http://www.illumina.com-, SOLID or Roche 454). This process generates millions of short reads taken from one end of the cDNA fragments. A common variant on this process is to generate reads from both ends of each cDNA fragment, known as “paired-end” reads.

[0151] In some embodiments, the mRNA sequences can be mapped against a corresponding reference genome or transcriptome (such as the human reference genome Hg19 ENSEMBL (RNA sequences, GRCh37), with an adapted software, such as for example: Spliced Transcripts Alignment to a Reference (i.e.: STAR-see Dobin, Alexander et al. “STAR: ultrafast universal RNA-seq aligner.” Bioinformatics (Oxford, England) vol. 29, 1 (2013): 15-21), TopHat2 (Kim, Daehwan et al. “TopHat2: accurate alignment of transcriptomes in the presence of insertions, deletions and gene fusions.” Genome biology vol. 14, 4 R36. 25 Apr. 2013, doi: 10.1186/gb-2013-14-4-r36) or HISAT (Kim, Daehwan et al. “HISAT: a fast spliced aligner with low memory requirements.” Nature methods vol. 12, 4 (2015): 357-60. doi: 10.1038/nmeth.3317). STAR is a standalone software that uses sequential maximum mappable seed search followed by seed clustering and stitching to align RNA-seq reads. It is able to detect canonical junctions, non-canonical splices, and fusion/chimeric transcripts. Typically, detection of the junctions can be performed as detailed in the results based on the definitions from ENSEMBL and RepeatMasker databases respectively, downloaded from the UCSC Genome Browser. Thus, in some embodiments, the normal and abnormal junctions are determined in silico using dedicated databases, such as for example Ensembl and Repeatmasker databases, and the fusion transcripts having junctions between a TE and an exonic sequence are extracted in silico.

[0152] More particularly, in some embodiments, RNAseq reads from a sample (or cell) of interest are aligned to a reference genome (such as typically the hg19 genome) using typically STAR two-pass mode27 to identify un-annotated junctions. As previously indicated JETs are identified as a junction between an exon (most particularly a coding DNA sequence—CDS—exon) and a TE (or repeated element, RE). As per the present disclosure TE (or RE) can be identified (i.e. filtered) according to the definition of commonly used databases in the field such as ENSEMBL (GRCh37) and RepeatMasker.

[0153] According to the present disclosure, the mRNA sequences can come from all types of cancer cell or tumor cell sample(s). The tumor may be a solid or a non-solid tumor. In particular, the mRNA sequences come from any tissues or organs affected by a cancer or tumor as previously defined, for example from breast cancer, lung cancer and/or melanoma. In a particular embodiment, mRNA sequences are from LUAD samples.

[0154] Tumor samples can be for example obtained from the Cancer Genome Atlas (TCGA). In some embodiments, the mRNA sequences are obtained from cell lines such as for example tumor cell lines from the Cancer Cell Line Encyclopedia (CCLE).

[0155] In some embodiments, the number of splicing reads can be normalized by the number of unique mapped reads. Typically JETs with a level of expression over 2.10-7 are selected.

[0156] In some embodiments of the present disclosure, the fusion transcript sequences are shared in more than 1%; notably more than 5%, more than 10%, more than 15%, more than 20% or even more than 25% of cancer samples (typically obtained from various patients, for example from the cancer samples collected for a given cancer type in the TCGA) and/or cell lines. In some embodiments, a fusion transcript sequence as per the present disclosure is shared in cancer samples from more than 1%; notably more than 2%, more than 5%, more than 10%, more than 15%, more than 20% or even more than 25% of the subjects suffering from a cancer. The fusion transcript sequence may thus be specific for a cancer type of shared between several cancers.

[0157] According to the present disclosure, the fusion transcript sequences are expressed at higher levels in tumor cells compared to normal healthy cells. In some embodiments, the fusion transcript sequence is expressed in cancer cells (obtained from one or more cancer samples or one or more cell lines) and not in healthy cells (from one or more tissue sample or one or more cell line), in particular not in thymus healthy cells. In some embodiments a JET is considered not expressed in a cell when its expression level is below 2.10-7, notably below 2.10-8 and typically not detectable. Such fusion transcript may be called tumor specific fusion as per the present disclosure. Fusion transcripts that are expressed at higher level(s) in tumor cells as compared to normal cell, typically that are disproportionally expressed in cancers cells as compared to normal cells as defined above may be called tumor associated fusion transcripts (TAF) as per the present disclosure. Tumor associated fusion transcripts may be selected according to the present application if they are present in more than 1%, notably more than 2%, more than 5% and in particular more than 10% of tumor samples (from the same or different tumor type, notably obtained from the TCGA database, preferably for the same cancer type) and in less than 20% of the normal samples. Alternatively, or in addition, a fusion transcript sequence can be expressed in at least 1; 2; 3; 4; 5; 6; 7; 8; 9; 10; 11; 12; 13; 14; 15; 16; 17; 18; 19; 20 cell lines.

[0158] In some embodiments, the method further comprises a step of determining, optionally in silico or using in vitro techniques (see notably the example for illustration), the binding affinity of the tumor neoantigenic peptide with at least one MHC molecule of the said subject suffering from a cancer.

[0159] When the method is carried out on human samples, the method may comprise a step of determining the patient's class I or class I Major Histocompatibility Complex (MHC, aka human leukocyte antigen (HLA) alleles). It is to be noticed that as MHC alleles for laboratory mice are generally known such that this step may not be necessary in that particular context. In the present application, “MHC molecule” refers to at least one MHC class I molecule or at least one MHC Class II molecule.

[0160] An MHC allele database is carried out by analyzing known sequences of MHC I and MHC II and determining allelic variability for each domain. This can be typically determined in silico using appropriate software algorithms well-known in the field. Several tools have been developed to obtain HLA allele information from genome-wide sequencing data (whole-exome, whole-genome, and RNA sequencing data), including OptiType, Polysolver, PHLAT, HLAreporter, HLAforest, HLAminer, and seq2HLA (see Kiyotani K et al., Immunopharmacogenomics towards personalized cancer immunotherapy targeting neoantigens; Cancer Science 2018; 109:542-549). For example, the seq2hla tool (see Boegel S, Lower M, Schafer M, et al. HLA typing from RNA-Seq sequence reads. Genome Med. 2012; 4:102), which is well designed to perform the method as herein disclosed is an in silico method written in python and R, which takes standard RNA-Seq sequence reads in fastq format as input, uses a bowtie index (Langmead B, et al., Ultrafast and memory-efficient alignment of short DNA sequences to the human genome. Genome Biol. 2009, 10: R25-10.1186/gb-2009-10-3-r25) comprising all HLA alleles and outputs the most likely HLA class I and class II genotypes (in 4 digit resolution), a p-value for each call, and the expression of each class.

[0161] Typically, the sequences having junctions between a TE and an exonic sequence are extracted in silico. The affinity of all possible peptides encoded by each sequence for each MHC allele from the patient (or mouse) can be for example determined in silico using computational methods to predict peptide binding-affinity to HLA molecules. Indeed, accurate prediction approaches are based on artificial neural networks with predicted IC₅₀. For example, NetMHCpan software which has been modified from NetMHC to predict peptides binding to alleles for which no ligands have been reported, is well appropriate to implement the method as herein disclosed (Lundegaard C et al., NetMHC-3.0: accurate web accessible predictions of human, mouse and monkey MHC class I affinities for peptides of length 8-11; Nucleic Acids Res. 2008; 36: W509-W512; Nielsen M et al. NetMHCpan, a method for quantitative predictions of peptide binding to any HLA-A and -B locus protein of known sequence. PLOS One. 2007; 2: e796, but see also Kiyotani K et al., Immunopharmacogenomics towards personalized cancerimmunotherapy targeting neoantigens; Cancer Science 2018; 109:542-549 and Yarchoan M et al., Nat rev. cancer 2017; 17 (4): 209-222). NetMHCpan software predicts binding of peptides to any MHC molecule of known sequence using artificial neural networks (ANNs). The method is trained on a combination of more than 180,000 quantitative binding data and MS derived MHC eluted ligands. The binding affinity data covers 172 MHC molecules from human (HLA-A, B, C, E), mouse (H-2), cattle (BoLA), primates (Patr, Mamu, Gogo) and swine (SLA). The MS eluted ligand data covers 55 HLA and mouse alleles.

[0162] In example embodiments, neoantigenic peptides encoded by fusion transcripts as above described and having a Kd affinity for MHC alleles of less than 10⁻⁴. 10⁻⁵, 10⁻⁶, 10⁻⁷ M or less than 500 nM, notably less than 50 nM are selected as tumor neoantigenic peptides.

[0163] As above mentioned, affinity of the selected peptide for MHC alleles can be determined in silico using appropriate software such as netMHCpan. Thus, in some embodiments, neoantigenic peptides bind MHC class I with a binding affinity of less than 2% percentile rank score predicted by NetMHCpan 4.0. In other embodiments, the neoantigenic peptides bind MHC class II with a binding affinity of less than 10% percentile rank score predicted by NetMHCpanII 3.2.

[0164] Affinity can also (alternatively or in addition) be estimated in vitro, for example using MHC tetramer formation assay as described in the results included therein (see example 2, point 2.1 and 2.2.2). Commercial assays for example from ImmunAware® can typically be used by the skilled person (EasYmers® kits are from ImmunAware® are notably used according to their training guide). Typically, binding affinity is determined as a percentage of binding to a positive control. Generally, peptides showing a percentage of binding of at least 30%, notably at least 40% or even at least 50% of the positive control are selected. Typically, the neoantigenic peptide as per the present disclosure, and typically obtainable as per the present method, binds at least one HLA/MHC molecule with an affinity sufficient for the peptide to be presented on the surface of a cell as an antigen. Generally, the neoantigenic peptide has an IC₅₀ affinity of less than 10⁻⁴, or 10⁻⁵, or 10⁻⁶, or 10⁻⁷ or less than 500 nM, at least less than 250 nM, at least less than 200 nM, at least less than 150 nM, at least less than 100 nM, at least less than 50 nM or less for at least one HLA/MHC molecule (lower numbers indicating greater binding affinity), typically a molecule of said subject suffering from a cancer.

[0165] Further optional steps according to the present method may thus independently include:
[0166] a step of exclusion of fusion transcripts or predicted peptides expressed at high levels or high frequency on healthy cells. An alignment of the fusion transcript sequence against the RNAseq data of healthy cells, typically allows determining the relative amount of fusion transcript sequence(s) present in healthy cells; In one embodiment, fusion transcripts or predicted peptides expressed on healthy cells are discarded.
[0167] a step to confirm that a tumor neoantigenic peptide is not expressed in healthy cells of the subject. This step can be carried out using typically the Basic local alignment search tool (BLAST) and performing alignment of the sequence of the neoantigenic peptide against the proteome of healthy cells; Preferably, peptides that align against the proteome of normal healthy cells (for example using BLAST) are discarded.
[0168] a step to confirm that the fusion transcript or predicted peptide is expressed in cancer cells of the subject. The presence of the selected fusion transcript sequence in cancer cells can be checked typically by RT-PCR in mRNA extracted from cancer cell sample.

[0169] In some embodiments, the present method can also include a step wherein the identified fusion (JETs) transcripts are in silico translated to generate a JET-derived protein database (JET-db). Typically, Strand-indexed JETs containing gene as donor can be translated using the canonical ORF from the implicated gene until the first stop codon after the breakpoint. In JETs where TE was the donor, the 3 possible ORFs can be translated and only the sequence found more proximal to the breakpoint and between two stop codons is typically kept. This JET db (typically also concatenated to the human proteome) can be then interrogated in mass spectrometry based proteomic datasets obtained from tumor samples and/or tumor cell lines which typically consist in proteomics data obtained from tumors samples and/or tumor cell lines. In some embodiments, public mass spectrometry datasets can be used. This embodiment is notably well described in the results provided in the present application. Such analysis also to identify JET-derived peptides or proteins.

[0170] In more specific embodiments, the JETdb (typically concatenated to the human proteome) can be interrogated to immunonopeptidomics mass spectrometry-based datasets as also detailed in the examples included herein. This embodiment allows to identify JET-derived peptides or proteins (pJETs) that are presented to MHC molecules.

[0171] To ensure that JET-derived peptides did not match with canonical proteins or peptides derived from JETs found in normal samples, identified peptides can be filtered for example with UniProt/TrEMBL database and/or with in silico translated JETs from normal (including for example juxta-tumor) sample(s) or cell(s) (for example from public databases such as the TCGA and/or the CCLE).

### Neoantigenic Peptides

[0172] The present disclosure also relates to an isolated tumor neoantigenic peptide comprising at least 8, 9, 10, 11, or 12 amino acids, encoded by a portion of an open reading frame (ORF) from a fusion transcript that is a human mRNA sequence comprising a transposable element (TE) sequence and an exonic sequence. The peptide may be 8-9, 8-10, 8-11, 12-25, 13-25, 12-20, or 13-20 amino acids in length. Although the ORF overlaps a junction between a TE sequence and an exonic sequence, it is understood that the tumor neoantigenic peptide itself may not comprise the junction.

[0173] The present disclosure also more specifically encompasses an isolated tumor neoantigenic peptide encoded by a portion of a human fusion mRNA sequence from a cancer cell, said fusion mRNA comprising a TE sequence and an exonic sequence.

[0174] The peptide may be 8-9, 8-10, 8-11, 12-25, 13-25, 12-20, or 13-20 amino acids in length and fulfills one or more of the neoantigen peptide characteristics described above. The N-terminus of the peptide of at least 8 amino acids may be encoded by the triplet codon starting at any of nucleotide positions 1, 2, 3, 4, 5, 6, 7, 8, 9, 10, 11, 12, 13, 14, 15, 16, 17, 18, and higher (it being understood that the disclosure contemplates a start position that is any of the integers between 1 and 8000 without having to list every number between 1 and 8000).

[0175] A peptide as above defined is typically obtainable according to the method of the present disclosure and thus encompasses one or more of the characteristics as previously described. In particular a neoantigenic peptide as per the present disclosure may exhibit one or a combination of the following further characteristics:
[0176] It binds or specifically binds MHC class I of a subject and is 8 to 11 amino acids, notably 8, 9, 10, or 11 amino acids. Typically the neoantigenic peptide is 8 or 9 amino acids long, and binds to at least one MHC class I molecule of the subject; or alternatively, it binds to at least one MHC class II molecule of said subject and contains from 12 to 25 amino acids, notably is 12, 13, 14, 15, 16, 17, 18, 19, 20, 21, 22, 23, 24 or 25 amino acids long.
[0177] It binds at least one HLA/MHC molecule of said subject suffering from a cancer with an affinity sufficient for the peptide to be presented on the surface of a cell as an antigen. Typically the neoantigenic peptide has an IC₅₀ of less than 10⁻⁴, or 10⁻⁵, or 10⁻⁶, or 10⁻⁷ or less than 500 nM, at least less than 250 nM, at least less than 200 nM, at least less than 150 nM, at least less than 100 nM, at least less than 50 nM or less (lower numbers indicating greater binding affinity).
[0178] It does not induce a significant autoimmune response and/or invoke immunological tolerance when administered to a subject.
[0179] It is expressed at higher levels in tumor samples compared to normal healthy samples. Typically, as per the present disclosure, a fusion transcript may be selected if it is present in more than 1%, notably more than 2%, more than 5% or more than 10% of the tumor samples (from the same or different tumor type, typically from one or more subjects typically from TCGA tumor samples) and in less than 20% of the normal samples. Alternatively, or in addition, the transcript can be identified in one or more (at least 2, 5, 10, 20, 50, 100 cell lines such as for example from the CCLE) In some embodiments, the neoantigenic is more specifically a tumor specific antigen (TSA), i.e.: it is only expressed in cancer sample and not in normal samples, or is expressed at relatively low levels in normal samples (e.g. the expressed mRNA sequences represent minor species in normal cells from normal samples).
[0180] It comprises the junction between the TE sequence and the exonic sequence, in other words it is encoded by a part of a TE sequence and a part of an exonic sequence, the ORF being either canonical or non-canonical or
[0181] It is encoded by a non-canonical ORF of an exonic sequence or
[0182] It is encoded by the TE sequence, optionally in a non-canonical ORF

[0183] A tumor neoantigenic peptide may first be validated by RT transcription analysis of fusion transcripts sequence in tumors cell from a subject. Typically also, immunization with a tumor neoantigenic peptide as per the present disclosure elicits a T cell response

[0184] In a particular embodiment, the present disclosure encompasses a NSCLC neoantigenic peptide comprising at least 8 amino acids of any one of SEQ ID NOS: 1-117. Typically, said neoantigenic peptides of SEQ ID NOS: 1-117 binds to HLA-A02 with an affinity sufficient for the peptide to be presented on the surface of cells as an antigen. Affinity for MHC alleles can be determined by known techniques in the field and notably in silico or in vitro as exemplified above;

[0185] In a particular embodiment, a tumor neoantigenic peptide as per the present disclosure binds to a MHC molecule present in at least 1%, 5%, 10%, 15%, 20%, 25% or more of subjects. Notably, a tumor neoantigenic peptide as herein disclosed is expressed in at least 1%, 5%, 10%, 15%, 20%, 25% of subjects from a population of subjects suffering from cancer

[0186] More particularly, a tumor neoantigenic peptide of the present disclosure is capable of eliciting an immune response against a tumor present in at least 1%, 5%, 10%, 15%, 20%, or 25% of the subjects in the population of subjects suffering from cancer.

[0187] As previously defined, cancer may affect any one of the following tissues or organs: breast; liver; kidney; heart, mediastinum, pleura; floor of mouth; lip; salivary glands; tongue; gums; oral cavity; palate; tonsil; larynx; trachea; bronchus, lung; pharynx, hypopharynx, oropharynx, nasopharynx; esophagus; digestive organs such as stomach, intrahepatic bile ducts, biliary tract, pancreas, small intestine, colon; rectum; urinary organs such as bladder, gallbladder, ureter; rectosigmoid junction; anus, anal canal; skin; bone; joints, articular cartilage of limbs; eye and adnexa; brain; peripheral nerves, autonomic nervous system; spinal cord, cranial nerves, meninges; and various parts of the central nervous system; connective, subcutaneous and other soft tissues; retroperitoneum, peritoneum; adrenal gland; thyroid gland; endocrine glands and related structures; female genital organs such as ovary, uterus, cervix uteri; corpus uteri, vagina, vulva; male genital organs such as penis, testis and prostate gland; hematopoietic and reticuloendothelial systems; blood; lymph nodes; thymus. For example, the tumors or cancers as per the present application includes leukemias, seminomas, melanomas, teratomas, lymphomas, neuroblastomas, gliomas, rectal cancer, endometrial cancer, kidney cancer, adrenal cancer, thyroid cancer, blood cancer, skin cancer, cancer of the brain, cervical cancer, intestinal cancer, liver cancer, colon cancer, stomach cancer, intestine cancer, head and neck cancer, gastrointestinal cancer, lymph node cancer, esophagus cancer, colorectal cancer, pancreas cancer, ear, nose and throat (ENT) cancer, breast cancer, prostate cancer, cancer of the uterus, ovarian cancer and lung cancer and the metastases thereof. Examples thereof are lung carcinomas, mamma carcinomas, prostate carcinomas, colon carcinomas, renal cell carcinomas, cervical carcinomas, or metastases of the cancer types or tumors described above. The term cancer according to the present disclosure also comprises cancer metastases and relapse of cancer.

[0188] Typically a neoantigenic peptide as per the present disclosure does not induce a significant autoimmune response and/or invoke immunological tolerance when administered to a subject. Tolerating mechanisms involve clonal deletion, ignorance, anergy, or suppression in the host w the reduction in the number of high-affinity self-reactive T cells.

[0189] The neoantigenic peptide can also be modified by extending or decreasing the compound's amino acid sequence, e.g., by the addition or deletion of amino acids. The peptides can also be modified by altering the order or composition of certain residues, it being readily appreciated that certain amino acid residues essential for biological activity, e.g., those at critical contact sites or conserved residues, may generally not be altered without an adverse effect on biological activity. The non-critical amino acids need not be limited to those naturally occurring in proteins, such as L-α-amino acids, or their D-isomers, but may include non-natural amino acids as well, such as β-γ-δ-amino acids, as well as many derivatives of L-α-amino acids.

[0190] Typically, a series of peptides with single amino acid substitutions are employed to determine the effect of electrostatic charge, hydrophobicity, etc. on binding. For instance, a series of positively charged (e.g., Lys or Arg) or negatively charged (e.g., Glu) amino acid substitutions are made along the length of the peptide revealing different patterns of sensitivity towards various MHC molecules and T cell receptors. In addition, multiple substitutions using small, relatively neutral moieties such as Ala, Gly, Pro, or similar residues may be employed. The substitutions may be homo-oligomers or hetero-oligomers. The number and types of residues which are substituted or added depend on the spacing necessary between essential contact points and certain functional attributes which are sought (e.g., hydrophobicity versus hydrophilicity). Increased binding affinity for an MHC molecule or T cell receptor may also be achieved by such substitutions, compared to the affinity of the parent peptide. In any event, such substitutions should employ amino acid residues or other molecular fragments chosen to avoid, for example, steric and charge interference which might disrupt binding.

[0191] Amino acid substitutions are typically of single residues. Substitutions, deletions, insertions or any combination thereof may be combined to arrive at a final peptide. Substitutional variants are those in which at least one residue of a peptide has been removed and a different residue inserted in its place. Such substitutions are generally made in accordance with the following Table 1 when it is desired to finely modulate the characteristics of the peptide.

TABLE 1

| Original | Exemplary |
|---|---|
| residue | substitution |
| Ala | Ser |
| Arg | Lys, His |
| Asn | Gln |
| Asp | Glu |
| Cys | Ser |
| Gln | Asn |
| Glu | Asp |
| Gly | Pro |
| His | Lys, Arg |
| Ile | Leu, Val |
| Leu | Ile, Val |
| Lys | Tyr, Trp |
| Met | Thr |
| Phe | Ser |
| Ser | Tyr, Phe |
| Tyr | Trp, Phe |
| Val | Ile, Leu |
| Pro | Gly |

[0192] Substantial changes in function (e.g., affinity for MHC molecules or T cell receptors) are made by selecting substitutions that are less conservative than those in above Table, i.e., selecting residues that differ more significantly in their effect on maintaining (a) the structure of the peptide backbone in the area of the substitution, for example as a sheet or helical conformation, (b) the charge or hydrophobicity of the molecule at the target site or (c) the bulk of the side chain. The substitutions which in general are expected to produce the greatest changes in peptide properties will be those in which (a) hydrophilic residue, e.g. seryl, is substituted for (or by) a hydrophobic residue, e.g. leucyl, isoleucyl, phenylalanyl, valyl or alanyl; (b) a residue having an electropositive side chain, e.g., lysl, arginyl, or histidyl, is substituted for (or by) an electronegative residue, e.g. glutamyl or aspartyl; or (c) a residue having a bulky side chain, e.g. phenylalanine, is substituted for (or by) one not having a side chain, e.g., glycine.

[0193] The peptides and polypeptides may also comprise isosteres of two or more residues in the neoantigenic peptide or polypeptides. An isostere as defined here is a sequence of two or more residues that can be substituted for a second sequence because the steric conformation of the first sequence fits a binding site specific for the second sequence. The term specifically includes peptide backbone modifications well known to those skilled in the art. Such modifications include modifications of the amide nitrogen, the α-carbon, amide carbonyl, complete replacement of the amide bond, extensions, deletions or backbone crosslinks. See, generally, Spatola, Chemistry and Biochemistry of Amino Acids, Peptides and Proteins, Vol. VII (Weinstein ed., 1983).

[0194] In addition, the neoantigenic peptide may be conjugated to a carrier protein, a ligand, or an antibody. Half-life of the peptide may be improved by PEGylation, glycosylation, polysialylation, HESylation, recombinant PEG mimetics, Fc fusion, albumin fusion, nanoparticle attachment, nanoparticulate encapsulation, cholesterol fusion, iron fusion, or acylation.

[0195] Modifications of peptides and polypeptides with various amino acid mimetics or unnatural amino acids are particularly useful in increasing the stability of the peptide and polypeptide in vivo. Stability can be assayed in a number of ways. For instance, peptidases and various biological media, such as human plasma and serum, have been used to test stability. See, e.g., Verhoef et al., Eur. J. Drug Metab Pharmacokin. 11:291-302 (1986). Half life of the peptides of the present disclosure is conveniently determined using a 25% human serum (v/v) assay. The protocol is generally as follows. Pooled human serum (Type AB, non-heat inactivated) is delipidated by centrifugation before use. The serum is then diluted to 25% with RPMI tissue culture media and used to test peptide stability. At predetermined time intervals a small amount of reaction solution is removed and added to either 6% aqueous trichloracetic acid or ethanol. The cloudy reaction sample is cooled (4° C.) for 15 minutes and then spun to pellet the precipitated serum proteins. The presence of the peptides is then determined by reversed-phase HPLC using stability-specific chromatography conditions.

[0196] The peptides and polypeptides may be modified to provide desired attributes other than improved serum half-life. For instance, the ability of the peptides to induce CTL activity can be enhanced by linkage to a sequence which contains at least one epitope that is capable of inducing a T helper cell response. Particularly preferred immunogenic peptides/T helper conjugates are linked by a spacer molecule. The spacer is typically comprised of relatively small, neutral molecules, such as amino acids or amino acid mimetics, which are substantially uncharged under physiological conditions. The spacers are typically selected from, e.g., Ala, Gly, or other neutral spacers of nonpolar amino acids or neutral polar amino acids. It will be understood that the optionally present spacer need not be comprised of the same residues and thus may be a hetero- or homo-oligomer. When present, the spacer will usually be at least one or two residues, more usually three to six residues. Alternatively, the peptide may be linked to the T helper peptide without a spacer.

[0197] The neoantigenic peptide may be linked to the T helper peptide either directly or via a spacer either at the amino or carboxy terminus of the peptide. The amino terminus of either the neoantigenic peptide or the T helper peptide may be acylated. Exemplary T helper peptides include tetanus toxoid 830-843, influenza 307-319, malaria circumsporozoite 382-398 and 378-389

[0198] Multiple neoantigenic peptides described herein can also be linked together, optionally by a spacer.

### Transmembrane Chimeric Polypeptides (or Proteins) and Antigen Binding Domains Binding Thereof

[0199] The present disclosure provides a set of transmembrane chimeric polypeptides (also named herein pJET or fusion transcript-derived peptides) that provide excellent extracellular neoantigen candidates. Said chimeric proteins are derived from the fusion transcripts predicted from the bioinformatics pipeline developed for identifying genome-wide non-canonical spliced regions as above defined. RNA-Seq data publicly available in TCGA (the Cancer Genome Atlas) and CCLE (Broad Institute Cancer Cell Line Encyclopedia) (described in section EXAMPLES) were used.

[0200] The identification and characterisation of fusion transcripts (also named herein chimeric transcripts or JETs) according to the present invention has been detailed in the above section (see also the examples) of the present application.

[0201] As previously mentioned, fusion transcripts result from alternative splicing mechanisms that are known to be essential for generating functional diversity. Indeed splicing mechanisms allow the expression of multiple mRNAs (i.e., transcripts or splicing variants) encoding numerous proteins, from individual genes, through rearrangement of existing exonic and intronic sequences. Types of splicing alteration observed herein include exon skipping, intron retention and use of alternative splice donor or acceptor sites. In the fusion transcripts according to the present invention, the TE can act as a donor (in 5′ position) or as an acceptor (in 3′ acceptor) and correspondingly the exon can be acceptor or donor. TE-exon splicing thus results in the incorporation of parts of the “non-coding” genome into the coding genome, thereby exposing non-coding genomic sequences to the translation machinery. These fusions (or chimeric) transcripts also named JET (Junction Exon TE) include an ORF (open reading frame), i.e. they are the part of a reading frame that has the ability to be translated into a polypeptide or protein. When the TE is acceptor, the ORF of the fusion transcript is canonical (i.e. the same as the canonical transcript), whereas when the TE is the donor the ORF can be canonical (generally ORF1) or can be shifted by 1 or 2 nucleotides (generally ORFs 2 and 3 respectively) as compared to ORF1. The fusion transcripts include not only the fused TE and exon sequences (corresponding to the JET) but can also further include exon(s), upstream the fusion breakpoint (between the exon and the TE) if the exon is donor or downstream the fusion breakpoint if the TE is donor, corresponding to the various transcript isoforms.

[0202] More particularly, the present disclosure provides transmembrane chimeric polypeptides (or proteins) of SEQ ID NO:1 to 21542, which are referred to in tables 9-15 and 19-20. Tables 14 and 19 provide amino acid sequences translated from fusion transcripts (JETs) wherein the exon is donor. Tables 15 and 20 provide amino acid sequences translated from fusion transcripts (JETs) wherein the exon is donor.

[0203] This set of (transmembrane) chimeric proteins was obtained by further selecting the fusion transcripts having an exonic sequence which is annotated in normal proteome databases (such as typically UniProt) as belonging to a transcript coding for a transmembrane protein. The sequences of the selected fusion transcripts were then translated (in silico) into fusion (or chimeric) polypeptide sequences (also named translated junctions or pJETs or translated JETs).

[0204] Fusion transcripts wherein the exon is donor are translated following the canonical ORF of the transcript from the beginning of the transcript to the first stop codon after the breakpoint between the exon and the TE.

[0205] Fusion transcripts wherein the TE is the donor are translated following the 3 ORFs (1 to 3) from the beginning of the TE or from after the last stop codon before the breakpoint between the TE and the exon, to the first stop codon after said breakpoint.

[0206] Only the translated polypeptide sequences containing at least 3 amino acids derived from the TE sequence have been kept.

[0207] In some embodiments, the peptide sequences deriving from translated junctions that match to any referenced or annotated protein sequences in UniProt are discarded, therefore, focusing on non-annotated chimeric peptides (as exemplified in the results).

[0208] Tables 9-13 provide peptide (typically polypeptide considering their size) sequences identified from proteogenomic approaches previously described. Typically, a fusion transcript (i.e. JET) library generated with the pipeline of the present application (using various public RNA seq datasets) were searched in MS raw data from total proteomics (all peptidome), or surface proteomics (surfaceome).

[0209] The present disclosure thus particularly refers to chimeric polypeptides (or proteins) that are expressed at the cell membrane. Cell membrane expression of polypeptides in silico assigned to a transmembrane compartment (as indicated above) can be experimentally validated by several in vitro approaches and at different molecular levels:
[0210] a) Proteins, or peptides, containing the selected translated junctions can be ectopically expressed in a host cell, for example a tumor cell lines (such as Hela, CHO, etc.) to confirm the stability and proper integration within the plasma membrane. An expression vector can be designed containing the translated junction and a tag sequence (such as FLAG or HA) thus giving rise to a tagged fusion chimeric protein. The fusion-containing proteins or peptides also contain an epitope-tag and can thus be detected by flow cytometry or microscopy using commercially available anti-tag antibodies. The sequences cloned into the vector can be preferentially designed in a way that the tag sequence is located immediately before or after the TE sequence. This approach allows to select translated junction peptides or proteins that give rise to stable proteins that are expressed in the cell membrane and typically expose the TE sequence to the extracellular space.
[0211] b) Targeted sequencing experiments can also be performed to amplify and detect the fusion transcripts in additional tumor specimens or cell lines. This can be performed through conventional PCR, quantitative real-time PCT or SMRT full-length transcripts sequencing (PACBIO technology).
[0212] c) Translated sequences can also be detected within the “translatome” (that represents the entirety of translating mRNA within a cell) by ribosome profiling or ribo-Seq. Ribosome profiling analysis thus enabling the monitoring of the junction transcript translation process and the prediction of the abundance of the chimeric (translated junction peptide or protein). Through this technology regions of a JET-derived transcript (mRNA) that are translated can be identified thus defining translation start and stop sites of the fusion polypeptide. Using this approach that bridges the genomics and the proteomics validation of the JET sequences, the translated regions of the fusion transcripts can be fully defined.
[0213] d) Further experimental validation of the protein expression can be performed through targeted mass spectrometry approaches in tumor specimens and cell lines. Targeted proteomics experiments can be performed to quantify at each time a few chimeric proteins (containing the translated junctions) with very high precision, sensitivity, specificity and throughput.

[0214] In more specific embodiments, the present disclosure refers to the chimeric polypeptides as herein defined, wherein the part of the sequence derived from the TE nucleotide sequence is exposed at the cell surface. Cell surface exposure of the TE-derived sequence can be predicted in silico based on the predicted topology of said TE-derived sequence.

[0215] Predicting that a protein resides at the cell surface typically involves (i) the detection of a TM domain or a lipid anchor; (ii) the definition of the orientation of a protein within the membrane, including the identification of an extracellular exposed domain; and/or (iii) subcellular location prediction. Bioinformatic tools for predicting TM domains, signal peptides, and GPI-linked proteins are available (see Käll L, Krogh A, Sonnhammer ELL (2004) A combined transmembrane topology and signal peptide prediction method. J Mol Biol 338:1027-1036; Jones DT (2007) Improving the accuracy of transmembrane protein topology prediction using evolutionary information. Bioinformatics 23:538-544; Reeb J, Kloppmann E, Bernhofer M, Rost B (2015) Evaluation of transmembrane helix predictions in 2014. Proteins 83:473-484; Krogh A, Larsson B, von Heijne G, Sonnhammer ELL (2001) Predicting transmembrane protein topology with a hidden Markov model: Application to complete genomes. J Mol Biol 305:567-580; Viklund H, Elofsson A (2008) OCTOPUS: Improving topology prediction by two-track ANN-based preference scores and an extended topological grammar. Bioinformatics 24:1662-1668; Fankhauser N, Mäser P (2005) Identification of GPI anchor attachment signals by a Kohonen self-organizing map. Bioinformatics 21:1846-1852).

[0216] Experimental validation of cell surface expression of the TE-derived sequence for a given translated junction can also be performed as above mentioned (see point a).

[0217] As also mentioned previously identification of peptides which are expressed at the cell surface can be achieved based on proteogenomic approaches by searching the JETs library into MS raw data from the surfaceome (all plasma membrane proteins that have at least 1, notably at least 2, at least 3 or at least 4 amino acid residues exposed to the extracellular space). As such, the surfaceome is a subset of the plasma membrane proteome, which is a subset of the membrane proteome, the entirety of all membrane proteins. Integral monotopic membrane proteins that are attached to the extracellular lipid leaflet [e.g., via a glycosylphosphatidylinositol (GPI) anchor] are part of the human surfaceome

[0218] In some embodiments, the present disclosure more particularly refers to chimeric polypeptides resulting from non-canonical ORF downstream of a junction between a TE-derived sequence and an exon-derived sequence. Experimental confirmation of cell surface expression of the non-canonical ORF translated sequence having a topology predicted to be extracellular can also be performed as above mentioned (see also point a), by locating the tag before or after the non-canonical ORF sequence).

[0219] In some embodiments, the translated junctions may be selected based on the type of fusion (TE donor or acceptor) and on the subtype of membrane proteins. This selection could be achieved as follows:
[0220] Integral membrane proteins
   [0221] Type I single-pass proteins (positioned such that their carboxyl-terminus is towards the cytosol): selected transcripts are those derived from fusions in which TE acts as a donor (fusion TE->exon) and, in some cases, this fusion is preceded by a second fusion in which the TE is an acceptor (fusion exon-TE). In the later scenario the transcript is generated by a double-fusion “exon-TE-exon” or “metafusion” with a resulting transcript including a TE exonisated sequence flanked by two canonical exons.
   [0222] Type II single-pass proteins (which have their amino-terminus towards the cytosol): selected transcripts are those derived from fusions in which TE acts as an acceptor (fusion exon->TE) and, in some cases, this fusion is followed by a second fusion in which the TE is a donor (fusion TE->exon). In the later scenario the transcript is generated by a double-fusion “exon-TE-exon” or “metafusion” with a resulting transcript including a TE exonisated sequence flanked by two canonical exons.
   [0223] Multi-pass or poly-transmembrane proteins (the polypeptide chain crosses the membrane multiple times): the TE sequence may act as donor or acceptor and/or may be part of a metafusion. The breakpoint (or one of the two breakpoints in the case of the metafusions) is located in the extracellular side of the membrane between two transmembrane helices.
   [0224] Integral monotopic proteins (integral membrane proteins that are attached to only one side of the membrane and do not span the whole way across): selected transcripts are those derived from fusions in which TE acts as an acceptor (fusion exon->TE), as a donor (fusion TE->exon) or as both (metafusions)
[0225] Peripheral membrane proteins (adhered or associated to the cell membrane): selected transcripts are those derived from fusions in which TE acts as an acceptor (fusion exon->TE), as a donor (fusion TE->exon) or as both (metafusions)

[0226] Typically, the chimeric protein according to the present disclosure is expressed in more than 1%, notably more than 5%, and typically more than 10% of the tumor samples (from one or more subjects and/or from one or more tumor types, wherein tumor samples can be obtained from the TCGA. Alternatively or in addition, the chimeric protein (or pJET) can be expressed in one or more cell lines (typically from the CCLE), notably in at least 1; 2; 3; 4; 5; 6; 7; 8; 9; 10; 20; 50; 100 cell lines.

[0227] Typically, the chimeric protein according to the present disclosure is expressed at higher levels in tumor samples as compared to normal samples (including juxta-tumor samples) and/or cell lines. More particularly, the chimeric protein is preferably expressed in less than 20%, notably less than 10%, less than 5% or less than 1% of the normal samples or cell lines. In some embodiments, the chimeric protein is not detectably expressed in normal samples (including juxta-tumor samples).

[0228] The present disclosure also encompasses variants of chimeric polypeptides having at least 50%, notably at least 55%, 60%, 65%, 70%, 75%, 80%, 85%, 90%, 95%, 96%, 97%, 98%, 99%, identity with any one of the chimeric polypeptides (or proteins) of SEQ ID NO: 1-8202. Said variants chimeric polypeptides are expressed at the cell surface membrane. Typically in said variants, the sequence derived from the TE nucleotide sequence is preserved at has at least 90%, 95%, 96%, 97%, 98%, 99%, identity with the TE-derived sequence of the peptide which the variant derives. Most preferably said variants chimeric proteins do not match any annotated polypeptide or protein in normal proteome databases such as UniProt.

[0229] The (transmembrane) chimeric proteins as herein disclosed can also be modified by extending or decreasing the compound's amino acid sequence, e.g., by the addition or deletion of amino acids. The chimeric proteins can also be modified by altering the order or composition of certain residues, it being readily appreciated that certain amino acid residues essential for biological activity, e.g., those at critical contact sites or conserved residues, may generally not be altered without an adverse effect on biological activity. The non-critical amino acids need not be limited to those naturally occurring in proteins, such as L-α-amino acids, or their D-isomers, but may include non-natural amino acids as well, such as β-γ-δ-amino acids, as well as many derivatives of L-α-amino acids.

[0230] Typically, a series of peptides with single amino acid substitutions are employed to determine the effect of electrostatic charge, hydrophobicity, etc. on binding. The substitutions may be homo-oligomers or hetero-oligomers. The number and types of residues which are substituted or added depend on the spacing necessary between essential contact points and certain functional attributes which are sought (e.g., hydrophobicity versus hydrophilicity). In any event, such substitutions should employ amino acid residues or other molecular fragments chosen to avoid, for example, steric and charge interference which might disrupt binding.

[0231] Amino acid substitutions are typically of single residues. Substitutions, deletions, insertions or any combination thereof may be combined to arrive at a final peptide. Substitutional variants are those in which at least one residue of a peptide has been removed and a different residue inserted in its place. Such substitutions are generally made in accordance with the previously shown Table 1 when it is desired to finely modulate the characteristics of the peptide.

[0232] It is to be mentioned that chimeric polypeptides or proteins as herein disclosed can also be processed by the proteasome machinery and produce neoantigenic peptides typically of at least 8 amino acids (and in particular of 8-25 amino acids) that bind to at least one Major Histocompatibility Complex (MHC) molecule of said subject as previously detailed.

[0233] The present disclosure also encompasses antigen binding domains as described herein that bind to a chimeric protein as above defined or to a fragment thereof, notably to a neoantigenic tumor sequence thereof (or epitope) of a length at least 4, 5, 6 7, or 8 amino acids, with a dissociation constant (K_{d}) of about 2×10⁻⁷ M or less. In certain embodiments, the K_{d} is about 2×10⁻⁷ M or less, about 1×10⁻⁷ M or less, about 9×10⁻⁸ M or less, about 1×10⁻⁸ M or less, about 9×10⁻⁹ M or less, about 5×10⁻⁹ M or less, about 4×10⁻⁹ M or less, about 3×10⁻⁹ or less, about 2×10⁻⁹ M or less, or about 1×10⁻⁹ M or less, or about 1×10⁻¹⁰ M or less, or about 1×10⁻¹² M or less. In certain non-limiting embodiments, the K_{d} is about 3×10⁻⁹ M or less. In certain non-limiting embodiments, the K_{d} is from about 1×10⁻⁹ M to about 3×10⁻⁷ M. In certain non-limiting embodiments, the K_{d} is from about 1.5×10⁻⁹ M to about 3×10⁻⁷ M. In certain non-limiting embodiments, the K_{d} is from about 1.5×10⁻⁹ M to about 2.7×10⁻⁷ M. In certain non-limiting embodiments, the K_{d} is from about 1.5×10⁻¹⁰ M to about 2.7×10⁻⁷ M. In certain non-limiting embodiments, the K_{d} is from about 1.5×10⁻¹² M to about 2.7×10⁻⁷ M.

[0234] Binding of the antigen-binding domain (for example, a Fv or an analog thereof) can be confirmed by, for example, enzyme-linked immunosorbent assay (ELISA), radioimmunoassay (RIA), FACS analysis, bioassay (e.g, growth inhibition), Western Blot assay or fluorescent microscopy. Each of these assays generally detect the presence of protein-antibody complexes of particular interest by employing a labeled reagent (e.g, an antibody, or an Fv) specific for the complex of interest. For example, the Fv can be radioactively labeled and used in a radioimmunoassay (RIA) (see, for example, Weintraub, B., Principles of Radioimmunoassays, Seventh Training Course on Radioligand Assay Techniques, The Endocrine Society, March 1986, which is incorporated by reference herein). The radioactive isotope can be detected by such means as the use of a g counter or a scintillation counter or by autoradiography.

[0235] For microscopy, the labeled reagent (e.g, an antibody, or an Fv) can be either directly conjugated to a fluorophore or recognized by a fluorophore-conjugated secondary antibody directed against the labeled reagent. Non-limiting examples of fluorophores, also called fluorescent dyes, include derivatives of cyanine (e.g. Cy3) or rhodamine (e.g, TRITC) or fluorescein (e.g, FITC).

[0236] In certain embodiments, the extracellular antigen-binding domain is labeled with a fluorescent marker. Non-limiting examples of fluorescent markers include green fluorescent protein (GFP), blue fluorescent protein (e.g, EBFP, EBFP2, Azurite, and mKalamal), cyan fluorescent protein (e.g, ECFP, Cerulean, and CyPet), and yellow fluorescent protein (e.g, YFP, Citrine, Venus, and YPet).

[0237] In some embodiments, the antigen binding domain as herein disclosed binds to fragment (or a tumor neoantigenic peptide sequence) of the amino acid sequence (or an epitope) of a chimeric protein as herein described, which comprises at least a TE-derived amino acid sequence or is from any one of SEQ ID NO:1424-8202; 8203-10163, and 12831-21542 (typically is encoded by a fusion transcript wherein the TE is the donor). In some embodiments, the peptide sequence from the herein described chimeric protein overlaps the breakpoint between, the TE-derived amino acid sequence and the exon-derived amino acid sequence. In other embodiments, the peptide sequence is derived from a pure TE sequence. In yet other embodiments, the peptide sequence is encoded by a non-canonical ORF downstream of the junction between the TE-derived amino acid sequence and the exon-derived amino acid sequence.

[0238] In some embodiments, the antigen binding domain according to the present disclosure binds a neoantigenic peptide sequence from any one of the chimeric polypeptides neoantigenic peptides as herein disclosed or fragment thereof, wherein said neoantigenic peptide sequence:
[0239] a) is from any one of SEQ ID NO: 1-21542 or a fragment thereof and comprises at least a sequence derived from the TE-derived amino acid nucleotide sequence, optionally (i) a fragment that overlaps the breakpoint between, the TE-derived amino acid sequence and an exon-derived amino acid sequence or, optionally (ii) a pure TE sequence; or
[0240] b) is from any one of SEQ ID NO:1-1423; 8203-10163, and 10164-12830 (typically is encoded by a fusion transcript wherein the exon is the donor) or a fragment thereof, and is encoded by a non-canonical ORF downstream of the junction between the TE-derived amino acid sequence and the exon-derived amino acid sequence.

[0241] Typically, the peptide sequence is from an extracellular portion of the chimeric protein.

[0242] In certain embodiments, the antigen-binding domain comprises an antigen binding portion of a TCR.

[0243] In certain embodiments, the antigen-binding domain comprises an antigen binding portion of an antibody or a fragment thereof. In certain embodiments, the antigen-binding domain comprises a heavy chain variable region (VH) and/or a light chain variable region (VL) of an antibody. In certain embodiments, the antigen-binding domain comprises a single-chain variable fragment (scFv).

[0244] In certain embodiments, the antigen-binding domain comprises a heavy chain-only antibody (VHH) or a variant thereof and/or a VL domain or a variant thereof.

[0245] In certain embodiments, the antigen-binding domain comprises a Fab, which is optionally crosslinked. In certain embodiments, the antigen-binding domain comprises a F(ab)₂. In certain embodiments, any of the foregoing molecules can be comprised in a fusion protein with a heterologous sequence to form the antigen-binding domain.

[0246] In certain embodiments, the extracellular antigen-binding domain is derived from a scFv, Fab, or antibody of murine, human or camelid (e.g., lama) origin.

### Peptide Productions, Polynucleotides and Vectors

[0247] Proteins or peptides may be made by any technique known to those of skill in the art, including the expression of proteins, polypeptides or peptides through standard molecular biological techniques, the isolation of proteins or peptides from natural sources, or the chemical synthesis of proteins or peptides. The nucleotide and protein, polypeptide and peptide sequences corresponding to various genes have been previously disclosed, and may be found at computerized databases known to those of ordinary skill in the art. One such database is the National Center for Biotechnology Information's Genbank and GenPept databases located at the National Institutes of Health website. The coding regions for known genes may be amplified and/or expressed using the techniques disclosed herein or as would be known to those of ordinary skill in the art. Alternatively, various commercial preparations of proteins, polypeptides and peptides are known to those of skill in the art.

[0248] In a further aspect the present disclosure provides a nucleic acid (e.g. polynucleotide) encoding a neoantigenic peptide as herein disclosed. The polynucleotide may be selected from DNA, cDNA, PNA, CNA, RNA, either single- and/or double-stranded, or native or stabilized forms of polynucleotides, such as for example polynucleotides with a phosphorothiate backbone, or combinations thereof and it may or may not contain introns so long as it codes for the peptide. Only peptides that contain naturally occurring amino acid residues joined by naturally occurring peptide bonds are encodable by a polynucleotide.

[0249] A still further aspect of the disclosure provides an expression vector capable of expressing a neoantigenic peptide as herein disclosed. Expression vectors for different cell types are well known in the art and can be selected without undue experimentation. Generally, the DNA is inserted into an expression vector, such as a plasmid, in proper orientation and correct reading frame for expression. The expression vector will comprise the appropriate heterologous transcriptional and/or translational regulatory control nucleotide sequences recognized by the desired host. The polynucleotide encoding the tumor neoantigenic peptide may be linked to such heterologous regulatory control nucleotide sequences or may be non-adjacent yet operably linked to such heterologous regulatory control nucleotide sequences. The vector is then introduced into the host through standard techniques. Guidance can be found for example in Sambrook et al. (1989) Molecular Cloning, A Laboratory Manual, Cold Spring Harbor Laboratory, Cold Spring Harbor, N.Y.

### Antigen Presenting Cells (APCs)

[0250] The present disclosure also encompasses a population of antigen presenting cells that have been pulsed with one or more of the peptides as previously defined and/or obtainable in a method as previously described. Preferably, the antigen presenting cells are dendritic cell (DCs) or artificial antigen presenting cells (aAPCs) (see Neal, Lillian R et al. “The Basics of Artificial Antigen Presenting Cells in T Cell-Based Cancer Immunotherapies.” Journal of immunology research and therapy vol. 2, 1 (2017): 68-79). Dendritic cells (DC) are professional antigen-presenting cells (APC) that have an extraordinary capacity to stimulate naive T-cells and initiate primary immune responses to pathogens. Indeed, the main role of mature DCs are to sense antigens and produce mediators that activate other immune cells, particularly T cells. DCs are potent stimulators for lymphocyte activation as they express MHC molecules that trigger TCRs (signal 1) and co-stimulatory molecules (signal 2) on T cells. Additionally, DCs also secrete cytokines that support T cell expansion. T cells require presented antigen in the form of a processed peptide to recognize foreign pathogens or tumor. Presentation of peptide epitopes derived from pathogen/tumor proteins is achieved through MHC molecules. MHC class I (MHC-I) and MHC class II (MHC-II) molecules present processed peptides to CD8+ T cells and CD4+ T cells, respectively. Importantly, DCs home to inflammatory sites containing abundant T cell populations to foster an immune response. Thus, DCs can be a crucial component of any immunotherapeutic approach, as they are intimately involved with the activation of the adaptive immune response. In the context of vaccines, DC therapy can enhance T cell immune responses to a desired target in healthy volunteers or patients with infectious disease or cancer. In one embodiment, APCS are artificial APC, which are genetically modified to express the desired T-cell co-stimulatory molecules, human HLA alleles and/or cytokines. Such artificial antigen presenting cells (aAPC) are able to provide the requirements for adequate T-cell engagement, co-stimulation, as well as sustained release of cytokines that allow for controlled T-cell expansion. These cells are not subject to the constraints of time and limited availability and can be stored in small aliquots for subsequent use in generating T-cell lines from different donors, thus representing an off the shelf reagent for immunotherapy applications. Expression of potent co-stimulatory signals on these aAPC endows this system with higher efficiency lending to increased efficacy of adoptive immunotherapy. Furthermore, aAPC can be engineered to express genes directing release of specific cytokines to facilitate the preferential expansion of desirable T-cell subsets for adoptive transfer; such as long lived memory T-cells (see for review Hasan A H et al., Artificial Antigen Presenting Cells: An Off the Shelf Approach for Generation of Desirable T-Cell Populations for Broad Application of Adoptive Immunotherapy; Adv Genet Eng. 2015; 4 (3): 130, Kim J V, Latouche J B, Rivière I, Sadelain M. The ABCs of artificial antigen presentation. Nat Biotechnol. 2004; 22:403-410 or Wang C, Sun W, Ye Y, Bomba H N, Gu Z. Bioengineering of Artificial Antigen Presenting Cells and Lymphoid Organs. Theranostics 2017; 7 (14): 3504-3516.).

[0251] Typically, the dendritic cells are autologous dendritic cells that are pulsed with a neoantigenic peptide as herein disclosed. The peptide may be any suitable peptide that gives rise to an appropriate T-cell response. The antigen-presenting cell (or stimulator cell) typically has an MHC class I or II molecule on its surface, and in one embodiment is substantially incapable of itself loading the MHC class I or II molecule with the selected antigen. The MHC class I or II molecule may readily be loaded with the selected antigen in vitro.

[0252] As an alternative the antigen presenting cell may comprise an expression construct encoding a tumor neoantigenic peptide as herein disclosed. The polynucleotide may be any suitable polynucleotide as previously defined and it is preferred that it is capable of transducing the dendritic cell, thus resulting in the presentation of a peptide and induction of immunity

[0253] Thus the present disclosure encompasses a population of APCs than can be pulsed or loaded with the neoantigenic peptide as herein disclosed, genetically modified (via DNA or RNA transfer) to express at least one neoantigenic peptide as herein disclosed, or that comprise an expression construct encoding a tumor neoantigenic peptide of the present disclosure. Typically the population of APCs is pulsed or loaded, modified to express or comprises at least one, at least 5, at least 10, at least 15, or at least 20 different neoantigenic peptide or expression construct encoding it.

[0254] The present disclosure also encompasses compositions comprising APCs as herein disclosed. APCs can be suspended in any known physiologically compatible pharmaceutical carrier, such as cell culture medium, physiological saline, phosphate-buffered saline, cell culture medium, or the like, to form a physiologically acceptable, aqueous pharmaceutical composition. Parenteral vehicles include sodium chloride solution, Ringer's dextrose, dextrose and sodium chloride, lactated Ringer's. Other substances may be added as desired such as antimicrobials.

[0255] As used herein, a “carrier” refers to any substance suitable as a vehicle for delivering an APC to a suitable in vitro or in vivo site of action. As such, carriers can act as an excipient for formulation of a therapeutic or experimental reagent containing an APC. Preferred carriers are capable of maintaining an APC in a form that is capable of interacting with a T cell. Examples of such carriers include, but are not limited to water, phosphate buffered saline, saline, Ringer's solution, dextrose solution, serum-containing solutions, Hank's solution and other aqueous physiologically balanced solutions or cell culture medium. Aqueous carriers can also contain suitable auxiliary substances required to approximate the physiological conditions of the recipient, for example, enhancement of chemical stability and isotonicity. Suitable auxiliary substances include, for example, sodium acetate, sodium chloride, sodium lactate, potassium chloride, calcium chloride, sorbitan monolaurate, triethanolamine oleate, and other substances used to produce phosphate buffer, Tris buffer, and bicarbonate buffer.

### Vaccine Compositions

[0256] The present disclosure further encompasses a vaccine or immunogenic composition capable of raising a specific T-cell response comprising:
[0257] one or more neoantigenic peptides as herein defined,
[0258] one or more polynucleotides encoding a neoantigenic peptide as herein defined; and/or
[0259] a population of antigen presenting cells (such as autologous dendritic cells or artificial APC) as described above.

[0260] Preferably, neoantigenic peptide which are encoded by tumor specific fusions as previously defined are used in vaccine compositions as per the present disclosure. Said neoantigenic peptide can be also named tumor specific peptides. Preferably also polynucleotides encoding tumor specific peptides are used as per the present disclosure.

[0261] A suitable vaccine or immunogenic composition will preferably contain between 1 and 20 neoantigenic peptides, more preferably 2, 3, 4, 5, 6, 7, 8, 9, 10, 11, 12, 13, 14, 15, 16, 17, 18, 19, 20, 21, 22, 23, 24, 25 different neoantigenic peptides, further preferred 6, 7, 8, 9, 10 11, 12, 13, or 14 different neoantigenic peptides, and most preferably 12, 13 or 14 different neoantigenic peptides.

[0262] The neoantigenic peptide(s) may be linked to a carrier protein. Where the composition contains two or more neoantigenic peptides, the two or more (e.g. 2-25) peptides may be linearly linked by a spacer molecule as described above, e.g. a spacer comprising 2-6 nonpolar or neutral amino acids.

[0263] In one embodiment of the present disclosure the different neoantigenic peptides, encoding polynucleotides, vectors, or APCs are selected so that one vaccine or immunogenic composition comprises neoantigenic peptides capable of associating with different MHC molecules, such as different MHC class I molecules. Preferably, such neoantigenic peptides are capable of associating with the most frequently occurring MHC class I molecules, e.g. different fragments capable of associating with at least 2 preferred, more preferably at least 3 preferred, even more preferably at least 4 preferred MHC class I molecules. In some embodiments, the compositions comprise peptides, encoding polynucleotides, vectors, or APCs capable of associating with one or more MHC class II molecules. The MHC is optionally HLA-A, -B, -C, -DP, -DQ, or -DR.

[0264] The vaccine or immunogenic composition is capable of raising a specific cytotoxic T-cells response and/or a specific helper T-cell response.

[0265] Thus in a particular embodiment, the present disclosure also relates to a neoantigenic peptide as described above, wherein the neoantigenic peptide has a tumor specific neoepitope and is included in a vaccine or immunogenic composition. A vaccine composition is to be understood as meaning a composition for generating immunity for the prophylaxis and/or treatment of diseases. Accordingly, vaccines are medicines which comprise or generate antigens and are intended to be used in humans or animals for generating specific defense and protective substance by vaccination. An “immunogenic composition” is to be understood as meaning a composition that comprises or generates antigen(s) and is capable of eliciting an antigen-specific humoral or cellular immune response, e.g. T-cell response.

[0266] In a preferred embodiment, the neoantigenic peptide according to the disclosure is 8 or 9 residues long, or from 13 to 25 residues long. When the peptide is less than 20 residues, in order to have a peptide better suited for in vivo immunization, said neoantigenic peptide, is optionally flanked by additional amino acids to obtain an immunization peptide of more amino acids, usually more than 20.

[0267] Pharmaceutical compositions (i.e., the vaccine or immunogenic composition) comprising a peptide as herein described may be administered to an individual already suffering from cancer. In therapeutic applications, compositions are administered to a patient in an amount sufficient to elicit an effective CTL response to the tumor antigen and to cure or at least partially arrest symptoms and/or complications. An amount adequate to accomplish this is defined as “therapeutically effective dose.” Amounts effective for this use will depend on, e.g., the peptide composition, the manner of administration, the stage and severity of the disease being treated, the weight and general state of health of the patient, and the judgment of the prescribing physician, but generally range for the initial immunization (that is for therapeutic or prophylactic administration) from about 1.0 μg to about 50,000 μg of peptide for a 70 kg patient, followed by boosting dosages or from about 1.0 μg to about 10,000 μg of peptide pursuant to a boosting regimen over weeks to months depending upon the patient's response and condition by measuring specific CTL activity in the patient's blood. It must be kept in mind that the peptide and compositions of the present invention may generally be employed in serious disease states, that is, life-threatening or potentially life threatening situations, especially when the cancer has metastasized. In such cases, in view of the minimization of extraneous substances and the relative nontoxic nature of the peptide, it is possible and may be felt desirable by the treating physician to administer substantial excesses of these peptide compositions.

[0268] For therapeutic use, administration should begin at the detection or surgical removal of tumors. This is followed by boosting doses until at least symptoms are substantially abated and for a period thereafter.

[0269] The vaccine or immunogenic compositions for therapeutic treatment are intended for parenteral, topical, nasal, oral or local administration. Preferably, the pharmaceutical compositions are administered parenterally, e.g., intravenously, subcutaneously, intradermally, or intramuscularly. The compositions may be administered at the site of surgical excision to induce a local immune response to the tumor.

[0270] The vaccine or immunogenic composition may be a pharmaceutical composition which additionally comprises a pharmaceutically acceptable adjuvant, immunostimulatory agent, stabilizer, carrier, diluent, excipient and/or any other materials well known to those skilled in the art. Such materials should be non-toxic and should not interfere with the efficacy of the active ingredient. The carrier is preferably an aqueous carrier but its precise nature of the carrier or other material will depend on the route of administration. A variety of aqueous carriers may be used, e.g., water, buffered water, 0.9% saline, 0.3% glycine, hyaluronic acid and the like. These compositions may be sterilized by conventional, well known sterilization techniques, or may be sterile filtered. The resulting aqueous solutions may be packaged for use as is, or lyophilized, the lyophilized preparation being combined with a sterile solution prior to administration. The compositions may further contain pharmaceutically acceptable auxiliary substances as required to approximate physiological conditions, such as pH adjusting and buffering agents, tonicity adjusting agents, wetting agents and the like, for example, sodium acetate, sodium lactate, sodium chloride, potassium chloride, calcium chloride, sorbitan monolaurate, triethanolamine oleate, etc. See, for example, Butterfield, B M J. 2015 22; 350 for a discussion of cancer vaccines.

[0271] Example adjuvants that increase or expand the immune response of a host to an antigenic compound include emulsifiers, muramyl dipeptides, avridine, aqueous adjuvants such as aluminum hydroxide, chitosan-based adjuvants, saponins, oils, Amphigen, LPS, bacterial cell wall extracts, bacterial DNA, CpG sequences, synthetic oligonucleotides, cytokines and combinations thereof. Emulsifier include, for example, potassium, sodium and ammonium salts of lauric and oleic acid, calcium, magnesium and aluminum salts of fatty acids, organic sulfonates such as sodium lauryl sulfate, cetyltrhethylammonlum bromide, glycerylesters, polyoxyethylene glycol esters and ethers, and sorbitan fatty acid esters and their polyoxyethylene, acacia, gelatin, lecithin and/or cholesterol. Adjuvants that comprise an oil component include mineral oil, a vegetable oil, or an animal oil. Other adjuvants include Freund's Complete Adjuvant (FCA) or Freund's Incomplete Adjuvant (FIA). Cytokines useful as additional immunostimulatory agents include interferon alpha, interleukin-2 (IL-2), and granulocyte macrophage-colony stimulating factor (GM-CSF), or combinations thereof.

[0272] The concentration of peptides as herein described in the vaccine or immunogenic formulations can vary widely, i.e., from less than about 0.1%, usually at or at least about 2% to as much as 20% to 50% or more by weight, and will be selected primarily by fluid volumes, viscosities, etc., in accordance with the particular mode of administration selected.

[0273] The peptides as herein described may also be administered via liposomes, which target the peptides to a particular cells tissue, such as lymphoid tissue. Liposomes are also useful in increasing the half-life of the peptides. Liposomes include emulsions, foams, micelles, insoluble monolayers, liquid crystals, phospholipid dispersions, lamellar layers and the like. In these preparations the peptide to be delivered is incorporated as part of a liposome, alone or in conjunction with a molecule which binds to, e.g., a receptor prevalent among lymphoid cells, such as monoclonal antibodies which bind to the CD45 antigen, or with other therapeutic or immunogenic compositions. Thus, liposomes filled with a desired peptide of the invention can be directed to the site of lymphoid cells, where the liposomes then deliver the selected therapeutic/immunogenic peptide compositions. Liposomes for use in the invention are formed from standard vesicle-forming lipids, which generally include neutral and negatively charged phospholipids and a sterol, such as cholesterol. The selection of lipids is generally guided by consideration of, e.g., liposome size, acid lability and stability of the liposomes in the blood stream. A variety of methods are available for preparing liposomes, as described in, e.g., Szoka et al., Ann. Rev. Biophys. Bioeng. 9; 467 (1980), USA U.S. Pat. Nos. 4,235,871, 4,501,728 U.S. Pat. Nos. 4,501,728, 4,837,028, and 5,019,369.

[0274] For targeting to the immune cells, a ligand to be incorporated into the liposome can include, e.g., antibodies or fragments thereof specific for cell surface determinants of the desired immune system cells. A liposome suspension containing a peptide may be administered intravenously, locally, topically, etc. in a dose which varies according to, inter alia, the manner of administration, the peptide being delivered, and the stage of the disease being treated.

[0275] For solid compositions, conventional or nanoparticle nontoxic solid carriers may be used which include, for example, pharmaceutical grades of mannitol, lactose, starch, magnesium stearate, sodium saccharin, talcum, cellulose, glucose, sucrose, magnesium carbonate, and the like. For oral administration, a pharmaceutically acceptable nontoxic composition is formed by incorporating any of the normally employed excipients, such as those carriers previously listed, and generally 10-95% of active ingredient, that is, one or more peptides of the invention, and more preferably at a concentration of 25%-75%.

[0276] For aerosol administration, the immunogenic peptides are preferably supplied in finely divided form along with a surfactant and propellant. Typical percentages of peptides are 0.01%-20% by weight, preferably 1%-10%. The surfactant must, of course, be nontoxic, and preferably soluble in the propellant. Representative of such agents are the esters or partial esters of fatty acids containing from 6 to 22 carbon atoms, such as caproic, octanoic, lauric, palmitic, stearic, linoleic, linolenic, olesteric and oleic acids with an aliphatic polyhydric alcohol or its cyclic anhydride. Mixed esters, such as mixed or natural glycerides may be employed. The surfactant may constitute 0.1%-20% by weight of the composition, preferably 0.25-5%. The balance of the composition is ordinarily propellant. A carrier can also be included as desired, as with, e.g., lecithin for intranasal delivery.

[0277] Cytotoxic T-cells (CTLs) recognize an antigen in the form of a peptide bound to an MHC molecule rather than the intact foreign antigen itself. The MHC molecule itself is located at the cell surface of an antigen presenting cell. Thus, an activation of CTLs is only possible if a trimeric complex of peptide antigen, MHC molecule, and antigen presenting cell (APC) is present. Correspondingly, it may enhance the immune response if not only the peptide is used for activation of CTLs, but if additionally APCs with the respective MHC molecule are added. Therefore, in some embodiments the vaccine or immunogenic composition according to the present disclosure alternatively or additionally contains at least one antigen presenting cell, preferably a population of APCs.

[0278] The vaccine or immunogenic composition may thus be delivered in the form of a cell, such as an antigen presenting cell, for example as a dendritic cell vaccine. The antigen presenting cells such as a dendritic cell may be pulsed or loaded with a neoantigenic peptide as herein disclosed, may comprise an expression construct encoding a neoantigenic peptide as herein disclosed, or may be genetically modified (via DNA or RNA transfer) to express one, two or more of the herein disclosed neoantigenic peptides, for example at least 2, 3, 4, 5, 6, 7, 8, 9, or 10 neoantigenic peptides.

[0279] Suitable vaccines or immunogenic compositions may also be in the form of DNA or RNA relating to neoantigenic peptides as described herein. For example, DNA or RNA encoding one or more neoantigenic peptides or proteins derived therefrom may be used as the vaccine, for example by direct injection to a subject. For example, DNA or RNA encoding at least 2, 3, 4, 5, 6, 7, 8, 9, 10, 11, 12, 13, 14, 15, 16, 17, 18, 19, 20, 21, 22, 23, 24 or 25 neoantigenic peptides or proteins derived therefrom.

[0280] A number of methods are conveniently used to deliver the nucleic acids to the patient. For instance, the nucleic acid can be delivered directly, as “naked DNA”. This approach is described, for instance, in Wolff et al., Science 247:1465-1468 (1990) as well as USAU.S. U.S. Pat. Nos. 5,580,859 and 5,589,466. The nucleic acids can also be administered using ballistic delivery as described, for instance, in U.S. Pat. No. 5,204,253. Particles comprised solely of DNA can be administered. Alternatively, DNA can be adhered to particles, such as gold particles.

[0281] The nucleic acids can also be delivered complexed to cationic compounds, such as cationic lipids. Lipid-mediated gene delivery methods are described, for instance, in 9618372WOAWO 96/18372; 9324640WOAWO 93/24640; Mannino & Gould-Fogerite, BioTechniques 6 (7): 682-691 (1988); 5279833USARose U.S. Pat. Nos. 5,279,833; 9,106,309WOAWO 91/06309; and Felgner et al., Proc. Natl. Acad. Sci. USA 84:7413-7414 (1987).

[0282] Delivery systems may optionally include cell-penetrating peptides, nanoparticulate encapsulation, virus like particles, liposomes, or any combination thereof. Cell penetrating peptides include TAT peptide, herpes simplex virus VP22, transportan, Antp. Liposomes may be used as a delivery system. Listeria vaccines or electroporation may also be used.

[0283] The one or more neoantigenic peptides may also be delivered via a bacterial or viral vector containing DNA or RNA sequences which encode one or more neoantigenic peptides. The DNA or RNA may be delivered as a vector itself or within attenuated bacteria virus or live attenuated virus, such as vaccinia or fowlpox. This approach involves the use of vaccinia virus as a vector to express nucleotide sequences that encode the peptide of the invention. Upon introduction into an acutely or chronically infected host or into a noninfected host, the recombinant vaccinia virus expresses the immunogenic peptide, and thereby elicits a host CTL response. Vaccinia vectors and methods useful in immunization protocols are described in, e.g., U.S. Pat. No. 4,722,848. Another vector is BCG (Bacille Calmette Guerin). BCG vectors are described in Stover et al. (Nature 351:456-460 (1991)). A wide variety of other vectors useful for therapeutic administration or immunization of the peptides of the invention, e.g., Salmonella typhivectors and the like, will be apparent to those skilled in the art from the description herein.

[0284] An appropriate mean of administering nucleic acids encoding the peptides as herein described involves the use of minigene constructs encoding multiple epitopes. To create a DNA sequence encoding the selected CTL epitopes (minigene) for expression in human cells, the amino acid sequences of the epitopes are reverse translated. A human codon usage table is used to guide the codon choice for each amino acid. These epitope-encoding DNA sequences are directly adjoined, creating a continuous polypeptide sequence. To optimize expression and/or immunogenicity, additional elements can be incorporated into the minigene design. Examples of amino acid sequence that could be reverse translated and included in the minigene sequence include: helper T lymphocyte, epitopes, a leader (signal) sequence, and an endoplasmic reticulum retention signal. In addition, MHC presentation of CTL epitopes may be improved by including synthetic (e.g. poly-alanine) or naturally-occurring flanking sequences adjacent to the CTL epitopes.

[0285] The minigene sequence is converted to DNA by assembling oligonucleotides that encode the plus and minus strands of the minigene. Overlapping oligonucleotides (30-100 bases long) are synthesized, phosphorylated, purified and annealed under appropriate conditions using well known techniques. The ends of the oligonucleotides are joined using T4 DNA ligase. This synthetic minigene, encoding the CTL epitope polypeptide, can then cloned into a desired expression vector.

[0286] Standard regulatory sequences well known to those of skill in the art are included in the vector to ensure expression in the target cells. Thus, the DNA or RNA encoding the neoantigenic peptide(s) may typically be operably linked to one or more of:
[0287] a promoter that can be used to drive nucleic acid molecule expression. AAV ITR can serve as a promoter and is advantageous for eliminating the need for an additional promoter element. For ubiquitous expression, the following promoters can be used: CMV (notably human cytomegalovirus immediate early promoter (hCMV-IE)), CAG, CBh, PGK, SV40, RSV, Ferritin heavy or light chains, etc. For brain expression, the following promoters can be used: Synapsinl for all neurons, CaMKIIalpha for excitatory neurons, GAD67 or GAD65 or VGAT for GABAergic neurons, etc. Promoters used to drive RNA synthesis can include: Pol III promoters such as U6 or HI. The use of a Pol II promoter and intronic cassettes can be used to express guide RNA (gRNA). Typically, the promoter includes a down-stream cloning site for minigene insertion. For examples of suitable promoters sequences, see notably U.S. Pat. Nos. 5,580,859 and 5,589,466.
[0288] Transcriptional transactivators or other enhancer elements, which can also increase transcription activity, e.g. the regulatory R region from the 5′ long terminal repeat (LTR) of human T-cell leukemia virus type 1 (HTLV-1) (which when combined with a CMV promoter has been shown to induce higher cellular immune response).
[0289] Translation optimizing sequences e.g. a Kozak sequence flanking the AUG initiator codon (ACCAUGG) within mRNA, and codon optimization.

[0290] Additional vector modifications may be desired to optimize minigene expression and immunogenicity. In some cases, introns are required for efficient gene expression, and one or more synthetic or naturally-occurring introns could be incorporated into the transcribed region of the minigene. The inclusion of mRNA stabilization sequences can also be considered for increasing minigene expression. It has recently been proposed that immunostimulatory sequences (ISSs or CpGs) play a role in the immunogenicity of DNA′ vaccines. These sequences could be included in the vector, outside the minigene coding sequence, if found to enhance immunogenicity.

[0291] In some embodiments, a bicistronic expression vector, to allow production of the minigene-encoded epitopes and a second protein included to enhance or decrease immunogenicity can be used.

[0292] DNA vaccines or immunogenic compositions as herein described can be enhanced by co-delivering cytokines that promote cell-mediated immune responses, such as IL-2, IL-12, IL-18, GM-CSF and IFNγ. CXC chemokines such as IL-8, and CC chemokines such as macrophage inflammatory protein (MIP)-1α, MIP-3α, MIP-3β, and RANTES, may increase the potency of the immune response. DNA vaccine immunogenicity can also be enhanced by co-delivering plasmid-encoded cytokine-inducing molecules (e.g. LeIF), co-stimulatory and adhesion molecules, e.g. B7-1 (CD80) and/or B7-2 (CD86). Helper (HTL) epitopes could be joined to intracellular targeting signals and expressed separately from the CTL epitopes. This would allow direction of the HTL epitopes to a cell compartment different than the CTL epitopes. If required, this could facilitate more efficient entry of HTL epitopes into the MHC class II pathway, thereby improving CTL induction. In contrast to CTL induction, specifically decreasing the immune response by co-expression of immunosuppressive molecules (e.g. TGF-β) may be beneficial in certain diseases.

[0293] Once an expression vector is selected, the minigene is cloned into the polylinker region downstream of the promoter. This plasmid is transformed into an appropriate E. coli strain, and DNA is prepared using standard techniques. The orientation and DNA sequence of the minigene, as well as all other elements included in the vector, are confirmed using restriction mapping and DNA sequence analysis. Bacterial cells harboring the correct plasmid can be stored as a master cell bank and a working cell bank.

[0294] Purified plasmid DNA can be prepared for injection using a variety of formulations. The simplest of these is reconstitution of lyophilized DNA in sterile phosphate-buffer saline (PBS). A variety of methods have been described, and new techniques may become available. As noted above, nucleic acids are conveniently formulated with cationic lipids. In addition, glycolipids, fusogenic liposomes, peptides and compounds referred to collectively as protective, interactive, non-condensing (PINC) could also be complexed to purified plasmid DNA to influence variables such as stability, intramuscular dispersion, or trafficking to specific organs or cell types.

[0295] Vaccines or immunogenic compositions comprising peptides may be administered in combination with vaccines or immunogenic compositions comprising polynucleotide encoding the peptides. For example, administration of peptide vaccine and DNA vaccine may be alternated in a prime-boost protocol. For example, priming with a peptide immunogenic composition and boosting with a DNA immunogenic composition is contemplated, as is priming with a DNA immunogenic composition and boosting with a peptide immunogenic composition.

[0296] The present disclosure also encompasses a method for producing a vaccine composition comprising the steps of:
[0297] a) Optionally, identifying at least one neoantigenic peptide according to the method as previously described;
[0298] b) producing said at least one neoantigenic peptide, at least one polypeptide encoding neoantigenic peptide(s), or at least a vector comprising said polypeptide(s) as described herein; and
[0299] c) optionally adding physiologically acceptable buffer, excipient and/or adjuvant and producing a vaccine with said at least one neoantigenic peptide, polypeptide or vector.

[0300] Another aspect of the present disclosure, is a method for producing a DC vaccine, wherein said DCs present at least one neoantigenic peptide as herein disclosed.

### Antibodies TCRs, CARs and Derivatives Thereof

[0301] The present disclosure also relates to an antibody or an antigen-binding fragment thereof that specifically binds a chimeric polypeptide (or protein), and most preferably a chimeric protein of SEQ ID NO: 1-8202, or a neoantigenic peptide typically in association with an MHC or HLA molecule, as herein disclosed.

[0302] In some embodiments, said antibody or antigen-binding fragment thereof comprises or consists in an antigen-binding domain (that bind a chimeric protein) as previously defined.

[0303] Typically, said antibody, or antigen-binding fragment thereof binds a neoantigenic peptide typically in association with an MHC or HLA molecule or a (transmembrane) chimeric protein, as previously defined, with a dissociation constant (K_{d}) of about 2×10⁻⁷ M or less. In certain embodiments, the K_{d} is about 2×10⁻⁷ M or less, about 1×10⁻⁷ M or less, about 9×10⁻⁸ M or less, about 1×10⁻⁸ M or less, about 9×10⁻⁹ M or less, about 5×10⁻⁹ M or less, about 4×10⁻9 M or less, about 3×10⁻⁹ or less, about 2×10⁻⁹ M or less, or about 1×10⁻⁹ M or less. In certain non-limiting embodiments, the K_{d} is about 3×10⁻⁹ M or less. In certain non-limiting embodiments, the K_{d} is from about 1×10⁻⁹ M to about 3×10⁻⁷ M. In certain non-limiting embodiments, the K_{d} is from about 1.5×10⁻⁹ M to about 3×10⁻⁷ M. In certain non-limiting embodiments, the K_{d} is from about 1.5×10⁻⁹ M to about 2.7×10⁻⁷ M.

[0304] To promote the infiltration and recognition of tumor cells by lymphocytes T (LT), another strategy consists in using antibodies capable of recognizing more than one antigenic target simultaneously and more particularly two antigenic targets simultaneously. There are many formats of bispecific antibodies. BiTE (bi-specific T-cell engager) are the first to have been developed. These are proteins of fusion consisting of two scFvs (variable domains heavy VH and light VL chains) from two antibodies linked by a binding peptide: one recognizes the LT marker (CD3+) and the other a tumor antigen. The goal is to favor recruitment and activation of LTs in contact with tumor, thus leading to cell lysis tumor (See for review Patrick A. Baeuerle and Carsten Reinhardt; Bispecific T-Cell Engaging Antibodies for Cancer Therapy; Cancer Res 2009; 69: (12). Jun. 15, 2009; and Galaine et al., Innovations & Thérapeutiques en Oncologie, vol. 3-no 3-7, mai-août 2017).

[0305] In a particular embodiment, said antibody is thus a bi-specific T-cell engager that targets a chimeric protein as herein defined, and in particular that comprises an antigen binding domain as previously defined.

[0306] The term “antibody” herein is used in the broadest sense and includes polyclonal and monoclonal antibodies, including intact antibodies and functional (antigen-binding) antibody fragments, including fragment antigen binding (Fab) fragments, F(ab′)2 fragments, Fab′ fragments, Fv fragments, recombinant IgG (rlgG) fragments, variable heavy chain (VH) regions capable of specifically binding the antigen, single chain antibody fragments, including single chain variable fragments (scFv), and single domain antibodies (e.g., VHH antibodies, sdAb, sdFv, nanobody) fragments. The term encompasses genetically engineered and/or otherwise variants modified forms of immunoglobulins, such as intrabodies, peptibodies, chimeric antibodies, fully human antibodies, humanized antibodies, and heteroconjugate antibodies, multispecific, e.g., bispecific, antibodies, diabodies, triabodies, and tetrabodies, tandem di-scFv, tandem tri-scFv. Unless otherwise stated, the term “antibody” should be understood to encompass functional antibody and fragments thereof. The term also encompasses intact or full-length antibodies, including antibodies of any class or sub-class, including IgG and sub-classes thereof, IgG1, IgG2, IgG3, IgG4, IgM, IgE, IgA, and IgD. In some embodiments, the antibody comprises a light chain variable domain and a heavy chain variable domain, e.g. in an scFv format.

[0307] Antibodies include variant polypeptide species that have one or more amino acid substitutions, insertions, or deletions in the native amino acid sequence, provided that the antibody retains or substantially retains its specific binding function. Conservative substitutions of amino acids are well known and described above.

[0308] The present disclosure further includes a method of producing an antibody, or antigen-binding fragment thereof, comprising a step of selecting antibodies that bind to a tumor neoantigen peptide as herein defined, typically in association with an MHC or HLA molecule, or that bind a chimeric protein as herein defined with a dissociation constant (K_{d}) of about 2×10⁻⁷ M or less. In certain embodiments, the K_{d} is about 2×10⁻⁷ M or less, about 1×10⁻⁷ M or less, about 9×10⁻⁸ M or less, about 1×10⁻⁸ M or less, about 9×10⁻⁹ M or less, about 5×10⁻⁹ M or less, about 4×10⁻⁹ M or less, about 3×10⁻⁹ or less, about 2×10⁻⁹ M or less, or about 1×10⁻⁹ M or less, or about 1×10⁻¹⁰ M or less, or about 1×10⁻¹² M or less.

[0309] In certain embodiments, the antibody is of murine, human or camelid (e.g., lama) origin.

[0310] In some embodiments, the antibodies are selected from a library of human antibody sequences. In some embodiments, the antibodies are generated by immunizing an animal with a chimeric protein of any one of SEQ ID NO:1-8202, as previously defined, or a portion thereof (in particular with the extracellular portion), followed by the selection step.

[0311] Antibodies including chimeric, humanized or human antibodies can be further affinity matured and selected as described above. Humanized antibodies contain rodent-sequence derived CDR regions; typically the rodent CDRs are engrafted into a human framework, and some of the human framework residues may be back-mutated to the original rodent framework residue to preserve affinity, and/or one or a few of the CDR residues may be mutated to increase affinity. Fully human antibodies have no murine sequence, and are typically produced via phage display technologies of human antibody libraries, or immunization of transgenic mice whose native immunoglobin loci have been replaced with segments of human immunoglobulin loci.

[0312] Antibodies produced by said method, as well as immune cells expressing such antibodies or fragments thereof are also encompassed by the present disclosure.

[0313] The present disclosure also encompasses pharmaceutical compositions comprising one or more antibodies as herein disclosed alone or in combination with at least one other agent, such as a stabilizing compound, which may be administered in any sterile, biocompatible pharmaceutical carrier and optionally formulated with formulated with sterile pharmaceutically acceptable buffer(s), diluent(s), and/or excipient(s). Pharmaceutically acceptable carriers typically enhance or stabilize the composition, and/or can be used to facilitate preparation of the composition. Pharmaceutically acceptable carriers include solvents, dispersion media, coatings, antibacterial and antifungal agents, isotonic and absorption delaying agents, and the like that are physiologically compatible and in some embodiments pharmaceutically inert.

[0314] Administration of a pharmaceutical composition comprising antibodies as herein disclosed can be accomplished orally or parenterally. Methods of parenteral delivery include topical, intra-arterial (directly to the tumor), intramuscular, spinal, subcutaneous, intramedullary, intrathecal, intraventricular, intravenous, intraperitoneal, or intranasal administration.

[0315] Thus, in addition to the active ingredients, these pharmaceutical compositions may contain suitable pharmaceutically acceptable carriers comprising excipients and auxiliaries which facilitate processing of the active compounds into preparations which can be used pharmaceutically. Further details on techniques for formulation and administration may be found in the latest edition of Remington's Pharmaceutical Sciences (Ed. Maack Publishing Co, Easton, Pa.).

[0316] Depending on the route of administration, the active compound, i.e., antibody, bispecific and multispecific molecule, may be coated in a material to protect the compound from the action of acids and other natural conditions that may inactivate the compound.

[0317] The composition is typically sterile and preferably fluid. Proper fluidity can be maintained, for example, by use of coating such as lecithin, by maintenance of required particle size in the case of dispersion and by use of surfactants. In many cases, it is preferable to include isotonic agents, for example, sugars, polyalcohols such as mannitol or sorbitol, and sodium chloride in the composition. Long-term absorption of the injectable compositions can be brought about by including in the composition an agent which delays absorption, for example, aluminum monostearate or gelatin.

[0318] Pharmaceutical compositions for oral administration can be formulated using pharmaceutically acceptable carriers well known in the art in dosages suitable for oral administration. Such carriers enable the pharmaceutical compositions to be formulated as tablets, pills, dragees, capsules, liquids, gels, syrups, slurries, suspensions and the like, for ingestion by the patient.

[0319] Pharmaceutical preparations for oral use can be obtained through combination of active compounds with solid excipient, optionally grinding a resulting mixture, and processing the mixture of granules, after adding suitable auxilliaries, if desired, to obtain tablets or dragee cores. Suitable excipients are carbohydrate or protein fillers such as sugars, including lactose, sucrose, mannitol, or sorbitol; starch from corn, wheat, rice, potato, or other plants; cellulose such as methyl, cellulose, hydroxypropylmethylcellulose, or sodium carboxymethylcellulose; and gums including arabic and tragacanth; and proteins such as gelatin and collagen. If desired, disintegrating or solubilizing agents may be added, such as the cross-linked polyvinyl pyrrolidone, agar, alginic acid, or a salt thereof, such as sodium alginate.

[0320] Dragee cores are provided with suitable coatings such as concentrated sugar solutions, which may also contain gum arabic, talc, polyvinylpyrrolidone, carbopol gel, polyethylene glycol and/or titanium dioxide, lacquer solutions, and suitable organic solvents or solvent mixtures. Dyestuffs or pigments may be added to the tablets or dragee coatings for product identification or to characterize the quantity of active compound, ie. dosage.

[0321] Pharmaceutical preparations that can be used orally include push-fit capsules made of gelatin, as well as soft, sealed capsules made of gelatin and a coating such as glycerol or sorbitol. Push-fit capsules can contain active ingredients mixed with a filler or binders such as lactose or starches, lubricants such as talc or magnesium stearate, and optionally, stabilizers. In soft capsules, the active compounds may be dissolved or suspended in suitable liquids, such as fatty oils, liquid paraffin, or liquid polyethylene glycol with or without stabilizers.

[0322] Pharmaceutical formulations for parenteral administration include aqueous solutions of active compounds. For injection, the pharmaceutical compositions of the invention may be formulated in aqueous solutions, preferably in physiologically compatible buffers such as Hank's solution, Ringer's solution, or physiologically buffered saline. Aqueous injection suspensions may contain substances that increase viscosity of the suspension, such as sodium carboxymethyl cellulose, sorbitol, or dextran. Additionally, suspensions of the active compounds may be prepared as appropriate oily injection suspensions. Suitable lipophilic solvents or vehicles include fatty oils such as sesame oil, or synthetic fatty acid esters, such as ethyl oleate or triglycerides, or liposomes. Optionally, the suspension may also contain suitable stabilizers or agents which increase the solubility of the compounds to allow for the preparation of highly concentrated solutions.

[0323] For topical or nasal administration, penetrants appropriate to the particular barrier to be permeated are used in the formulation. Such penetrants are generally known in the art.

[0324] Pharmaceutical compositions of the disclosure can be prepared in accordance with methods well known and routinely practiced in the art. See. e.g., Remington: The Science and Practice of Pharmacy, Mack Publishing Co., 20th ed., 2000; and Sustained and Controlled Release Drug Delivery Systems, J R. Robinson, ed., Marcel Dekker, Inc., New York, 1978. Pharmaceutical compositions are preferably manufactured under GMP conditions.

[0325] The present disclosure also encompasses a recombinant T cell receptor (TCR) that targets a neoantigenic peptide as herein defined in association with an MHC or HLA molecule.

[0326] The present disclosure further includes a method of producing a TCR, or an antigen-binding fragment thereof, comprising a step of selecting TCRs that bind to a tumor neoantigen peptide as herein defined, optionally in association with an MHC or HLA molecule, with a dissociation constant (K_{d}) of about 2×10⁻⁷ M or less. In certain embodiments, the K_{d} is about 2×10⁻⁷ M or less, about 1×10⁻⁷ M or less, about 9×10⁻⁸ M or less, about 1×10⁻⁸ M or less, about 9×10⁻⁹ M or less, about 5×10⁻⁹ M or less, about 4×10⁻⁹ M or less, about 3×10⁻⁹ or less, about 2×10⁻⁹ M or less, or about 1×10⁻⁹ M or less, or about 1×10⁻¹⁰ M or less, or about 1×10⁻¹² M or less.

[0327] Nucleic acid encoding the TCR can be obtained from a variety of sources, such as by polymerase chain reaction (PCR) amplification of naturally occurring TCR DNA sequences, followed by expression of antibody variable regions, followed by the selecting step described above. In some embodiments, the TCR is obtained from T-cells isolated from a patient, or from cultured T-cell hybridomas. In some embodiments, the TCR clone for a target antigen has been generated in transgenic mice engineered with human immune system genes (e.g., the human leukocyte antigen system, or HLA). See, e.g., tumor antigens (see, e.g., Parkhurst et al. (2009) Clin Cancer Res. 15:169-180 and Cohen et al. (2005) J Immunol. 175:5799-5808. In some embodiments, phage display is used to isolate TCRs against a target antigen (see, e.g., Varela-Rohena et al. (2008) Nat Med. 14:1390-1395 and Li (2005) Nat Biotechnol. 23:349-354.

[0328] A “T cell receptor” or “TCR” refers to a molecule that contains a variable α and β chains (also known as TCRa and TCRb, respectively) or a variable γ and δ chains (also known as TCRg and TCRd, respectively) and that is capable of specifically binding to an antigen peptide bound to a MHC receptor. In some embodiments, the TCR is in the αβ form. Typically, TCRs that exist in αβ and γδ forms are generally structurally similar, but T cells expressing them may have distinct anatomical locations or functions. A TCR can be found on the surface of a cell or in soluble form. Generally, a TCR is found on the surface of T cells (or T lymphocytes) where it is generally responsible for recognizing antigens bound to major histocompatibility complex (MHC) molecules through its extracellular binding domain. In some embodiments, a TCR also can contain a constant domain, a transmembrane domain and/or a short cytoplasmic tail (see, e.g., Janeway et ah, Immunobiology: The Immune System in Health and Disease, 3 rd Ed., Current Biology Publications, p. 4:33, 1997). For example, in some aspects, each chain of the TCR can possess one N-terminal immunoglobulin variable domain, one immunoglobulin constant domain, a transmembrane region, and a short cytoplasmic tail at the C-terminal end. In some embodiments, a TCR is associated with invariant proteins of the CD3 complex involved in mediating signal transduction. Unless otherwise stated, the term “TCR” should be understood to encompass functional TCR fragments thereof. The term also encompasses intact or full-length TCRs, including TCRs in the αβ form or γδ form.

[0329] Thus, for purposes herein, reference to a TCR includes any TCR or functional fragment, such as an antigen-binding portion of a TCR that binds to a specific antigenic peptide bound in an MHC molecule, i.e. MHC-peptide complex. An “antigen-binding portion” or antigen-binding fragment” of a TCR, which can be used interchangeably, refers to a molecule that contains a portion of the structural domains of a TCR, but that binds the antigen (e.g. MHC-peptide complex) to which the full TCR binds. In some cases, an antigen-binding portion contains the variable domains of a TCR, such as variable a chain and variable β chain of a TCR, sufficient to form a binding site for binding to a specific MHC-peptide complex, such as generally where each chain contains three complementarity determining regions.

[0330] In some embodiments, the variable domains of the TCR chains associate to form loops, or complementarity determining regions (CDRs) analogous to immunoglobulins, which confer antigen recognition and determine peptide specificity by forming the binding site of the TCR molecule and determine peptide specificity. Typically, like immunoglobulins, the CDRs are separated by framework regions (FRs) {see, e.g., Jores et al., Pwc. Nat′l Acad. Sci. U.S.A. 87:9138, 1990; Chothia et al., EMBO J. 7:3745, 1988; see also Lefranc et al., Dev. Comp. Immunol. 27:55, 2003). In some embodiments, CDR3 is the main CDR responsible for recognizing processed antigen, although CDR1 of the alpha chain has also been shown to interact with the N-terminal part of the antigenic peptide, whereas CDR1 of the beta chain interacts with the C-terminal part of the peptide. CDR2 is thought to recognize the MHC molecule. In some embodiments, the variable region of the β-chain can contain a further hypervariability (HV4) region.

[0331] In some embodiments, the TCR chains contain a constant domain. For example, like immunoglobulins, the extracellular portion of TCR chains {e.g., α-chain, β-chain) can contain two immunoglobulin domains, a variable domain {e.g., Va or Vp; typically amino acids 1 to 116 based on Kabat numbering Kabat et al., “Sequences of Proteins of Immunological Interest, US Dept. Health and Human Services, Public Health Service National Institutes of Health, 1991, 5th ed.) at the N-terminus, and one constant domain {e.g., α-chain constant domain or Ca, typically amino acids 117 to 259 based on Kabat, β-chain constant domain or Cp, typically amino acids 117 to 295 based on Kabat) adjacent to the cell membrane. For example, in some cases, the extracellular portion of the TCR formed by the two chains contains two membrane-proximal constant domains, and two membrane-distal variable domains containing CDRs. The constant domain of the TCR domain contains short connecting sequences in which a cysteine residue forms a disulfide bond, making a link between the two chains. In some embodiments, a TCR may have an additional cysteine residue in each of the α and β chains such that the TCR contains two disulfide bonds in the constant domains.

[0332] In some embodiments, the TCR chains can contain a transmembrane domain. In some embodiments, the transmembrane domain is positively charged. In some cases, the TCR chains contain a cytoplasmic tail. In some cases, the structure allows the TCR to associate with other molecules like CD3. For example, a TCR containing constant domains with a transmembrane region can anchor the protein in the cell membrane and associate with invariant subunits of the CD3 signaling apparatus or complex.

[0333] Generally, CD3 is a multi-protein complex that can possess three distinct chains (γ, δ, and ε) in mammals and the ζ-chain. For example, in mammals the complex can contain a CD3y chain, a CD35 chain, two CD3s chains, and a homodimer of CD3ζ chains. The CD3y, CD35, and CD3s chains are highly related cell surface proteins of the immunoglobulin superfamily containing a single immunoglobulin domain. The transmembrane regions of the CD3y, CD35, and CD3s chains are negatively charged, which is a characteristic that allows these chains to associate with the positively charged T cell receptor chains. The intracellular tails of the CD3y, CD35, and CD3s chains each contain a single conserved motif known as an immunoreceptor tyrosine-based activation motif or ITAM, whereas each CD3ζ chain has three. Generally, ITAMs are involved in the signaling capacity of the TCR complex. These accessory molecules have negatively charged transmembrane regions and play a role in propagating the signal from the TCR into the cell. The CD3- and ζ-chains, together with the TCR, form what is known as the T cell receptor complex.

[0334] In some embodiments, the TCR may be a heterodimer of two chains α and β (or optionally γ and δ) or it may be a single chain TCR construct. In some embodiments, the TCR is a heterodimer containing two separate chains (α and β chains or γ and δ chains) that are linked, such as by a disulfide bond or disulfide bonds.

[0335] While T-cell receptors (TCRs) are transmembrane proteins and do not naturally exist in soluble form, antibodies can be secreted as well as membrane bound. Importantly, TCRs have the advantage over antibodies that they in principle can recognize peptides generated from all degraded cellular proteins, both intra- and extracellular, when presented in the context of MHC molecules. Thus TCRs have important therapeutic potential.

[0336] The present disclosure also relates to soluble T-cell receptors (sTCRs) that contain the antigen recognition part directed against a tumor neoantigenic peptide as herein disclosed (see notably Walseng E, Wälchli S, Fallang L-E, Yang W, Vefferstad A, Areffard A, et al. (2015) Soluble T-Cell Receptors Produced in Human Cells for Targeted Delivery. PLOS ONE 10 (4): e0119559). In a particular embodiment, the soluble TCR can be fused to an antibody fragment directed to a T cell antigen, optionally wherein the targeted antigen is CD3 or CD16 (see for example Boudousquie, Caroline et al. “Polyfunctional response by ImmTAC (IMCgp100) redirected CD8+ and CD4+ T cells.” Immunology vol. 152, 3 (2017): 425-438. doi: 10.1111/imm.12779).

[0337] In certain embodiments, the present disclosure encompasses Recombinant HLA-independent (or non-HLA restricted) T cell receptors (referred to as “HI-TCRs”) that bind to a (transmembrane) chimeric protein as herein defined (in particular a neoantigenic peptide of any one of SEQ ID NO: 1 to 8202 as previously defined) in an HLA-independent manner. “HI-TCRs” as herein intended and which are well-suited to the present invention are described in International Application No. WO 2019/157454. Thus, typically HI-TCRs according to the present disclosure comprise an antigen binding chain that comprises: (a) an antigen-binding domain (as previously defined) that binds to an antigen in an HLA-independent manner, for example, an antigen-binding fragment of an immunoglobulin variable region; and (b) a constant domain that is capable of associating with (and consequently activating) a CD3ζ polypeptide. Because typically TCRs bind antigen in a HLA-dependent manner, the antigen-binding domain that binds in an HLA-independent manner is heterologous. Preferably, the antigen-binding domain or fragment thereof comprises: (i) an antigen-binding domain comprising or consisting of an heavy chain variable region (VH) of an antibody and/or (ii) a light chain variable region (VL) of an antibody. The constant domain of the TCR is, for example, a native or modified TRAC polypeptide, or a native or modified TRBC polypeptide. The constant domain of the TCR is, for example, a native TCR constant domain (alpha or beta) or fragment thereof. Unlike chimeric antigen receptors, which typically themselves comprise an intracellular signaling domain, the HI-TCR does not directly produce an activating signal; instead, the antigen-binding chain associates with and consequently activates a CD3ζ polypeptide. The immune cells comprising the recombinant TCR provide superior activity when the antigen has a low density on the cell surface of less than about 10,000 molecules per cell.

[0338] The CD3ζ polypeptide is, for example, a native CD3 polypeptide or a modified CD3ζ polypeptide. The CD3ζ polypeptide is optionally fused to an intracellular domain of a co-stimulatory molecule or a fragment thereof. Alternatively, the antigen binding domain optionally comprises a co-stimulatory region, e.g. intracellular domain, that is capable of stimulating an immunoresponsive cell upon the binding of the antigen binding chain to the antigen. Example co-stimulatory molecules include CD28, 4-1BB, OX40, ICOS, DAP-10, fragments thereof, or a combination thereof.

[0339] In some embodiments, the recombinant HI-TCR is expressed by a transgene that is integrated at an endogenous gene locus of the immunoresponsive cell, for example, a CD3δ locus, a CD3ε locus, a CD247 locus, a B2M locus, a TRAC locus, a TRBC locus, a TRDC locus and/or a TRGC locus. In most embodiments, expression of the recombinant HI-TCR is driven from the endogenous TRAC or TRBC gene locus. In some embodiments, the transgene encoding a portion of the recombinant HI-TCR is integrated into the endogenous TRAC and/or TRBC locus in a manner that disrupts or abolishes the endogenous expression of a TCR comprising a native TCR αchain and/or a native TCR β chain. This disruption prevents or eliminates mispairing between the recombinant TCR and a native TCR αchain and/or a native TCR β chain in the immunoresponsive cell. The endogenous gene locus may also comprise a modified transcription terminator region, for example, a TK transcription terminator, a GCSF transcription terminator, a TCRA transcription terminator, an HBB transcription terminator, a bovine growth hormone transcription terminator, an SV40 transcription terminator, and a P2A element.

[0340] In some embodiments of the present disclosure, the recombinant TCR and typically the HI-TCR comprises an extracellular antigen-binding domain which is capable of dimerizing with a second extracellular antigen-binding domain. Typically, the second extracellular antigen-binding domain binds a tumor antigen, preferably wherein the tumor antigen is selected from pHER95, CD19, MUC16, MUC1, CAIX, CEA, CD8, CD7, CD10, CD20, CD22, CD30, CD70, CLL1, CD33, CD34, CD38, CD41, CD44, CD49f, CD56, CD74, CD133, CD138, EGP-2, EGP-40, EpCAM, Erb-B2, Erb-B3, Erb-B4, FBP, Fetal acetylcholine receptor, folate receptor-a, GD2, GD3, HER-2, hTERT, IL-13R-a2, K-light chain, KDR, LeY, L1 cell adhesion molecule, MAGE-A1, Mesothelin, MAGEA3, p53, MART1, GP100, Proteinase3 (PR1), Tyrosinase, Survivin, hTERT, EphA2, NKG2D ligands, NY-ESO-1, oncofetal antigen (h5T4), PSCA, PSMA, ROR1, TAG-72, VEGF-R2, WT-1, BCMA, CD123, CD44V6, NKCS1, EGF1R, EGFR-VIII, CD99, CD70, ADGRE2, CCR1, LILRB2, LILRB4, PRAME, and ERBB.

[0341] The present disclosure also encompasses a chimeric antigen receptor (CAR) which is directed against a chimeric polypeptide (or protein) as herein disclosed and in particular a transmembrane chimeric protein of any one of SEQ ID NO: 1 to 8202 as herein defined. In preferred embodiments, the CAR comprises an antigen-binding domain as previously defined. CARs are fusion proteins comprising an antigen-binding domain, typically derived from an antibody, linked to the signalling domain of the TCR complex. CARs can be used to direct immune cells, such as T-cells or NK T cells, against a tumor neoantigenic peptide as previously defined with a suitable antigen-binding domain selected.

[0342] The antigen-binding domain of a CAR is typically based on a scFv (single chain variable fragment) derived from an antibody. In addition to an N-terminal, extracellular antibody-binding domain, CARs typically may comprise a hinge domain, which functions as a spacer to extend the antigen-binding domain away from the plasma membrane of the immune effector cell on which it is expressed, a transmembrane (TM) domain, an intracellular signalling domain (e.g. the signalling domain from the zeta chain of the CD3 molecule (CD35) of the TCR complex, or an equivalent) and optionally one or more co-stimulatory domains which may assist in signalling or functionality of the cell expressing the CAR. Signalling domains from co-stimulatory molecules including CD28, OX-40 (CD134), and 4-1BB (CD137) can be added alone (second generation) or in combination (third generation) to enhance survival and increase proliferation of CAR modified T cells. Potential co-stimulatory domains also include ICOS-1, CD27, GITR, and DAP10.

[0343] Thus, the CAR may include
[0344] (1) In its extracellular portion, one or more antigen binding molecules, such as one or more antigen-binding fragment, domain, or portion of an antibody, or one or more antibody variable domains, and/or antibody molecules, and typically one or more antigen-binding domain as previously defined.
[0345] (2) In its transmembrane portion, a transmembrane domain derived from human T cell receptor-alpha or -beta chain, a CD3 zeta chain, CD28, CD3-epsilon, CD45, CD4, CD5, CD8, CD9, CD16, CD22, CD33, CD37, CD64, CD80, CD86, CD134, CD137, ICOS, CD154, or a GITR. In some embodiments, the transmembrane domain is derived from CD28, CD8 or CD3-zeta.
[0346] (3) One or more co-stimulatory domains, such as co-stimulatory domains derived from human CD28, 4-1BB (CD137), ICOS-1, CD27, OX 40 (CD137), DAP10, and GITR (AITR). In some embodiments, the CAR comprises co-stimulating domains of both CD28 and 4-1BB.
[0347] (4) In its intracellular signalling domain, an intracellular signalling domain comprising one or more ITAMs, for example, the intracellular signalling domain is CD3-zeta, or a variant thereof lacking one or two ITAMs (e.g. ITAM3 and ITAM2), or the intracellular signalling domain is derived from FcεRIγ.

[0348] The CAR can be designed to recognize tumor neoantigenic peptide alone or in association with an HLA or MHC molecule.

[0349] The moieties used to bind to antigen include three general categories, either single-chain antibody fragments (scFvs) derived from antibodies, Fab's selected from libraries, or natural ligands that engage their cognate receptor (for the first-generation CARs). Successful examples in each of these categories are notably reported in Sadelain M, Brentjens R, Riviere I. The basic principles of chimeric antigen receptor (CAR) design. Cancer discovery. 2013; 3 (4): 388-398 (see notably table 1) and are included in the present application.

[0350] Antibodies include chimeric, humanized or human antibodies, and can be further affinity matured and selected as described above. Chimeric or humanized scFv's derived from rodent immunoglobulins (e.g. mice, rat) are commonly used, as they are easily derived from well-characterized monoclonal antibodies. Humanized antibodies contain rodent-sequence derived CDR regions; typically the rodent CDRs are engrafted into a human framework, and some of the human framework residues may be back-mutated to the original rodent framework residue to preserve affinity, and/or one or a few of the CDR residues may be mutated to increase affinity. Fully human antibodies have no murine sequence, and are typically produced via phage display technologies of human antibody libraries, or immunization of transgenic mice whose native immunoglobin loci have been replaced with segments of human immunoglobulin loci. Variants of the antibodies can be produced that have one or more amino acid substitutions, insertions, or deletions in the native amino acid sequence, wherein the antibody retains or substantially retains its specific binding function. Conservative substitutions of amino acids are well known and described above. Further variants may also be produced that have improved affinity for the antigen.

[0351] Typically, the CAR includes an antigen-binding domain as previously defined from an antibody molecule, such as a single-chain antibody fragment (scFv) derived from the variable heavy (VH) and variable light (VL) chains of a monoclonal antibody (mAb).

[0352] In some aspects, the antigen-binding, domain of the CAR is linked to one or more transmembrane and intracellular signaling domains. In some embodiments, the CAR includes a transmembrane domain fused to the extracellular domain of the CAR. In one embodiment, the transmembrane domain that is naturally associated with one of the domains in the CAR is used. In some instances, the transmembrane domain is selected or modified by amino acid substitution to avoid binding of such domains to the transmembrane domains of the same or different surface membrane proteins to minimize interactions with other members of the receptor complex.

[0353] The transmembrane domain in some embodiments is derived either from a natural or from a synthetic source. Where the source is natural, the domain can be derived from any membrane-bound or transmembrane protein. Transmembrane regions include those derived from (i.e. comprise at least the transmembrane region(s) of) the alpha, beta or zeta chain of the T-cell receptor, CD28, CD3 epsilon, CD45, CD4, CD5, CD8, CD9, CD16, CD22, CD33, CD37, CD64, CD80, CD86, CD 134, CD137, CD154, ICOS or a GITR). The transmembrane domain can also be synthetic. In some embodiments, the transmembrane domain is derived from CD28, CD8 or CD3-zeta.

[0354] In some embodiments, a short oligo- or polypeptide linker, for example, a linker of between 2 and 10 amino acids in length, is present and forms a linkage between the transmembrane domain and the cytoplasmic signaling domain of the CAR.

[0355] The CAR generally includes at least one intracellular signaling component or components. First generation CARs typically had the intracellular domain from the CD3 ζ-chain, which is the primary transmitter of signals from endogenous TCRs. Second generation CARs typically further comprise intracellular signaling domains from various costimulatory protein receptors (e.g., CD28, 41BB (CD28), ICOS) to the cytoplasmic tail of the CAR to provide additional signals to the T cell. Co-stimulatory domains include domains derived from human CD28, 4-1BB (CD137), ICOS-1, CD27, OX 40 (CD137), DAP10, and GITR (AITR). Combinations of two co-stimulatory domains are contemplated, e.g. CD28 and 4-1BB, or CD28 and OX40. Third generation CARs combine multiple signaling domains, such as CD3z-CD28-4-1BB or CD3z-CD28-OX40, to augment potency.

[0356] The intracellular signaling domain can be from an intracellular component of the TCR complex, such as a TCR CD3+ chain that mediates T-cell activation and cytotoxicity, e.g., the CD3 zeta chain. Alternative intracellular signaling domains include FcεRIγ. The intracellular signaling domain may comprise a modified CD3 zeta polypeptide lacking one or two of its three immunoreceptor tyrosine-based activation motifs (ITAMs), wherein the ITAMs are ITAM1, ITAM2 and ITAM3 (numbered from the N-terminus to the C-terminus). The intracellular signaling region of CD3-zeta is residues 22-164 of SEQ ID NO: 4. ITAM1 is located around amino acid residues 61-89, ITAM2 around amino acid residues 100-128, and ITAM3 around residues 131-159. Thus, the modified CD3 zeta polypeptide may have any one of ITAM1, ITAM2, or ITAM3 inactivated. Alternatively, the modified CD3 zeta polypeptide may have any two ITAMs inactivated, e.g. ITAM2 and ITAM3, or ITAM1 and ITAM2. Preferably, ITAM3 is inactivated, e.g. deleted. More preferably, ITAM2 and ITAM3 are inactivated, e.g. deleted, leaving ITAM1. For example, one modified CD3 zeta polypeptide retains only ITAM1 and the remaining CD3ζ domain is deleted (residues 90-164). As another example, ITAM1 is substituted with the amino acid sequence of ITAM3, and the remaining CD3ζ domain is deleted (residues 90-164). Sec, for example, Bridgeman et al., Clin. Exp. Immunol. 175 (2): 258-67 (2014); Zhao et al., J. Immunol. 183 (9): 5563-74 (2009); Maus et al., WO 2018/132506; Sadelain et al., WO/2019/133969, Feucht et al., Nat Med. 25 (1): 82-88 (2019).

[0357] Thus, in some aspects, the antigen binding domain is linked to one or more cell signaling modules. In some embodiments, cell signaling modules include CD3 transmembrane domain, CD3 intracellular signaling domains, and/or other CD transmembrane domains. The CAR can also further include a portion of one or more additional molecules such as Fc receptor γ, CD8, CD4, CD25, or CD16.

[0358] In some embodiments, upon ligation of the CAR, the cytoplasmic domain or intracellular signaling domain of the CAR activates at least one of the normal effector functions or responses of the corresponding non-engineered immune cell (typically a T cell). For example, the CAR can induce a function of a T cell such as cytolytic activity or T-helper activity, secretion of cytokines or other factors.

[0359] In some embodiments, the intracellular signaling domain(s) include the cytoplasmic sequences of the T cell receptor (TCR), and in some aspects also those of co-receptors that in the natural context act in concert with such receptor to initiate signal transduction following antigen-specific receptor engagement, and/or a variant of such molecules, and/or any synthetic sequence that has the same functional capability.

[0360] T cell activation is in some aspects described as being mediated by two classes of cytoplasmic signaling sequences: those that initiate antigen-dependent primary activation through the TCR (primary cytoplasmic signaling sequences), and those that act in an antigen-independent manner to provide a secondary or co-stimulatory signal (secondary cytoplasmic signaling sequences). In some aspects, the CAR includes one or both of such signaling components.

[0361] In some aspects, the CAR includes a primary cytoplasmic signaling sequence that regulates primary activation of the TCR complex either in a stimulatory way, or in an inhibitory way. Primary cytoplasmic signaling sequences that act in a stimulatory manner may contain signaling motifs which are known as immunoreceptor tyrosine-based activation motifs or ITAMs. Examples of ITAM containing primary cytoplasmic signaling sequences include those derived from TCR zeta, FcR gamma, FcR beta, CD3 gamma, CD3 delta, CD3 epsilon, CDS, CD22, CD79a, CD79b, and CD66d. In some embodiments, cytoplasmic signaling molecule(s) in the CAR contain(s) a cytoplasmic signaling domain, portion thereof, or sequence derived from CD3 zeta.

[0362] The CAR can also include a signaling domain and/or transmembrane portion of a costimulatory receptor, such as CD28, 4-1BB, OX40, DAP10, and ICOS. In some aspects, the same CAR includes both the activating and costimulatory components; alternatively, the activating domain is provided by one CAR whereas the costimulatory component is provided by another CAR recognizing another antigen.

[0363] Thus, in some embodiments, the CAR may include:
[0364] (1) In its extracellular portion, one or more antigen binding molecules, such as one or more antigen-binding fragment, domain, or portion of an antibody, or one or more antibody variable domains (heavy chain and/or light chain), and/or antibody molecules.
[0365] (2) In its transmembrane portion, a transmembrane domain derived from human T cell receptor-alpha or -beta chain, a CD3 zeta chain, CD28, CD3-epsilon, CD45, CD4, CD5, CD8, CD9, CD16, CD22, CD33, CD37, CD64, CD80, CD86, CD134, CD137, ICOS, CD154, or a GITR. In some embodiments, the transmembrane domain is derived from CD28, CD8 or CD3-zeta.
[0366] (3) One or more co-stimulatory domains, such as co-stimulatory domains derived from human CD28, 4-1BB (CD137), ICOS-1, CD27, OX 40 (CD137), DAP10, and GITR (AITR). In some embodiments, the CAR comprises co-stimulating domains of both CD28 and 4-1BB.
[0367] (4) In its intracellular signalling domain, one or more intracellular signalling domain(s) comprising one or more ITAMs, for example: the intracellular signalling domain or a portion thereof from CD3-zeta, or a variant thereof lacking one or two ITAMs (e.g.: ITAM3 and/or ITAM2 see also as detailed above and bibliographic references), FcR gamma, FcR beta, CD3 gamma, CD3 delta, CD3 epsilon, CDS, CD22, CD79a, CD79b, and/or CD66d, notably selected from the intracellular domain of CD3-zeta, or a variant thereof lacking one or two ITAMs (e.g.: ITAM3 and ITAM2), or the intracellular signalling of FcεRIγ or a variant thereof.

[0368] The CAR or other antigen-specific receptor can also be an inhibitory CAR (e.g. iCAR) and includes intracellular components that dampen or suppress a response, such as an immune response. Examples of such intracellular signaling components are those found on immune checkpoint molecules, including PD-1, CTLA4, LAG3, BTLA, OX2R, TIM-3, TIGIT, LAIR-1, PGE2 receptors, EP2/4 Adenosine receptors including A2AR. In some aspects, the engineered cell includes an inhibitory CAR including a signaling domain of or derived from such an inhibitory molecule, such that it serves to dampen the response of the cell. Such CARs are used, for example, to reduce the likelihood of off-target effects when the antigen recognized by the activating receptor, e.g, CAR, is also expressed, or may also be expressed, on the surface of normal cells.

[0369] Exemplary antigen receptors, including CARs and recombinant TCRs, as well as methods for engineering and introducing the receptors into cells, include those described, for example, in international patent application publication numbers WO200014257, WO2013126726, WO2012/129514, WO2014031687, WO2013/166321, WO2013/071154, WO2013/123061, WO2019157454, U.S. patent application publication numbers US2002131960, US2013287748, US20130149337, U.S. Pat. Nos. 6,451,995, 7,446,190, 8,252,592, 8,339,645, 8,398,282, 7,446,179, 6,410,319, 7,070,995, 7,265,209, 7,354,762, 7,446,191, 8,324,353, and 8,479,118, and European patent application number EP2537416, and/or those described by Sadelain et al., Cancer Discov. 2013 April; 3 (4): 388-398; Davila et al. (2013) PLOS ONE 8 (4): e61338; Turtle et al., Curr. Opin. Immunol., 2012 October; 24 (5): 633-39; Wu et al., Cancer, 2012 Mar. 18 (2): 160-75. In some aspects, the genetically engineered antigen receptors include a CAR as described in U.S. Pat. No. 7,446,190, and those described in International Patent Application Publication No.: WO/2014055668 A1.

[0370] The present disclosure also encompasses polynucleotides encoding antibodies, antigen-binding fragments or derivatives thereof, TCRs and CARs as previously described as well as vector comprising said polynucleotide(s).

### Immune Cells

[0371] The present disclosure further encompasses an immune cell, notably an isolated immune cell which target one or more tumor neoantigenic peptides as previously described. In more specific embodiments the present disclosure encompasses an immune cell, notably an isolated immune cell expressing a recombinant CAR or TCR as previously defined.

[0372] As used herein, the term “immune cell” includes cells that are of hematopoietic origin and that play a role in the immune response. Immune cells include lymphocytes, such as B cells and T cells, natural killer cells, myeloid cells, such as monocytes, macrophages, eosinophils, mast cells, basophils, and granulocytes.

[0373] As used herein, the term “T cell” includes cells bearing a T cell receptor (TCR), in particular TCR directed against a tumor neoantigenic peptide as herein disclosed. T-cells according to the present disclosure can be selected from the group consisting of inflammatory T-lymphocytes, cytotoxic T-lymphocytes, regulatory T-lymphocytes, Mucosal-Associated Invariant T cells (MAIT), Y& T cell, tumour infiltrating lymphocyte (TILs) or helper T-lymphocytes included both type 1 and 2 helper T cells and Th17 helper cells. In another embodiment, said cell can be derived from the group consisting of CD4+ T-lymphocytes and CD8+ T-lymphocytes. Said immune cells may originate from a healthy donor or from a subject suffering from a cancer. In some embodiments, the immune cell is an allogenic or autologous cell. In some embodiments, the immune cell is selected from T cells, Natural Killer T cells, CD4+/CD8+ T cells, TILs/tumor derived CD8 T cells, central memory CD8+ T cells, Treg, MAIT, Yδ T cells, human embryonic stem cells, and pluripotent stem cells from which lymphoid cells may be differentiated.

[0374] Immune cells can be extracted from blood or derived from stem cells. The stem cells can be adult stem cells, embryonic stem cells, more particularly non-human stem cells, cord blood stem cells, progenitor cells, bone marrow stem cells, induced pluripotent stem cells, totipotent stem cells or hematopoietic stem cells. Representative human cells are CD34+ cells.

[0375] T-cells can be obtained from a number of non-limiting sources, including peripheral blood mononuclear cells, bone marrow, lymph node tissue, cord blood, thymus tissue, tissue from a site of infection, ascites, pleural effusion, spleen tissue, and tumors. In certain embodiments, T-cells can be obtained from a unit of blood collected from a subject using any number of techniques known to the skilled person, such as FICOLL™ separation. In one embodiment, cells from the circulating blood of a subject are obtained by apheresis. In certain embodiments, T-cells are isolated from PBMCs. PBMCs may be isolated from buffy coats obtained by density gradient centrifugation of whole blood, for instance centrifugation through a LYMPHOPREP™ gradient, a PERCOLL™ gradient or a FICOLL™ gradient. T-cells may be isolated from PBMCs by depletion of the monocytes, for instance by using CD14 DYNABEADS®. In some embodiments, red blood cells may be lysed prior to the density gradient centrifugation. In another embodiment, said cell can be derived from a healthy donor, from a subject diagnosed with cancer. The cell can be autologous or allogeneic.

[0376] In allogeneic immune cell therapy, immune cells are collected from healthy donors, rather than the patient. Typically these are HLA matched to reduce the likelihood of graft vs. host disease. Alternatively, universal ‘off the shelf’ products that may not require HLA matching comprise modifications designed to reduce graft vs. host disease, such as disruption or removal of the TCRαβ receptor. Sec Graham et al., Cells. 2018 October; 7 (10): 155 for a review. Because a single gene encodes the alpha chain (TRAC) rather than the two genes encoding the beta chain, the TRAC locus is a typical target for removing or disrupting TCRαβ receptor expression. Alternatively, inhibitors of TCRαβ signalling may be expressed, e.g. truncated forms of CD3ζ can act as a TCR inhibitory molecule. Disruption or removal of HLA class I molecules has also been employed. For example, Torikai et al., Blood. 2013; 122:1341-1349 used ZFNs to knock out the HLA-A locus, while Ren et al., Clin. Cancer Res. 2017; 23:2255-2266 knocked out Beta-2 microglobulin (B2M), which is required for HLA class I expression. Ren et al. simultaneously knocked out TCRαβ, B2M and the immune-checkpoint PD1. Generally, the immune cells are activated and expanded to be utilized in the adoptive cell therapy. The immune cells as herein disclosed can be expanded in vivo or ex vivo. The immune cells, in particular T-cells can be activated and expanded generally using methods known in the art. Generally the T-cells are expanded by contact with a surface having attached thereto an agent that stimulates a CD3/TCR complex associated signal and a ligand that stimulates a co-stimulatory molecule on the surface of the T cells.

[0377] In one embodiment of the present disclosure, the immune cell can be modified to be directed to tumor neoantigenic peptides as previously defined. In a particular embodiment, said immune cell may express a recombinant antigen receptor directed to said neoantigenic peptide its cell surface. By “recombinant” is meant an antigen receptor which is not encoded by the cell in its native state, i.e. it is heterologous, non-endogenous. Expression of the recombinant antigen receptor can thus be seen to introduce new antigen specificity to the immune cell, causing the cell to recognise and bind a previously described peptide. The antigen receptor may be isolated from any useful source. In some embodiments, the cells comprise one or more nucleic acids introduced via genetic engineering that encode one or more antigen receptors, wherein the antigen include at least one tumor neoantigenic peptide as per the present disclosure.

[0378] Among the antigen receptors as per the present disclosure are genetically engineered T cell receptors (TCRs) and components thereof, as well as functional non-TCR antigen receptors, such as chimeric antigen receptors (CAR) as previously described.

[0379] Methods by which immune cells can be genetically modified to express a recombinant antigen receptor are well known in the art. A nucleic acid molecule encoding the antigen receptor may be introduced into the cell in the form of e.g. a vector, or any other suitable nucleic acid construct. Vectors, and their required components, are well known in the art. Nucleic acid molecules encoding antigen receptors can be generated using any method known in the art, e.g. molecular cloning using PCR. Antigen receptor sequences can be modified using commonly-used methods, such as site-directed mutagenesis.

[0380] In some embodiments of the present disclosure, the immune cell is a cell wherein (a) the SUV39H1 gene is inactivated, (b) the antigen-specific receptor is a modified TCR comprising a heterologous (or recombinant) antigen-binding domain as previously defined and a native TCR constant domain or fragment thereof, and the antigen-specific receptor is capable of activating a CD3 zeta polypeptide. For example, the immune cell may further comprise at least one chimeric costimulatory receptor (CCR) and/or at least one chimeric antigen receptor, for example as previously defined.

[0381] In a related aspect, the immune cells, particularly if allogeneic, may be designed to reduce graft vs. host disease, such that the cells comprise inactivated (e.g. disrupted or deleted) TCRαβ receptor. In such cases, the nucleic acid encoding the antigen-binding domain of the HI-TCR (typically as previously defined) is conveniently inserted into the endogenous TRAC locus and/or TRBC locus of the immune cell. The insertion of the HI-TCR nucleic acid sequence, or another smaller mutation, can disrupt or abolish the endogenous expression of a TCR comprising a native TCR alpha chain and/or a native TCR beta chain. The insertion or mutation may reduce endogenous TCR expression by at least about 50%, 60%, 70%, 75%, 80%, 85%, 90%, 95%, 98%, or 99%. Because a single gene encodes the alpha chain (TRAC) rather than the two genes encoding the beta chain, the TRAC locus is a typical target for reducing TCRαβ receptor expression. Thus, the nucleic acid encoding the antigen-specific receptor (e.g. CAR or TCR) may be integrated into the TRAC locus at a location, preferably in the 5′ region of the first exon (SEQ ID NO: 3), that significantly reduces expression of a functional TCR alpha chain. See, e.g., Jantz et al., WO 2017/062451; Sadelain et al., WO 2017/180989; Torikai et al, Blood, 119 (2): 5697-705 (2012); Eyquem et al., Nature. 2017 Mar. 2; 543 (7643): 113-117.

[0382] Expression of the endogenous TCR alpha may be reduced by at least about 50%, 60%, 70%, 75%, 80%, 85%, 90%, 95%, 98%, or 99%. In such embodiments, expression of the nucleic acid encoding the antigen-specific receptor is optionally under control of the endogenous TCR-alpha or endogenous TCR-beta promoter.

[0383] Optionally, the immune cell also comprises a modified CD3 with a single active ITAM domain, and optionally the CD3 may further comprise one or more or two or more costimulatory domains. In some embodiments, the CD3 comprises two costimulatory domains, optionally CD28 and 4-1BB. The modified CD3 with a single active ITAM domain can comprise, for example, a modified CD3zeta intracellular signaling domain in which ITAM2 and ITAM3 have been inactivated, or ITAM1 and ITAM2 have been inactivated. In some embodiments, a modified CD3 zeta polypeptide retains only ITAM1 and the remaining CD3 domain is deleted (residues 90-164). As another example, ITAM1 is substituted with the amino acid sequence of ITAM3, and the remaining CD3ζ domain is deleted (residues 90-164).

[0384] The modified immune cells disclosed herein may comprise combinations of two or more, or three or more, or four or more, of the foregoing aspects.

[0385] For example, the modified immune cell is an immune cell wherein (a) the antigen-specific receptor is a modified TCR comprising a heterologous (or recombinant) antigen-binding domain (typically as previously defined) and a native TCR constant domain or fragment thereof, and the antigen-specific receptor is capable of activating a CD3 zeta polypeptide, and/or the antigen-specific receptor is a CAR, and optionally (b) the SUV39H1 gene is inactivated, and optionally (c) the immune cell comprises a modified CD3 with a single active ITAM domain, e.g. in which ITAM2 and ITAM3 have been inactivated, and optionally (d) the TCR is under control of an endogenous TRAC and/or TRBC promoter, and optionally (e) expression of native TCR-alpha chain and/or native TCR-beta chain are disrupted or abolished. In further embodiments, the cell may comprise at least one chimeric costimulatory receptor (CCR).

[0386] The present disclosure also relates to a method for providing an immune cell, and in particular a T cell population which targets a tumor neoantigenic peptide as herein disclosed, in particular an immune cell and notably a T cell population expressing a TCR, notably a HLA Independent TCR (HI TCR) or a CAR as previously defined.

[0387] The T cell population may comprise CD8+ T cells, CD4+ T cells or CD8+ and CD4+ T cells.

[0388] Immune cell populations produced in accordance with the present disclosure may be enriched with immune cells that are specific to, i.e. target, the tumor neoantigenic peptides or the chimeric proteins of the present disclosure and in particular the transmembrane chimeric proteins of any one of SEQ ID NO 1 to 8202. That is, the immune cell population that is produced in accordance with the present disclosure will have an increased number of immune cells that target one or more tumor neoantigenic peptide (i.e. enriched in clonotypes targeting the neoantigenic peptide) or one or more chimeric proteins. For example, the immune cell population of the disclosure will have an increased number of immune cells that target a tumor neoantigenic peptide or a chimeric protein compared with the immune cells in the sample isolated from the subject. That is to say, the composition of the immune cell population will differ from that of a “native” immune cell population (i.e. a population that has not undergone the identification and expansion steps discussed herein), in that the percentage or proportion of immune cells that target a tumor neoantigenic peptide or a chimeric protein will be increased.

[0389] The immune cell population according to the present disclosure may have at least about 0.2, 0.3, 0.4, 0.5, 0.6, 0.7, 0.8, 0.9, 1, 2, 3, 4, 5, 6, 7, 8, 9, 10, 11, 12, 13, 14, 15, 16, 17, 18, 19, 20, 25, 30, 35, 40, 45, 50, 55, 60, 65, 70, 75, 80, 85, 90, 95 or 100% T cells that target a tumor neoantigenic peptide or a chimeric protein as herein disclosed. For example, the immune cell population may have about 0.2%-5%, 5%-10%, 10-20%, 20-30%, 30-40%, 40-50%, 50-70% or 70-100% immune cells that target a tumor neoantigenic peptide or a chimeric protein of the present disclosure.

[0390] An expanded population of tumor neoantigenic peptide/or chimeric protein-reactive immune cells may have a higher activity than a population of immune cells not expanded, for example, when exposing those cells to a tumor neoantigenic peptide or a chimeric protein. Reference to “activity” may represent the response of the immune cell population to restimulation with a tumor neoantigenic peptide (e.g. a peptide corresponding to the peptide used for expansion) or a mix of tumor neoantigenic peptide or with a chimeric protein as herein defined (or fragment thereof, typically extracellular fragment thereof) or with a mix of chimeric protein (or fragment thereof, typically extracellular fragment thereof). Suitable methods for assaying the response are known in the art. For example, cytokine production may be measured (e.g. IL2 or IFNy production may be measured). The reference to a “higher activity” includes, for example, a 1-5, 5-10, 10-20, 20-50, 50-100, 100-500, 500-1000-fold increase in activity. In one aspect the activity may be more than 1000-fold higher.

[0391] In a preferred embodiment present disclosure provides a plurality or population, i.e. more than one, of immune cells wherein the plurality of immune cells comprises a immune cell, notably a T cell, which recognizes a clonal tumor neoantigenic peptide and a T cell which recognizes a different clonal tumor neoantigenic peptide. As such, the present disclosure provides a plurality of immune cells, notably T cells, which recognize different clonal tumor neoantigenic peptide. Different immune cells, notably T cells, in the plurality or population may alternatively have different TCRs which recognize different epitopes of the same tumor neoantigenic peptide a chimeric protein.

[0392] In a preferred embodiment the number of clonal tumor neoantigenic peptides or chimeric proteins or epitopes of one or more chimeric protein(s) recognized by the plurality of T cells is from 2 to 1000. For example, the number of clonal neo-antigens recognized may be 2, 3, 4, 5, 6, 7, 8, 9, 10, 20, 50, 100, 150, 200, 250, 300, 350, 400, 450, 500, 550, 600, 650, 700, 750, 800, 850, 900, 950 or 1000, preferably 2 to 100. There may be a plurality of immune cells, notably T cells, with different TCRs but which recognize the same clonal neo-antigen.

[0393] The immune cell and in particular the T cell population may be all or primarily composed of CD8+ T cells, or all or primarily composed of a mixture of CD8+ T cells and CD4+ T cells or all or primarily composed of CD4+ T cells.

[0394] In particular embodiments, the T cell population is generated from T cells isolated from cancer patient or a healthy donor. For example, the T cell population may be generated from T cells in a sample isolated from a tumor-bearing patient. The sample may be a tumor sample, a peripheral blood sample or a sample from other tissues of the subject.

[0395] In a particular embodiment the immune cell population is generated from a sample from the tumor in which the tumor neoantigenic peptide is identified. In other words, the immune cell and notably the T cell population is isolated from a biological specimen derived from the tumor of a cancer patient. Such T cells are referred to herein as ‘tumor infiltrating lymphocytes’ (TILs).

[0396] T cells may be isolated using methods which are well known in the art. For example, T cells may be purified from single cell suspensions generated from samples on the basis of expression of CD3, CD4 or CD8. T cells may be enriched from samples by passage through a Ficoll-paque gradient.

### Cancer Therapeutic Methods

[0397] In any of the embodiments, the Cancer Therapeutic Products described herein may be used in methods for inhibiting proliferation of cancer cells. The Cancer Therapeutic Products described herein may also be used in the treatment of cancer, in patients suffering from cancer, or for the prophylactic treatment of cancer, in patients at risk of cancer.

[0398] Cancers that can be treated using the therapy described herein include any solid or non-solid tumors as previously defined. Of particular interest according to the present disclosure are breast cancer, melanoma and lung cancer.

[0399] Cancers includes also the cancers which are refractory to treatment with other chemotherapeutics. The term “refractory, as used herein refers to a cancer (and/or metastases thereof), which shows no or only weak antiproliferative response (e.g., no or only weak inhibition of tumor growth) after treatment with another chemotherapeutic agent. These are cancers that cannot be treated satisfactorily with other chemotherapeutics. Refractory cancers encompass not only (i) cancers where one or more chemotherapeutics have already failed during treatment of a patient, but also (ii) cancers that can be shown to be refractory by other means, e.g., biopsy and culture in the presence of chemotherapeutics.

[0400] The therapy described herein is also applicable to the treatment of patients in need thereof who have not been previously treated.

[0401] A subject as per the present disclosure is typically a patient in need thereof that has been diagnosed with cancer or is at risk of developing cancer. The subject is typically a human, dog, cat, horse or any animal in which a tumor specific immune response is desired.

[0402] The present disclosure also pertains to a neoantigenic peptide, a population of APCs, a vaccine or immunogenic composition, a polynucleotide encoding a neoantigenic peptide or a vector as previously defined for use in cancer vaccination therapy of a subject or for treating cancer in a subject, wherein the peptide(s) binds at least one MHC molecule of said subject.

[0403] The present disclosure also provides a method for treating cancer in a subject comprising administering a vaccine or immunogenic composition as described herein to said subject in a therapeutically effective amount to treat the subject. The method may additionally comprise the step of identifying a subject who has cancer.

[0404] The present disclosure also relates to a method of treating cancer comprising producing an antibody or antigen-binding fragment thereof by the method as herein described and administering to a subject with cancer said antibody or antigen-binding fragment thereof, or with an immune cell expressing said antibody or antigen-binding fragment thereof, in a therapeutically effective amount to treat said subject.

[0405] The present disclosure also relates to an antibody (including variants and derivatives thereof), a T cell receptor (TCR) (including variants and derivatives thereof), a non-HLA restricted TCR (HI TCR), or a CAR (including variants and derivatives thereof) which are directed against a transmembrane chimeric protein as herein described, or neoantigenic peptide typically in association with an MHC or HLA molecule, for use in cancer therapy of a subject.

[0406] In some embodiments said antibody, TCR (in particular non-HLA restricted TCR) or CAR binds a transmembrane chimeric protein as herein defined and notably a transmembrane chimeric protein of any one of SEQ I NO: 1-8202. Typically said antibody, TCR (in particular non-HLA restricted TCR) or CAR comprise an antigen binding domain (binding a transmembrane chimeric protein of any one of SEQ I NO: 1-8202) as previously defined.

[0407] The present disclosure also relates to an antibody (including variants and derivatives thereof), a T cell receptor (TCR) (including variants and derivatives thereof), or a CAR (including variants and derivatives thereof) which are directed against a tumor neoantigenic peptide (typically in association with an MHC or an HLA molecule) or against a chimeric protein as herein described, or an immune cell which targets a neoantigenic peptide or a chimeric protein, as previously defined, for use in adoptive cell or CAR-T cell therapy in a subject, wherein the tumor neoantigenic peptide binds at least one MHC molecule of said subject. In some embodiments said antibody, TCR (in particular non-HLA restricted TCR) or CAR binds a transmembrane chimeric protein as herein defined and notably a transmembrane chimeric protein of any one of SEQ I NO: 1-8202. Typically said antibody, TCR (in particular non-HLA restricted TCR) or CAR binds comprise an antigen binding domain (binding a transmembrane chimeric protein of any one of SEQ I NO: 1-8202) as previously defined. Thus typically in some embodiments the immune cell targets a transmembrane chimeric as herein defined. Typically, the skilled person is able to select an appropriate antigen receptor which binds and recognizes a tumor neoantigenic peptide as previously defined with which to redirect an immune cell to be used for use in cancer cell therapy. In a particular embodiment, the immune cell for use in the method of the present disclosure is a redirected T-cell, e.g. a redirected CD8+ and/or CD4+ T-cell.

[0408] In some embodiments, cancer treatment, vaccination therapy and/or adoptive cell cancer therapy as above described are administered in combination with additional cancer therapies. In particular, the T cell compositions according to the present disclosure may be administered in combination with checkpoint blockade therapy, co-stimulatory antibodies, chemotherapy and/or radiotherapy, targeted therapy or monoclonal antibody therapy.

[0409] Checkpoint inhibitors include, but are not limited to, PD-1 inhibitors, PD-L1 inhibitors, Lag-3 inhibitors, Tim-3 inhibitors, TIGIT inhibitors, BTLA inhibitors, V-domain Ig suppressor of T-cell activation (VISTA) inhibitors and CTLA-4 inhibitors, IDO inhibitors for example. Co-stimulatory antibodies deliver positive signals through immune-regulatory receptors including but not limited to ICOS, CD137, CD27 OX-40 and GITR. In a preferred embodiment the checkpoint inhibitor is a CTLA-4 inhibitor.

[0410] A chemotherapeutic entity as used herein refers to an entity which is destructive to a cell, that is the entity reduces the viability of the cell. The chemotherapeutic entity may be a cytotoxic drug. A chemotherapeutic agent contemplated includes, without limitation, alkylating agents, anthracyclines, epothilones, nitrosoureas, ethylenimines/methylmelamine, alkyl sulfonates, alkylating agents, antimetabolites, pyrimidine analogs, epipodophylotoxins, enzymes such as L-asparaginase; biological response modifiers such as IFNa, IL-2, G-CSF and GM-CSF; platinum coordination complexes such as cisplatin, oxaliplatin and carboplatin, anthracenediones, substituted urea such as hydroxyurea, methylhydrazine derivatives including N-methylhydrazine (MIH) and procarbazine, adrenocortical suppressants such as mitotane (o,ρ′-DDD) and aminoglutethimide; hormones and antagonists including adrenocorticosteroid antagonists such as prednisone and equivalents, dexamethasone and aminoglutethimide; progestin such as hydroxyprogesterone caproate, medroxyprogesterone acetate and megestrol acetate; estrogen such as diethylstilbestrol and ethinyl estradiol equivalents; antiestrogen such as tamoxifen; androgens including testosterone propionate and fluoxymesterone/equivalents; antiandrogens such as flutamide, gonadotropin-releasing hormone analogs and leuprolide; and non-steroidal antiandrogens such as flutamide.

[0411] ‘In combination’ may refer to administration of the additional therapy before, at the same time as or after administration of the T cell composition according to the present disclosure.

[0412] In addition or as an alternative to the combination with checkpoint blockade, the T cell composition of the present disclosure may also be genetically modified to render them resistant to immune-checkpoints using gene-editing technologies including but not limited to TALEN and Crispr/Cas. Such methods are known in the art, see e.g. US20140120622. Gene editing technologies may be used to prevent the expression of immune checkpoints expressed by T cells including but not limited to PD-1, Lag-3, Tim-3, TIGIT, BTLA CTLA-4 and combinations of these. The T cell as discussed here may be modified by any of these methods.

[0413] The T cell according to the present disclosure may also be genetically modified to express molecules increasing homing into tumours and or to deliver inflammatory mediators into the tumour microenvironment, including but not limited to cytokines, soluble immune-regulatory receptors and/or ligands.

### BRIEF DESCRIPTION OF THE DRAWINGS

[0414] FIG. 1: Tumor neoantigenic peptides (or TE-derived epitopes) having a predicted affinity for MHC alleles of less than 500 nM, identified by the in silico method according to the disclosure in the tumor mouse lines B16F10-OVA cells (A) and in MCA101-OVA cells (B) and identified both in the two lines (C).

[0415] FIG. 2: (A) RT-PCR gels of amplification of the fusion transcript sequence encoding the neoantigenic peptide N25, in cDNA of tumor mouse lines B16F10-OVA and MCA101-OVA. (B) RT-PCR gels of amplification of the fusion transcript sequence encoding the neoantigenic peptide N26, in cDNA of tumor mouse lines B16F10, B16F10-OVA and MCA101-OVA.

[0416] FIG. 3: (A) Detection of peptide-reactive IFNg-secreting cells by ELISPOT in inguinal lymph nodes from immunized animals with DMSO (negative control), OVA (ovalbumine) (positive control), peptide N25 or peptide N26. (B) IFNg spots for 10\hat{ }5 cells for immunized animals with DMSO (negative control), SIINFEKL (positive control), N25 or N26 peptide.

[0417] FIG. 4: (A) Evolution of the tumor volume (mm3) in mice beforehand immunized with DMSO, OVA or N25L peptide, following the days after the injection of tumor cells B16F10-OVA into said immunized mice. (B) Evolution of the tumor volume (mm3) in mice beforehand immunized with DMSO, OVA or N26L peptide, following the days after the injection of tumor cells B16F10-OVA into said immunized mice.

[0418] FIG. 5: TCGA data sets for 784 luminal, 100 HER2+, 197 TNBC, 112 normal breast tissue, 516 primary lung adenocarcinomas (primary tumor) and 59 normal lung tissue (solid tissue normal), were analyzed by the method for identifying fusion transcript sequence encoded tumor neoantigenic peptide described. (A) Number of fusion transcript sequence (TE-exon fusions) in different subtypes of breast cancer (HER2+, TNBC, normal breast tissue and luminal). (B) Number of fusion transcript sequence (TE-exon fusions) in different subtypes of lung cancer (primary lung adenocarcinomas, normal lung tissue).

[0419] FIG. 6: 8-9 amino acid-long peptides predicted from TE-gene fusion products from each sample were tested in silico for binding to the predicted HLA alleles expressed in the same sample. Shown are peptides with predicted affinity below 500 nM for at least one HLA-A, -B, or -C allele from each sample. (A) Samples of different subtypes of breast cancer (HER2+, TNBC, normal breast tissue and luminal). (B) Samples of different subtypes of lung cancer (non-small cell lung cancer, normal lung tissue).

[0420] FIG. 7: Distribution of tumor-specific peptides per patient across breast tumor subtypes. (A) Numbers of tumor-specific HLA-binding peptides per subtypes of breast cancer patient are shown. (B) Numbers of predicted tumor neoantigenic peptides shared across luminal subtypes samples (n=784) (abscissa). (C) Numbers of predicted tumor neoantigenic peptides shared across HER2+subtypes samples (n=100) (abscissa). (D) Numbers of predicted tumor neoantigenic peptides shared across TNBC subtypes samples (n=197) (abscissa).

[0421] FIG. 8: (A) Numbers of tumor-specific HLA-binding peptides per primary lung adenocarcinomas (LUAD) sample (lung cancer). (B) Distribution of tumor-specific peptides per patient across lung adenocarcinomas. Numbers of predicted tumor neoantigenic peptides shared across primary tumor subtypes samples (n=516) (abscissa).

[0422] FIG. 9: Reconstruction of the fusion nucleotide sequence when the donor is the exon (A) and when the donor is the TE (B).

[0423] FIG. 10: Binding of chimeric transcripts-derived peptides to HLA-A2. Binding to HLA-A2 allele of predicted peptides from the most frequent chimeric fusions were validated by flow cytometry using tetramer formation assay. The results are shown as percentage of binding relative to positive control. Dotted line indicates the threshold considered to confirm the binding to this allele.

[0424] FIG. 11. Binding of ER-derived peptides to HLA-A2 molecule. Peptides-HLA-A*02:01 complex formation for synthesized chimeric transcripts-derived peptides. Percentage of complex formation relative to positive control (CMV pp65 495-503) is represented. The mutated (MelA Mut) and non-mutated (MelA) sequences of Melan-A were used as strong and weak binder peptides controls, respectively. ‘Negative’ indicates staining background. Dashed line indicates the minimum complex formation value needed to consider a peptide as good binder to HLA-A*0201 (50% of positive control).

[0425] FIG. 12. Immunogenicity of fusion transcripts-derived peptides and reactive CD8+ T cells generation. (A) Frequencies of pJET (fusion transcript derived peptides) specific tetramer-positive CD8+ T cells expanded from 6 different healthy donors in in vitro immunogenicity assays using 6 different healthy donors. (B) Cytokine secretion of CTL-clones after stimulation with different concentration of specific peptide. On the right is listed the CTL-clones generated and their peptide specificity. (C) Killing assay for CTL-clone 9 in co-culture with target cells loaded with 2 different peptide concentration in combination with anti-MHC-I antibodies or Isotype control (Left panel), or with un-loaded targets cells at different ratios (Right panel). (D) Killing assays for CTL-clone 9, 80 and 64 when co-cultured with peptide unloaded target cells in combination with anti-MHCI-I antibodies or isotype control. Effector: Target ratio is indicated in each individual plot. H1650 were used as target cells for each plot of this figure.

[0426] FIG. 13. Expression of TCR recognizing fusion-derived peptides. Transduced Jurkat-reporter cells with TCR sequence derived from CTL-clone 9 co-cultured with target cells alone, or loaded with 2 different peptide concentration. Plots show percentage of positive Jurkat cells for the 3 reporter genes evaluated by flow cytometry, using H1650 cell line as target cells (upper plots) or H1395 cell line as target cells (lower plots). Negative control: non-transduced Jurkat cells. No peptide: transduced Jurkat cells co-cultured with peptide unloaded target cells. Positive control: Transduced Jurkat cells stimulated with PMA/ionomycin.

[0427] FIG. 14. A. Activation of Jurkat cells transduced with CTL-clones-derived TCRs recognizing chimeric transcripts-derived peptides after co-culture with target cells loaded with relevant/specific or an irrelevant/unrelated peptide (Melan-A). B. Activation of Jurkat cells transduced with CTL-clones-derived TCRs recognizing chimeric transcripts-derived peptides after co-culture with target cells loaded with relevant peptide or unrelated peptide (Melan-A), in presence or absence of anti-MHC-I blocking antibody (W6/32) or isotype control. PMA/Ionomycin was used as a positive control of activation and target cells without loading peptides were used as negative control of activation. H1395 LUAD cell line were used as target cells. CTL-clone from which each TCR is derived is indicated on the top and peptide specificity between brackets, showing aminoacidic sequence of chimeric transcript-derived peptide recognized by each of these TCR. This peptide sequence is the specific/relevant peptide used in each case to load target cells. Melan-A and MelA Mut both refer to the unrelated peptide (ELAGIGILTV).

[0428] FIG. 15. Tumor infiltrating lymphocytes recognizing fusion transcripts-derived peptides. Percentage of tetramer positive CD8 T cells for the indicated fusion transcript-derived peptides found in tumor infiltrating lymphocytes (TILs) expanded in the presence of fusion transcripts-derived peptide's mix+IL2 (A) or only with IL-2 (B).

[0429] FIG. 16. Phenotype of CD8+ T cells recognizing fusion transcripts-derived peptides in LUAD patient's derived samples. Percentage of tetramer positive CD8 T cells recognizing fusion transcripts-derived peptides present in tumor, juxta tumor, lymph nodes and blood samples derived from LUAD Patient 2 (A, upper panel) and Patient 3 (B, upper panel). In lower panel of figure (A) and (B) is shown the percentage of Naïve (CCR7+CD45+), Central Memory (CM, CCR7+CD45−), Effector Memory (EM, CCR7-CD45−) and Terminal Effector (TE, CCR7-CD45+) cells of tetramer positive parental cell population.

[0430] FIG. 17: A. Heatmap summarizing the frequency of CD8+ T cells recognizing chimeric transcript-derived peptides found ex-vivo without T cell expansions. Only peptide specificities found in at least one tissue are shown (total evaluated patients=4). B. CCR7 and CD45RA percentages in tetramer positive cells summarized in A. after ex-vivo staining for patient 2 and patient 5. (no data available for Patient 1). C. Heatmap summarizing specific tetramer positive cells recognizing chimeric transcripts-derived peptides after in-vitro expansions at day 20 on CD8+ T cells from tumor, juxta tumor or tumor-draining LN samples in the 5 patients analyzed. Only peptide specificities found in at least one tissue are shown. Black squares highlight peptide specificities found also ex-vivo in the same tissue and patient.

[0431] FIG. 18. Immunopeptidomics analysis of lung tumor samples. Fusion transcript-derived peptide sequences were searched in public MHC-I immunopeptidomes datasets. Each column represents a different sample. Each row represents a different peptide sequence (specify on the right). Colored squares indicate in which sample is found each fusion transcript-derived peptide. Publications describing each sample data-sets are annotated on the top.

[0432] FIG. 19: FACS histograms showing the non-transfected negative control (left) and ABHD1-JET transfected condition (right). Red histograms correspond to anti-Myc staining and grey lines show the non-antibody (buffer) condition.

### EXAMPLES

### 1. Example 1: Identification of Fusion Transcript Sequence Encoded Tumor Neoantigenic Peptide

### 1.1 Proof of Concept in Mice

[0433] To detect individual and shared tumor neoantigenic peptide issued from fusion transcripts sequences, a bioinformatics pipeline has been developed. This pipeline is designed to identify tumor-specific mRNA sequences composed in part of a TE sequence and in part of an exonic sequence. This pipeline implies determining the MHC alleles. For each human sample, the Class I and Class II MHC alleles can be determined using the seq2hla (v2.2) tool (bitbucket.org/sebastian_boegel/seq2hla). For mouse models, murine H-2 alleles are generally known. The bioinformatics method comprises the mapping of transcripts from RNA-sequencing against the reference genome. For the proof-of-concept analyses described here, mm 10 was used for mouse and hg19 for human. Different versions of assembled genomes can be used for example hg19, hg38, mm9 or mm10. This mapping is carried out with STAR (v2.5.3a) (github.com/alexdobin/STAR), with the following setting:
[0434] For allowing multi-hits mapping the parameter outFilterMultimapNmax which sets the maximum number of loci, the read is allowed to map to, is set at 1000, and
[0435] For detecting the abnormal junction (fusion), the parameter chimSegmentMin which sets the minimum length of fusion segment, is set at 10, the parameter chimJunctionOverhangMin which sets the minimum overhang for a fusion junction is set at 10.

[0436] Normal (from SJ.out.tab output file) and abnormal (from Chimeric.out.junction output file) junctions are annotated using Ensembl and repeatmasker databases. Normal junctions define all the junctions that match the parameters used for the mapping (maximum intron length <=1 000 000 bp (set by—alignIntronMax), same chromosome and well oriented) and abnormal ones are junctions that do not match with at least one of the previous criteria. This mean that a TE/Exon junction could be in both junction type but a Exon/Exon junction must be in normal file (SJ.out.tab). Transcript sequences comprising a junction between a TE sequence and an exonic sequence are extracted in silico. From the area of the transcript sequence which overlaps the junction, or downstream of the junction when out-of-frame (reading frame non-canonical), the software predicts, in all reading frames, all possible peptides of 8 or 9 mers. Then, the binding affinity of all these possible peptides for the MHC alleles previously defined for the matched sample is determined netMHCpan (v3.4) (cbs.dtu.dk/services/NetMHCpan/). There are currently more than a dozen various prediction algorithms for predicting the binding affinity of peptides, with NetMHC being the most widely used and validated algorithm for neoantigen prediction pipelines.

[0437] Peptides with either less than 500 nM or with a percentile rank less than 2% are considered as potential neo-antigens. Each splice site (donor or acceptor) is uniquely annotated as TE or as Exon. The part in the 5′ end is qualified “donor”, and the part in the 3′ is qualified “acceptor”.

[0438] Predicted HLA-binding peptides shared between cancer and normal tissues are excluded from further analyses.

[0439] This method has been applied to RNAseq data obtained from 7 well-characterized murine tumor cell lines (B16F10, B16F10-OVA, MCA101, MCA101-OVA, MC38, MC38-GFP, MC38-GFP-OVA). The cell lines with the extension-OVA corresponding to the same model but further expressing ovalbumin. In this study, this line is considered as the similar model, that is to say for example that an assay carried out on the cell line from B16F10-OVA is considered as a repeat of an assay carried out on the cell line from B16F10.

[0440] A list of candidate peptides has been obtained with these parameters (FIGS. 1A, 1B and 1C), some were specific to particular cell lines (FIGS. 1A and 1B), and some were shared between the two tumor cell lines (FIG. 1C).

[0441] For validation, we selected a range of peptides, expressed either in B16F10-OVA or MCA101-OVA, with predicted affinities less than 500 nM. Peptides were selected trying to optimize the ratio between number of reads and predicted affinity for MHC-I.

[0442] Four predicted tumor neoantigenic peptides were selected and characterized by identifying the TE and the exonic sequence (table 2).

TABLE 2
Characterization of 4 predicted tumor neoantigenic peptides selected by the method

| Peptide | Cell line | Donor | Acceptor | Predicted affinity |
|---|---|---|---|---|
| N25 | B16/B16-OVA | ERV-MaLR | Chmp3, exon2 | H2-Db, 51.8937 |
| | | (subfamily | | |
| | | MTA) | | |
| N26 | MCA/MCA-OVA | SINE- | Angel2, exon2 | H2-Kb, 392.0384 |
| | MC38-GFP/MC38-OVAGFP | Alu(B1F) | | |
| N90 | MCA/MCA-OVA | Predicted gene | ER VL-MaLR | H2-Kb, 403.8959 |
| | | 45873 | (subfamily | and 50.5416 |
| | | | ORRIA2-int) | |
| N94 | MCA/MCA-OVA | Rsrc1 | ERVI (subfamily | H2-Kb, 431.0564 |
| | MC38-GFP/MC38-OVAGFP | | RLTR4_MM-int) | |

### 1.2 Validation by RT-PCR of the Fusion Transcript Sequence

[0443] First, a validation by regular RT-PCR has been performed, using primer pairs with one primer in the TE sequence, and the other one in the exonic sequence.

[0444] For the RNA extraction and reverse transcription, 3-5.10⁶ cells were lyzed in 500 μL Trizol, and 100 μL phenol-chloroform added to the lyzates prior centrifugation. Aqueous phase was collected, mixed in a 1:1 ratio with 100% EtOH and transferred to RNAeasy minikit columns. RNA was then collected following manufacturer's instructions (including on column DNAse treatment). After RNA elution, DNA contaminants were further removed by treatment with Turbo DNAse (Fisher scientific), according to manufacturer's instructions). RNA concentration was measured using a nanodrop, and 1 μg of RNA used for reverse transcription. First strand synthesis was performed with Superscript III (Life technologies) using oligodT (15) as primers, according to manufacturer's instructions. Primers were ordered from Eurogentec. PCR reactions were performed using Taq polymerase. After identification of optimal conditions for each reaction, PCR products were extracted from agarose gels, and sequencing was performed using GATC lightrun. Sequence alignment was checked with APE software.

[0445] Using this approach, bands matching predicted size for N25, N26, N90 and N94 were detected, respectively in the cell lines identified in Table 2 (See FIG. 2A for N25). Interestingly, although N26 was detected only in MCA and MC38 cells in silico by RNAseq as previously described in the pipeline, using RT-PCR we detected a band corresponding to N26 in B16F10-OVA cells (FIG. 2B), indicating that this sequence is shared between three independent tumor cell lines (MCA, MC38 and B16F10). By re-analyzing the RNAseq data, we found that the N26 junction was present in B16F10-OVA cells, but below the detection threshold of the algorithm. Moreover, sequencing of the RT-PCR product showed exact match with sequences predicted by the algorithm.

### 1.3 In Vivo Immunization of Mice

[0446] To validate these candidates in vivo, short (9-mers) peptides corresponding to neoantigenic peptide which binds to the MHC class I sequences, were synthetized. For the in vivo assays, long (27-mers) peptides, which include the flanking regions to the predicted MHC-binding short peptides of 9 mers, were synthetized, because this length is better suited for in vivo immunization. B16F10 OVA and MCA101-OVA were maintained in RPMI, Glutamax, 10% FCS, 1% penicillin-streptomycin and passaged using TrypLE. Cells were kept in culture for a maximum of one month, and new vials were thawed for each in vivo experiment. C57BL6J recipient mice were immunized with 100 μg long peptide (N25L or N26L), SIINFEKL peptide (short OVA peptide), OVA (Sigma) or DMSO, each with 50 μg polyI:C, by subcutaneous injection into the flank. Immunizations were repeated 7 days after primary immunization. 3 days later (10 days after primary immunization), animals were sacrificed and numbers of peptide-specific IFNg-secreting CD8 T cells in inguinal lymph nodes were detected by ELISPOT (FIG. 3A). Short peptides (N25, N26, or SIINFEKL) or DMSO at 10 μg·mL⁻¹ were used to restimulate T cells. Alternatively, 7 days after secondary immunization, animals were injected subcutaneously with 2.5.105 B16F10-OVA or 5.105 MCA-OVA cells in PBS. We found that N25, and to a lesser extent N26 were able to induce immune responses (FIG. 3B).

1.4 In Vivo Treatment of Mice with Tumor

[0447] To test whether these peptides were protective against tumor cells, we immunized C57BL6 mice with 100 mg peptides N25L or N26L, or OVA (control peptide) and 50 μg polyI:C in PBS at d0 and d7, and at d14, we injected 2.5.105 B16F10-OVA cells to mice immunized with OVA, N25L and N26L. B16F10 OVA and MCA101-OVA were maintained in RPMI, Glutamax, 10% FCS, 1% penicillin-streptomycin and passaged using TrypLE. Cells were kept in culture for a maximum of one month, and new vials were thawed for each in vivo experiment. C57BL6J recipient mice were immunized with 100 μg long peptide (N25L or N26L), OVA (Sigma) or DMSO, each with 50 μg polyI:C, by subcutaneous injection into the flank. Immunizations were repeated 7 days after primary immunization.

[0448] Short peptides (N25, N26, or SIINFEKL) or DMSO at 10 μg·mL⁻¹ were used to restimulate T cells. Alternatively, 7 days after secondary immunization, animals were injected subcutaneously with 2.5.105 B16F10-OVA or 5.105 MCA-OVA cells in PBS. Tumor size was measured twice weekly using a manual caliper, and animal health status monitored throughout the experiment timeframe (FIGS. 4A and 4B). Animals were sacrificed when tumor volume reached 1 mm³. Strikingly, we observed that N25L significantly delayed the formation of B16OVA tumors, in a more efficient way than OVA. Moreover, we obtained a similar result upon N26L immunization.

### Example 2: Identification of Human Lung Adenocarcinoma (LUAD) Neoantigenic Peptides Derived from Fusion Transcripts Composed of a TE Element and an Exonic Sequence

### 2.1 Material and Methods

[0449] RNA extraction. Tumour and juxtatumour samples were cut into pieces of #1 mm³ and resuspended in 700 μl RTL lysis buffer (Quiagen) supplemented with 1% β-mercaptocthanol and homogenized using Perecellys 24 Tissue Homogenizer (Bertin Technoogies). Total RNA isolation was performed using RNeasy Micro Kit (Qiagen) following manufacturer instructions. Total RNA from tumour cell lines were extracted from 5.106 tumor cell lines using the same procedure.

[0450] PCR and Sequencing. Primers were designed using APE software. For each sample, 1 μg of RNA was retrotranscribed into cDNA using SuperScript III Reverse transcriptase (ThermoFisher), as indicated by the provider. PCR reaction was performed using GoTaq G2 Hot Start Polymarase (Promega). All primers were used in a concentration of 0.5 μM. Reactions were carried out in Veriti™ 96-Well Thermal Cycler (ThermoFisher). PCR products were loaded in LabChip GX (Caliper LifeSciences) and analysed by LabChip GX Software (v4.2).

[0451] PCR reactions were repeated for those samples with an amplification product on the expected size. Then, the PCR products were run in a 2% agarose gel SYBR Free Dye (1/10000) (Invitrogen). The specific bands were cut and the DNA products were purified using QIAquick Gel Extraction Kit (Qiagen) following manufacturer instructions. Finally, these products were sequenced by EuroFins Scientific. The resulting sequences were compared to the expected one using Serial Cloner software.

[0452] Tetramer formation. HLA-A2 monomers were purchased from ImmunAware® and the formation of tetramers was evaluated with synthetic ER-derived peptides following manufacturer instructions. Briefly, synthetic HLA-A2 monomers were incubated with synthetic peptides during 48h at 18° C. Tetramerization was done by further incubation of monomers with biotinylated-sepharose. Finally, tetramer formation was measured by flow cytometry using a PE-conjugated anti-β2-microglobulin antibody. As a positive control we used a peptide derived from CMV provided by the manufacturer.

[0453] In experiments addressed to evaluate the presence of specific CD8+ T cells, the tetramerization step was performed by incubating the monomers with different combinations of fluorescent streptavidin (PE, APC, PE-Cy5, PE-CF594, BV421, BV711 and FITC).

[0454] Priming of naïve CTLs. PBMCs were obtained by Ficoll gradient separation from HLA-A2+healthy blood donors. CD14+, CD4+ and CD8+ cells were purified by positive selection using magnetic beads (Miltenyi Biotec). While CD4+ and CD8+ T cells were cryopreserved until the experiment day, CD14+ fraction was cultured in the presence of IL-4 (50 ng/mL) and GM-CSF (10 ng/mL) at 106 cells/mL during 5 days to obtain moDCs. After this period of time, the moDCs were maturated with LPS and incubated with synthetic ER-derived peptides at a final concentration of 1 μg/mL for 2 hours. Finally, peptide-loaded moDCs were co-cultured with autologous CD4+ and CD8+ T cells in culture medium supplemented with with IL-2 (10 U/ml) and IL-7 (100 ng/ml). The ER-derived peptide stimulation of specific CD8+CTL populations was assessed by MHC-I tetramer staining by flow cytometry using a combination of two-color tetramer for each peptide.

[0455] Tetramer Staining. Cells were resuspended in PBS, stained with Live/Dead Aqua-405 nm (ThermoFisher) during 20 minutes at 4° C. and washed once. After that, cells were resuspended in PBS-1% BSA containing the mix of SA-coupled tetramers and incubated in the dark at room temperature during 20 minutes. Without further washing, surface antibodies were added in PBS-1% BSA and cells were incubated 20 minutes in the dark at 4° C. Surface antibodies were a combination of anti-CD3-BV650+anti-CD8-PECy7 in combination with anti-CCR7-AF700+anti-CD45RA-BUV395 when required. Finally, cells were washed twice and resuspended in FACS buffer for flow cytometry analysis.

[0456] CTL-clones generation. Tetramer positive cells were single-cell FACS sorted (ARIA-sorter, BD) in U bottom 96-well plates. Sorted cells were collected in 100 μl of RPMI 10% human serum AB (Sigma-Aldrich) containing 150.000 feeders' cells. Finally, 100 μl of AIM-medium containing IL-2 (3000 IU/ml) and anti-CD3 (100 μg/ml, OKT3 clone from Miltenyi) were added and cells were cultured during 15-20 days maximum. When evident cell growth was observed in wells, we perform a second round of expansions with new feeders' cells for an additional period of 15 days maximum. Cells were feed and split as necessary during this period with the same culture media (AIM-RPMI 50/50+5% Human Serum) but only containing IL-2 at 500 IU/ml. Finally, expanded clones were checked for their specificity by FACs-tetramer staining and only clones with >85% of tetramer positive clones were used for further analysis.

[0457] Killing assays. To perform killing assays, xCELLigence RTCA S16 Real Time Cell Analyzer was used. H1650 cell-line were plated at 0.5×10⁶ cells/ml in pre-coated 16 well plates. One day after, cells were incubated or not during 1 h with different concentration of the correspondent synthetic peptides. After that, cells were washed twice with culture medium and incubated or not for additional 30 minutes with anti-MHC-I antibodies (clone W6/32, 50 μg/well) or isotype control at the same concentration. Without additional wash, CTL-clones were added at the correspondent ratio. The complete assay was done in free-serum culture medium in a final volume of 200 at 37° C. connected to the xCELLigence system. Impedance variation (cell-index) was measured in real-time during 40 h. Each condition was performed by duplicates.

[0458] Cytokine secretion and Jurkat cells activation. 50.000 H1650 cells were plated in 96-well plate in culture medium supplemented with 5% of fetal bovine serum. The day after, cells were culture during 1-2 h with synthetic peptides at different final concentrations. After that, cells were washed twice, CTL-clones were added at 1:1 ratio and co-cultured during 18 h with peptide-loaded target cells. Culture supernatants were collected and cytokine concentration analyzed by cytokine beads arrays (CBA, BD Biosciences) following manufacturer's instructions.

[0459] The same experiment was performed using transduced Jurkat cells instead of CTL-clones and two different types of target cells: H1650 and H1395 cell lines. In this assay, after co-cultured with peptide-loaded target cells, Jurkat cells were assessed by flow cytometry analyzing the expression of reporter markers. PMA/Ionomycin was used as positive control to activate Jurkat cells.

[0460] Tissues and Blood samples. Lung tumor, juxta tumor and lymph nodes samples were cut into small pieces and digested using a mix of collagenase-I (2 mg/ml), hyaluronidase (2 mg/ml) and DNasa (25 μg/ml) in a final volume of 2 ml culture medium (CO₂ independent medium+5) during 40 min at 37° C. After digestion single cell suspensions were collected through a cell Strainer and washed. Tumor and Juxta tumor suspensions were enriched on lymphocyte fractions by a ficoll gradient. After that cells were staining for tetramer analysis by FACs as described before.

[0461] Blood samples were seeded on a ficoll gradient and PBMCs were isolated. After that, PBMCs were enriched for CD8+ T cells using EasyStep Human CD8+ T cell Enrichment Kit (STEMCELL Technologies). Finally, enriched cells were stained for tetramer analysis as described before.

[0462] Tumor infiltrating lymphocytes (TILs) cultures. Tumor tissue was cut into small pieces (1-3 mm³ size, 6-12 pieces maximum). Each tumor fragment was transferred into individual wells from 24-well plates and cultured in a final volume of 2 ml RPMI 10% Human Serum+IL-2 6000 IU/ml. Cells were feed/split as necessary during 15-20 days and cryopreserve or analyzed for tetramer staining.

[0463] TCR cloning. Total RNA was extracted from CTL-clones and retrotranscribed into cDNA using SuperScript III (ThermoFisher). TCRα and β were amplified by PCR as described in Li et al 2019. DNA products were run in 2% agarose gels and sequenced after gel band extraction (Qiagen). TCR V regions (a and B) were concatenated with murine TCR constant chain and cloned into a PEW-pEF1A-inactEGFP vector and amplified in transformed bacteria.

[0464] Jurkat transduction. Lentivirus particles were produced by HEK-293 FT cell line transfected with TCR-expression plasmids together with envelope (pVSVG) and packaging (psPAX2) plasmids. After 64 h, supernatant was collected and lentivirus particles were concentrated using 100 kDa centrifugal filter (Sigma-Aldrich). Lentivirus suspension was transferred by spinoculation into TCR-negative Jurkat cells expressing reporter genes (NFAT-GPF, NF-KB-CFP and AP-1-mCherry). After 5 days, transduction efficiency was evaluated by FACS using anti-murine TCR-β antibody (Clone H57-597). This Jurkat cells were described in Rosskopf S. et al. 2018.

[0465] Mass spectrometry data analysis. Public immunopeptidomics raw data derived from MHC-eluted peptides were analysed using ProteomeDiscoverer 1.4 (ThermoFisher) with the following parameters: no-enzyme, peptide length 8-15 aa, precursor mass tolerance 20 ppm and fragment mass tolerance 0.02 Da. Methionine was enabled as variable modification and a false discovery rate (FDR) of 1% was applied. MS/MS spectra were searched against the human proteome from Uniprot/SwissProt (updated 6 Mar. 2020) concatenated with the list of all fusion transcripts-derived proteins from lung TCGA projects. Finally, peptides matching with Uniprot database or with translated fusion transcripts present in lung normal samples were discarded.

### 2.2 Results: Identification of Fusion Transcript Sequences Encoding Tumor Neoantigenic Peptide in Human Subject

### 2.2.1 Characterization of Neoantigens

[0466] First the TE-Exon fusion transcript landscape was characterized in normal samples from TCGA public database. A total of 8876 unique fusions were identified in 679 normal samples from 19 different tissues (bile duct, bladder, brain, breast, cervical, colon, head and neck, kidneys, liver, pancreas, PCPG, prostate, rectum, sarcoma, skin, thymus, thyroid, uterine). Specific fusions to each tissue type were found with a very small portion of pan-tissue fusion transcripts. These results suggest that a dedicated tissue specific regulatory mechanism is associated with these fusion transcripts.

[0467] Then the number of identified fusions in 514 LUAD samples from TCGA has been compared to their 59 normal associated pulmonary samples present in TCGA. On average, 235 fusions were identified in NSCLC samples, compared with 200 in healthy lung samples (Wilcoxon pvalue=9×10.⁻10). 8269 total unique fusions were identified in NSCLC tumors.

[0468] A first category of fusions called TSF (tumor specific fusion) was obtained as those found in at least 1% of tumor samples and in none of the normal samples. 210 fusions were thus defined as TSF.

[0469] Some high-frequency fusion transcripts in tumors and low frequency in normal cells may also be good candidates for neo-antigens. Thus, a second category called TAF (tumor associated fusion) was notably defined as fusions present in less than 4% of normal tissues, notably less than 2%, and more than 10% of the tumors and that is over expressed in tumors compared to normal tissue samples.

### Fusion Sequence:

[0470] In order to reconstruct the fusion nucleotide sequence, the sequence of the donor on chromosome “Donor_Chromosome_X” from “Donor_start_X” to “Donor_Breakpoint_X” on strand “Donor_strand_X” and the acceptor sequence on the chromosome “Acceptor_Chromosome_X” starting from “Acceptor_Breakpoint_X” to “Acceptor_end_X” on the strand “Acceptor_strand_X” have been extracted from the Ensembl HG19 human assembly database. It is to be noted that the use of the Ensembl HG19 human database is not limitative and that any other adapted database may be used such as NCBI reference Sequence Database (RefSeq).
[0471] Care should be taken to take the reverse complement of the sequence if the fusion is present on the minus strand.
[0472] The “fusion sequence” consists of the donor sequence followed by the acceptor sequence.

### Nucleotide Sequence of the Fusion Transcript:

[0473] On the basis of the known canonical transcripts in which the exon is involved, all the “fusion transcripts” were reconstructed.

[0474] When the donor is the exon (see FIG. 9A)
[0475] it starts with the beginning of the canonical transcript to the donor exon and replace the complete canonical exon sequence with the fusion sequence. In this case, the fusion transcript stops after the TE sequence of the acceptor.

[0476] When the donor is the TE (FIG. 9B)>
[0477] The sequence begins at the canonical position of the acceptor exon in the transcript and forget all exons upstream. The canonical sequence of the acceptor exon was replaced with the fusion sequence and the transcript was reconstructed until the end.

[0478] Each nucleotide sequence of size k (i.e. from 24 to 75 nucleotides) of the fusion transcript (translation of the first k-mer starts at the first nucleotide of the fusion transcript, translation of the second k-mer starts at the second nucleotide of the fusion transcript, etc.) was then translated into a peptide sequence.

[0479] The obtained peptides are then further analyzed with NetMHCpan for MHC binding prediction. Affinity for binding to at least one of the known human alleles was thus predicted, (see also example 1 for further illustration) for each k-mer present in the sequence.

[0480] The peptides were then further screened against a reference proteome, typically for human subject against all sequences present in Uniprot (representing all the sequences encoded in the human exome). Peptides were considered equal to those in Uniprot if they had the same amino acid sequence or if they only differed in the amino acid in the first or last position. All these equal sequences were then discarded from the candidate list. 117 peptide sequences derived from these 230 fusion transcripts where thus predicted to bind to HLA-A2: 01 (see table 3 below).

TABLE 3
Peptides LUAD

| Peptide | Peptide | |
|---|---|---|
| sequence | sequence | Peptide sequence |
| RLLHLESFL | TLGGLMPVL | LMTSSIMSV |
| TLMNLVQVL | FLQGSITFI | MLMKTVWQA |
| ILHSLVTGV | MLLLYIWQV | SLQPEDMAL |
| FMMEQVGLA | YLKIMPVHL | KILTYFPMV |
| AMDGKELSL | HTLGGLMPV | FLGTRVTRV |
| TLAYGKYYI | YIMARVLFV | SLMQSGSPV |
| GLIQLIWLA | FILRTDHYI | VLMWTMAHL |
| GMVDGGSNI | IMSSAIAYL | LLGETKVYV |
| YLWTTFFPL | FIIGILQLA | KILTYFPMV |
| ALWEAKMII | YLLQEIYGI | SLLERGLEA |
| WLSSRVTQL | GVFPVVIQA | VLSSLNVPL |
| AILPKANTV | ALVHLPSQL | FLERKSIRV |
| VLLFEVELV | GLHPAKPQV | FVGSSTFYL |
| GLDTGLQGM | MLVTWELAL | FLYTGDFFL |
| SLLDGTQLF | VLLTNTIWL | SVGPFALTV |
| GLPTGYLFV | ALVHLPSQL | NLALPLPKV |
| LLDRFGYHV | CLIDEMPEA | VLESGLYQV |
| SLLEETQAI | ALMGGFMKT | MLVAITVLI |
| MLLVQPAEL | LLLHLPLXL | FMDDAKILF |
| GLLNISHTA | TLQDKNLGL | ALVHLPSQL |
| HLYEPWFPV | ILANLPPAL | ILTASITSI |
| YLQGLPLPL | PLWDGMAGL | AMDGKELSL |
| KAVEGILAV | GLDHQTHPL | SLGWNISGV |
| MIYEENNRL | GMFLLPPQL | MISAFPNEV |
| YLPYFLKSL | RLADHLSFC | RLTHELPGI |
| GLYSLSSVV | RMRDQLPAL | LLFSDGEKV |
| LMISRTPEV | GLLHAEVAL | RLNESTTFV |
| LLGGPSVFL | SLQNCQVSV | KLEELKSFV |
| ILSGYGPCV | VISAFPSEV | SINEEIQTV |
| FLPDLDRPL | ALAIAALEL | RLHDGPLRA |
| AMDGKELSL | VLDGLDVLL | MISAFPNEV |
| RMDFEDLGL | ELFPPLFMA | ILHTSVPFL |
| TLIFNPTEI | FLIVAEILI | YLENMVSGV |
| LLPGLLLLL | IVAEILISL | QLLGRLESL |
| LLLVHQHAV | KAVEGILAV | RLLHLESFL |
| FLDDAPPGT | YLPHLPQVL | ALLRQMEGI |
| VLIRYVWTL | MLLDPMGGI | TLNKDFQEV |
| YLCGHLHTL | RLLHLESFL | IMEQGDLSV |
| VLSQLTILI | YLAYILYFV | RLLHLESFL |

### 2.2.2 Validation on HLA-A2 Associated Peptides

[0481] Given that HLA-A2 allele is expressed in almost 50% of the Caucasian population, together with the existence of different technical tools, validations were focused on HLA-A2-associated peptides.

[0482] In the following paragraphs TE-Exon derived-transcripts is used interchangeably with “fusion transcripts” and the term “TE-derived peptides” is used interchangeably with “fusion transcripts-derived peptides.

### Expression of TE-Exon Derived-Transcripts in Lung Adenocarcinoma Samples

[0483] To experimentally validate the predicted TE-Exon transcripts, the expression by PCR in LUAD tumor samples and tumor cell lines was validated firstly. Specific primers for each chimeric fusion were thus designed, in order to have one of them binding to the TE part and the other to the Exon part of the fusion. The results were further confirmed by sequencing of the PCR products.

[0484] In particular, specific primers were designed in such a way that the forward primer was binding in the “donor” sequence and the reverse primer was binding in the “acceptor” sequence of the reconstructed fusion sequence. PCR reactions were run on RNA derived from lung tumor samples and human tumor cell lines. Amplifications products were seeded on agarose gels and bands found on the expected size were cut and sequenced. Finally, sequenced PCR products were compared with the reconstructed fusion sequence.

[0485] Using this approach, it was possible to confirm the presence of predicted fusion transcripts both in LUAD tumor samples and tumor cell lines. Table 4 below summarizes the results found for 8 of the most frequent chimeric fusions with a predicted peptide associated to bind with high affinity to HLA-A2 allele.

TABLE 4
Most frequent fusion transcript validation. The most frequent fusions peptides were
validated by PCR in 15 LUAD tumor samples and 6 LUAD tumor cell lines. The status ‘Yes’
or ‘No’ in the table below indicates the presence or absence of the PCR product on the expected
size. When the PCR product was further validated by sequencing, is denoted as Yes’.

| | Fre- | | | | | | | | |
|---|---|---|---|---|---|---|---|---|---|
| | quency | | | | | | | | |
| | peptide | TE-Exon fusion derived-peptides asociated to bind HLA-A2 | | | | | | | |
| | se- | 119 | 48 | 28 | 24 | 23 | 19 | 18 | 16 |
| | quence | RLLHLESFL | MLMKTVWQA | FLGTRVTRV | AILPKANTV | YLPYFLKSL | AMDGKELSL | FLIVAEILI | RLADHLSFC |
| LUAD | H1975 | Yes | Yes | No | No | Yes | No | No | No |
| tumor | H1650 | Yes | No | No | No | No | No | No | Yes |
| cell | H1299 | Yes | No | No | No | No | No | No | Yes |
| lines | A549 | Yes | Yes | No | No | Yes | No | No | No |
| | H2052 | Yes | No | No | No | No | No | No | No |
| | HCC827 | Yes | Yes | No | No | Yes | Yes | No | No |
| LUAD | Tumor | Yes | No | No | No | Yes | Yes | No | Yes |
| tumor | 1 | | | | | | | | |
| sam- | Tumor | Yes | Yes | No | No | Yes | Yes | No | No |
| ples | 2 | | | | | | | | |
| | Tumor | Yes | No | No | No | Yes | No | No | Yes |
| | 3 | | | | | | | | |
| | Tumor | Yes | No | No | No | Yes | Yes | No | No |
| | 4 | | | | | | | | |
| | Tumor | Yes | No | No | No | No | No | No | No |
| | 5 | | | | | | | | |
| | Tumor | Yes | No | No | Yes | Yes | Yes | Yes | Yes |
| | 6 | | | | | | | | |
| | Tumor | Yes | No | No | No | No | Yes | No | No |
| | 7 | | | | | | | | |
| | Tumor | Yes | No | No | No | Yes | Yes | No | No |
| | 8 | | | | | | | | |
| | Tumor | Yes | No | No | No | No | Yes | Yes | No |
| | 9 | | | | | | | | |
| | Tumor | Yes | Yes | Yes | Yes | Yes | Yes | Yes | No |
| | 10 | | | | | | | | |
| | Tumor | Yes | Yes | No | No | Yes | Yes | Yes | No |
| | 11 | | | | | | | | |
| | Tumor | Yes | Yes | Yes | Yes | Yes | Yes | No | No |
| | 12 | | | | | | | | |
| | Tumor | Yes | Yes | No | Yes | Yes | No | No | Yes |
| | 13 | | | | | | | | |
| | Tumor | Yes | Yes | Yes | Yes | Yes | Yes | No | Yes |
| | 14 | | | | | | | | |
| | Tumor | No | No | No | No | No | Yes | No | No |
| | 15 | | | | | | | | |

### Binding of ER-Derived Peptides to HLA-A2 Molecule

[0486] Once confirmed the expression of chimeric transcripts, the derived-peptides were synthetized and their binding to HLA-A2 was confirmed. Because monomer stabilization and tetramer formation are only possible in the presence of a high affinity binding peptide, the formation of HLA-A2 tetramers was estimated in the presence of synthetized peptides by flow cytometry. All predicted peptides were able to stabilize tetramer formation, showing a percentage of fluorescence higher than 50% relative to positive control. As positive control, a known high affinity binding peptide to HLA-A2 derived from Cytomegalovirus (CMV) was used. This result confirmed the predicted high affinity binding to HLA-A2 allele. FIG. 10 shows the result for 10 peptides derived from the most frequent fusions peptides.

[0487] FIG. 11 shows a new set of peptides, also derived from frequent chimeric transcripts, with a confirmed binding to HLA-A2 using the same peptide-MHC-I complex formation assay. As a positive control of complex formation, we used both CMV pp65 495-503 (NLVPMVATV) and the mutated sequence of Melan-A (MelA mut, ELAGIGILTV), both known good binders to HLA-A2. The non-mutated sequence of Melan-A (MelA) was used as a control of low binder peptide. Negative is recombinant HLA-A2 molecule without any peptide.

### Immunogenicity of ER-Derived Peptides

[0488] The following step after binding validation to HLA-A2 allele, was to test the immunogenicity of predicted peptides. Priming assays were thus performed to test the ability of identified peptides to expand specific cytotoxic T cells. PBMCs from HLA-A2+healthy donors were used to generate monocyte derived-DCs (moDCs). After loading the moDCs with a mix of synthetic peptides, autologous co-culture was performed with CD4+ and CD8+ T cells. Finally, the expansion of specific CD8+ T cells was analysed by flow cytometry using two-colours tetramer staining. As a control of specific expansion, the co-culture was performed in the absence of peptides. By using this approach in one donor, it has been possible to identify and expand specific CD8+ T cells recognizing 6 of the most frequent chimeric fusion derived-peptides (RLLHLESFL, LLGETKVYV, AILPKANTV, RLADHLSFC, FLIVAEILI, YLWTTFFPL).

[0489] This result is evidenced by an increase in at least one magnitude order of the percentage of tetramer positive cells compared to control test among total CD8+ T cells.

[0490] The same experiment was performed in order to evaluate the response in additional 5 donors. FIG. 12A summarizes the results obtained for the total of 6 donors analyzed in which we found specific CD8+ T expansions for 23 out 29 of the most frequent fusions transcripts-derived peptides (YLWTTFFPL, FLGTRVTRV, RLADHLSFC, LLGETKVYV, MLVTWELAL, MLMKTVWQA, SLMQSGSPV, AILPKANTV, AMDGKELSL, LLDRFGYHV, GLLNISHTA, ILTASITSI, ILSGYGPCV, RQAPGFHHA, GLPSHVELA, ILHSLVTGV, LLHLESFLV, VLLTNTIWL, LLTSWHLYL, RLLHLESFL, YLPYFLKSL, VLMWTMAHL, YLQGLPLPL). As a positive of expansions, mutated Melan-A peptide (ELAGIGILTV) were used. These experiments show that these peptides are able to induce an immune response and confirms the immunogenicity of ER-derived peptides.

### Generation of Cytotoxic T Lymphocytes Clones Recognizing ER-Derived Peptides

[0491] Expanded CD8+tetramer positive T-cells from immunogenicity assays (FIG. 12A) were single cell FACS-sorted in order to generate cytotoxic T lymphocytes (CTLs) clones. 10 clones recognizing 5 different ER-derived peptides were generated: YLWTTFFPL, LLGETKVYV, MLVTWELAL, MLMKTVWQA, RLADHLSF. These peptides are listed in Table 3 as peptide 9, 86, 53, 80 and 64 respectively. It will be referred to these numbers to indicate the specificity of each generated CTL-clone. For example, CTL-clone 9 recognize ER-derived peptide 9. In a second set of experiments a new CTL-clone 17 was generated recognizing peptide 17 (LLDRFGYHV).

[0492] In order to evaluate the cytotoxic capacity of generated CTL-clones, two different functional assays were conducted using the H1650 cell line as target cells. This is a LUAD-derived tumor cell line expressing HLA-A2 allele.

[0493] First, the ability of CTL-clones to secret cytokines after exposure to ER-derived peptides was measured. After co-cultured of the CTL-clones with the target cells loaded with the specific ER-derived peptides during 18h, secretion of INF-γ, TNF and Granzyme-B (Gr-B) was measured in culture supernatants. All CTL-clones were activated after exposure specific ER-derived peptides, secreting cytokines in a dose-dependent manner (FIG. 12B).

[0494] In a second set of experiments, CTL clones killing capacity was assessed. CTL-clones were co-cultured in different conditions with target cells loaded or not with ER-derived peptides. Using xCELLigence system the real-time impedance variation in a target cells monolayer was measured. In these assays, a decrease in cell-index is related with a decrease in the number of cells in the monolayer reflecting cell viability.

[0495] When CTL-clone 9 was co-culture in 1:1 ratio with target cells loaded with ER-derived peptide 9, a decrease in cell-index over time was observed, compared to the control cells (target cells alone). This cell-index decrease was inhibited when co-culture was performed in the presence of blocking anti-MHC-I antibody (+anti-MHC-I). Performing the co-culture using the same concentration of isotype control (+isotype) did not inhibit the decrease in cell-index. Moreover, the amount of the decrease increased when target cells were loaded with a higher concentration of peptide (1 pM compared to 1 uM) (FIG. 12C, left panel). These result show that cytotoxic T cells can recognize peptides encoded by a fusion transcript as herein described and kill target tumor cells expressing such peptides.

[0496] It was then demonstrated that ER-derived peptides are naturally expressed and presented by target cells, such said target target-cells can thus be killed by co-culturing them with CTL-clones without external addition of peptides. To this aim, co-culture of CTL-clone 9 with H1650 target cells at different ratios were performed. The right panel of FIG. 12C, shows that CTL-9 was able to kill target cells at a ratio effector-target of 4:1 as compared to the control cells (target cells alone). Moreover, killing efficacy is increased at higher ratios (8:1). No killing of target cells was evidenced at lower ratios (2:1).

[0497] Finally, similar experiments were performed with CTL-clone 9, CTL-clone 64, and CTL-clone 80 showing a specific killing of target cells that could be also inhibited when the co-culture is performed in the presence of anti-MCH-I antibodies (FIG. 12D).

[0498] All together, these results confirm that cytotoxic T cells that recognizes several different peptides encoded by a fusion transcript as herein described can recognize and kill tumor cells expressing said specific fusion transcripts-derived peptides and that this effect is due to the specific recognition of peptides in the context of MHC-I molecules. Moreover, the fact that CTL-clones are able to kill target cells without addition of external peptides, provide clear evidence that fusion transcripts-derived peptides are naturally expressed and presented by an LUAD tumor cell line.

### Generation of Engineered T-Cells Recognizing Fusion-Derived Peptides

[0499] Jurkat cells transduced with lentiviral vector encoding for CTL-9 TCR sequence were co-cultured with two different target cells, H1650 and H1395. Both are LUAD-derived cell lines express HLA-A2 allele. TCR-mediated activation of Jurkat cells was evaluated by flow cytometry as an increase in the fluorescence of reporter genes (NFAT-GPF, NF-KB-CFP and AP-1-mCherry). Preliminary results showed that Jurkat cells are activated when co-cultured with both target cells compared to negative control (non-transduced Jurkat cells). Furthermore, this activation increased in a dose-dependent manner when the co-culture was performed with target cells loaded with specific peptides. PMA/ionomycin was used as positive control (FIG. 13).

[0500] These results were repeated in another set of experiments and similar ones were obtained with Jurkat cells transduced with lentiviral vector encoding TCR sequences from CTL-86 and CTL-53 and CTL-17. Transduced Jurkat cells were activated by co-culture with a target tumor cell line loaded with the corresponding ER-derived peptide (Specific/Relevant peptide) but not with the control Melan-A peptide (Unrelated/Irrelevant peptide, ELAGIGILTV) (FIG. 14A). As expected, activation is inhibited by blocking with anti-HLA-I antibodies (FIG. 14B). TCRs expressed by the generated CTL-clones are thus specific to the corresponding HLA-A2 presented ER-derived peptides.

[0501] These results are in line with the results shown in FIGS. 12C and D, showing that LUAD-derived tumor cells express TE-derived peptides. Furthermore, these results also highlight the technical relevance of CTL-clones TCR sequences in the development of engineered T cells.

### Presence of CD8+ Cells Recognizing Fusion-Derived Peptides in LUAD Patients

[0502] It was then aimed to identify the presence of CTL cells recognizing fusion-derived peptides in LUAD tumor samples.

[0503] In a first set of experiments tumor infiltrating lymphocytes (TILs) expanded with a mix of TE-derived peptides and Il-2, or only with Il-2, were analyzed by tetramer staining. As is shown in FIGS. 15A and B, CD8+ T-cells cells recognizing fusion-derived peptides were found in TILs derived from LUAD patients.

[0504] It was then showed that tetramer positive cells could be detected and their phenotype in non-expanded CD8+ T cells derived from fresh tumor samples was further assessed. Using this strategy, CD8+ T cells present in Tumor, juxta-tumor, invaded lymph-nodes and blood derived from LUAD patient samples were thus analyzed. The cell phenotype was determined based on the expression of surface markers CCR7 and CD45RA for Naïve (CCR7+CD45+), Central Memory (CM, CCR7+CD45RA−) Effector Memory (EM, CCR7−CD45−) and Terminal Effectors (TE, CCR7−CD45+) T cells. Interestingly, tetramer positive cells found in tumor tissues shared preferentially a memory phenotype whereas naïve cells (CCR7+CD45+) are found mostly in cells derived from lymph nodes (FIGS. 16A and B). Patient 2 and 3 are the same in FIG. 14 and FIG. 15.

[0505] All samples tested derived from HLA-A2+patients.

[0506] The presence of tetramer positive cells with a memory phenotype in tumor tissues, together with the presence of tetramer positive cells in TILs, provide evidence that an immune response is generated against TE-derived peptides in these patients. Moreover, the existence of naïve tetramer positive cells in lymph nodes shows that an immune response against these particularly TE-derived peptides can be generated.

[0507] In a second cohort of 5 primary, untreated, LUAD tumor, juxta-tumor, tumor-draining lymph node and blood samples from LUAD cancer HLA-A2+ patients were analyzed. Half of each sample was analyzed directly ex-vivo by isolating CD8+ T cells without in-vitro expansions, and the other half was cultured in-vitro for 20 days either with chimeric transcript-derived peptide mixed with IL-2 (patients 1 and 2) or with IL-2 alone (patients 3, 4, 5), aiming to amplify in the samples, the populations of specific T cells recognizing Chimeric transcript-derived peptides. T cells were identified using double color tetramer staining. Antibodies directed CCR7 and CD45RA were also added to the non-expanded cells to distinguish naïve and memory cells. Expansions were considered with 5 or more double tetramer-labelled cells. FIG. 17A shows a summary of the 7 “Chimeric transcript-derived peptide specific” tetramer-positive T cell populations found in the 4 patients analyzed directly ex-vivo (one of the patient samples could not be analyzed for technical reasons). CCR7/CD45RA labeling showed that all tetramer-positive T cells detected in tumor samples have a clear effector/memory phenotype, whereas in blood and lymph nodes the “Chimeric transcript-derived peptide specific” tetramer-positive T cells have variable proportions of less differentiated, CCR7+naïve and/or central memory phenotypes.

[0508] Therefore, these results demonstrate that primary human NSCLC tumors contain chimeric transcript-derived peptide specific memory T cells (FIG. 17B).

[0509] A summary of expanded, tetramer+ CD8+ T cells, is shown in FIG. 17C. For the majority of peptide specificities, T cells were expanded from both the tumor and the matched invaded lymph nodes (LN) analyzed only in 2 patients, and in some cases from the matched juxta-tumor samples (Jt) (FIG. 17C). 5 out of 7 specific tetramer positive populations were also found at Day 20 in the same patient and tissue found ex-vivo without T cell expansions (FIG. 17A and bold squares on FIG. 17C).

[0510] These results provide thus evidence that chimeric transcript-derived peptide specific T cells are present in tumors, tumor-draining lymph nodes and sometimes in juxta-tumor tissue and blood of LUAD patients before and after in-vitro expansion, consistent with the existence of chimeric transcripts-derived peptide specific immune responses in LUAD patients.

### Peptide Identification by Mass Spectrometry in LUAD Biopsies.

[0511] Presentation by MHC class I molecules on the tumour cell surface is required for ER-derived peptides in order to be recognized by cytotoxic T cells. In order to confirm that predicted peptides are express on MHC class I molecules, public data from MHC I immunopeptidome derived from 3 LUAD biopsies (Laumont C M et al., “Noncoding regions are the main source of targetable tumor-specific antigens” Sci Transl Med. 2018 10 (470)) were used. OpenMS Software was used to analyse the raw data uploaded to PRIDE database from MHC-I immunopurification of 3 LUAD tumours (PXD009752, PXD009754 and PXD009755). Having in mind that data-dependent acquisition in proteomics only allows the identification of those sequences contained in a target database (generally the whole human proteome); the peptides as per the present application had not been previously identified because they derive from non-coding sequences. The MS/MS identifications incorporating the sequences of the herein predicted peptides in the target database has been re-analyzed. Five peptides among the 3 samples biopsies (peptides ID: 3304, 269, 757, 1810, 3953) were found. To perform this analysis, all predicted peptides derived from chimeric fusions present in at least 5 samples in the TCGA binding to any MHC I allele were considered. This result confirms the expression of chimeric fusion-derived peptides on MHC class I molecules in LUAD tumors.

[0512] Later, we extended our analysis to new lung immunopeptidomics datasets (Bulik-Sullivan et al. Nat. Biotec 2018, Chong et al. Nat. Comm. 2020 and Javitt et al. Front Immunol 2019). Of note, all datasets were generated with fresh lung tumor samples with the exception of Javitt et al. Front Immunol 2019 containing LUAD tumor cell line. For this second analysis, ProteomeDiscoverer 1.4 Software was used to identify the ER-derived peptides. Considering the 4 datasets, 23 unique ER-derived peptides were present in at least one of the total 19 immunopeptidomic samples. In FIG. 18, ER-derived peptides (rows) identified in each MHC sample (column) are indicated with a grey square. On the right, the peptide sequence found is indicated. Interestingly, some of them were observed in more than 1 MHC sample indicating that they are shared across samples. These results confirm that fusion transcripts-derived peptides are processed and presented by HLA-I molecules on tumor cells surface.

[0513] Peptide RLADHLSFC derived from a fusion transcript where the gene part of the fusion is a tumor suppressor gene (Fusion ID: chr22: 29117506:->chr22: 29115473:-/gene involved: CHEK2) and peptide GLPSHVELA derived from a fusion transcript where the gene part is an oncogene (Fusion ID: chr6: 117763597:->chr6: 117739669:-/gene involved: ROS1). Interestingly, both peptides were found to be immunogenic (FIG. 12A) and particularly for peptide RLADHLSFC, results show in FIG. 12D indicate that could be express by H1650 cell line. Furthermore, we found TILs recognizing peptide GLPSHVELA (FIG. 13A), which indicates that this fusion transcript-derived peptide could be express in LUAD tumor samples.

### 3 Example 3: Identification Neoantigenic Peptides Derived from Fusion Transcripts Composed of a TE Element and an Exonic Sequence from Various Cancer Samples

TABLE 5
9184 samples from 32 different cancer types (from the TCGA):

| | |
|---|---|
| Cancer | Acute Myeloid Leukemia, Adrenocortical Carcinoma, Bladder Urothelial |
| types from | Carcinoma, Breast Ductal Carcinoma, Breast Lobular Carcinoma, Cervical |
| TCGA | Carcinoma, Cholangiocarcinoma, Colorectal Adenocarcinoma, Esophageal |
| | Carcinoma, Gastric Adenocarcinoma, Glioblastoma Multiforme, Head and |
| | Neck Squamous Cell Carcinoma, Hepatocellular Carcinoma, Kidney |
| | Chromophobe Carcinoma, Kidney Clear Cell Carcinoma, Kidney Papillary Cell |
| | Carcinoma, Lower Grade Glioma, Lung Adenocarcinoma, Lung Squamous |
| | Cell Carcinoma, Mesothelioma, Ovarian Serous Adenocarcinoma, Pancreatic |
| | Ductal Adenocarcinoma, Paraganglioma & Pheochromocytoma, Prostate |
| | Adenocarcinoma, Sarcoma, Skin Cutaneous Melanoma, Testicular Germ Cell |
| | Cancer, Thymoma, Thyroid Papillary Carcinoma, Uterine Carcinosarcoma, |
| | Uterine Corpus Endometrioid Carcinoma and Uveal Melanoma |

[0514] RNA datasets from the above-mentioned cancer samples were analyzed according to the method as previously described. 16580 fusion transcripts were identified.

### 4 Transmembrane Chimeric Proteins

### 4.1 Identification of Transmembrane Chimeric Proteins

[0515] The present disclosure provides the first selection of transmembrane chimeric protein candidates that are obtained from the fusion transcripts predicted from bioinformatics pipeline developed for identifying genome-wide non-canonical spliced regions using RNA-Seq data publicly available in TCGA (the Cancer Genome Atlas) and CCLE (Broad Institute Cancer Cell Line Encyclopedia) (described in section EXAMPLES).

[0516] Such transmembrane chimeric proteins candidates were identified and selected as detailed below.

[0517] All transcripts derived from a slicing event between a TE and an exonic sequence were first identified within the transcriptome mRNA data from the TCGA and CCLE databases.

[0518] This step has been detailed in the above section (detailed description and previous examples) of the present application.

[0519] This step has been detailed in the above section (detailed description and previous examples) of the present application. As previously mentioned, fusion transcripts result from alternative splicing mechanisms that known to be essential for generating functional diversity, as it allows individual genes to express multiple mRNAs and encode numerous proteins, through rearrangement of existing exonic and intronic sequences. Types of splicing alteration observed include exon skipping, intron retention and use of alternative splice donor or acceptor sites. In these fusion transcripts, the TE can act as a donor (in 5′ position) or as an acceptor (in 3′ acceptor) and correspondingly the exon can be acceptor or donor. TE-exon splicing thus results in the incorporation of parts of the “non-coding” genome into the coding genome, thereby exposing non-coding genomic sequences to the translation machinery. These fusions (or chimeric) transcripts also named JET (Junction Exon TE) include an ORF (open reading frame), i.e. they are the part of a reading frame that has the ability to be translated into a polypeptide. When the TE is acceptor, the ORF of the fusion transcript is canonical (i.e. the same as the canonical transcript), whereas when the TE is the donor the ORF can be canonical or can be shifted by 1 or 2 nucleotides.

[0520] The fusion transcripts include not only the fused TE and exon sequences (corresponding to the JET) but can also further include exon(s), upstream the fusion breakpoint (between the exon and the TE) if the exon is donor or downstream the fusion breakpoint is the TE is donor, corresponding to the various transcript isoforms.

[0521] Identification of transmembrane neoantigenic peptides as herein disclosed further comprised a step of selecting the fusion transcripts having a translated exonic sequence that is annotated in proteome databases (such as UniProt) as belonging to a transcript coding for a membrane protein.

[0522] The sequences of the selected fusion transcripts were then translated (in silico) into fusion peptide (also named translated junctions) sequences.

[0523] The full sequence of each fusion transcript is translated according to the following rules:
[0524] Fusion transcripts wherein the exon acts as a splicing donor are translated following the canonical ORF of the transcript from the beginning of the transcript to the first stop codon after the breakpoint between the exon and the TE.
[0525] Fusion transcripts wherein the TE acts as a splicing donor are translated following the 3 possible ORFs (1 to 3) from the beginning of the TE or starting in the nucleotide that follows the last stop codon preceding the breakpoint between the TE and the exon, to the first stop codon after said breakpoint.
[0526] Only translated peptide sequences containing at least 3 amino acids derived from the TE sequence are kept.

[0527] Typically, peptide sequences deriving from translated junctions that match to any referenced or annotated protein sequences in UniProt are discarded, therefore, focusing on non-annotated chimeric peptides (as exemplified in tables 9 to 12).

### Validation of Hits by Ectopic Expression

[0528] By applying the above listed rules, a short-list of integral transmembrane chimeric proteins was selected. These chimeric proteins are predicted to be generated either by TE-acceptor fusions or by metafusions. The corresponding genes and associated chimeric IDs are:

TABLE 6

| Gene | chimeric_id |
|---|---|
| ABHD1 | chr2: 27346930: +>chr2: 27347727: + |
| AC006538.4, SLC39A3 | chr19: 2737046: −>chr19: 2735481: − |
| ADCY3 | chr2: 25057354: −>chr2: 25056695: − |
| ADRA1B | chr5: 159344861: +>chr5: 159412678: + |
| AGTRAP | chr1: 11805894: +>chr1: 11805987: + |
| ASIC4 | chr2: 220380028: +>chr2: 220383470: + |
| ATP1B3 | chr3: 141640905: +>chr3: 141642262: + |
| B4GALNT1 | chr12: 58023935: −>chr12: 58023079: − |
| CACNG6 | chr19: 54501567: +>chr19: 54502685: + |
| CD63 | chr12: 56120484: −>chr12: 56120394: − |
| DAGLA | chr11: 61505679: +>chr11: 61506649: + |
| FOLH1 | chr11: 49175398: −>chr11: 49173831: − |
| FOLH1 | chr11: 49186257: −>chr11: 49184464: − |
| FUT8 | chr14: 66096324: +>chr14: 66099743: + |
| GALNT2 | chr1: 230203153: +>chr1: 230227336: + |
| GDPD4 | chr11: 76944070: −>chr11: 76940716: − |
| GGT1 | chr22: 25019883: +>chr22: 25023093: + |
| GRIK2 | chr6: 102483441: +>chr6: 102495349: + |
| HPN | chr19: 35540420: +>chr19: 35547041: + |
| KCNN3 | chr1: 154744451: −>chr1: 154709564: − |
| LAPTM4B | chr8: 98817692: +>chr8: 98819216: + |
| MFNG | chr22: 37868481: −>chr22: 37865350: − |
| MFNG | chr22: 37870550: −>chr22: 37861756: − |
| NAALAD2 | chr11: 89896785: +>chr11: 89901251: + |
| NKAIN3 | chr8: 63502353: +>chr8: 63546747: + |
| SERINC5 | chr5: 79498705: −>chr5: 79481724: − |
| SLC12A2 | chr5: 127497492: +>chr5: 127498885: + |
| SLC28A1 | chr15: 85478749: +>chr15: 85494311: + |
| SLC39A9 | chr14: 69890919: +>chr14: 69895279: + |
| SLC44A1 | chr9: 108110732: +>chr9: 108112859: + |
| SLCO1A2 | chr12: 21427403: −>chr12: 21387233: − |
| SLCO1B1 | chr12: 21377773: +>chr12: 21420585: + |
| TFRC | chr3: 195780393: −>chr3: 195779399: − |
| TFRC | chr3: 195798267: −>chr3: 195798058: − |
| TMCO3 | chr13: 114157903: +>chr13: 114159741: + |
| TMEM117 | chr12: 44338145: +>chr12: 44422639: + |
| TMEM62 | chr15: 43430817: +>chr15: 43431177: + |
| TMPRSS6 | chr22: 37492688: −>chr22: 37492292: − |
| TNFSF4 | chr1: 173157660: −>chr1: 173142495: − |
| TSPAN15 | chr10: 71258152: +>chr10: 71271547: + |
| UPK1B | chr3: 118917987: +>chr3: 118922347: + |
| ZDHHC22 | chr14: 77605556: −>chr14: 77602889: − |

TABLE 7

| Gene | Chimeric _ID OF METAFUSION |
|---|---|
| ABCA5 | chr17: 67291392: −>chr17: 67290854: − \| chr17: 67293332: −>chr17: 67291512: − |
| ABCA5 | chr17: 67306489: −>chr17: 67305564: − \| chr17: 67309233: −>chr17: 67306575: − |
| ABCA6 | chr17: 67076099: −>chr17: 67075406: − \| chr17: 67077207: −>chr17: 67076168: − |
| ADCY3 | chr2: 25056611: −>chr2: 25054618: − \| chr2: 25057354: −>chr2: 25056695: − |
| ADCY3 | chr2: 25112189: −>chr2: 25095588: − \| chr2: 25141182: −>chr2: 25112387: − |
| ANO10 | chr3: 43498855: −>chr3: 43474219: − \| chr3: 43591212: −>chr3: 43498923: − |
| ANO9 | chr11: 423942: −>chr11: 421198: − \| chr11: 428166: −>chr11: 424187: − |
| ATP2C1 | chr3: 130680439: +>chr3: 130682815: + \| chr3: 130678185: +>chr3: 130680470: + |
| B4GALNT1 | chr12: 58023062: −>chr12: 58022045: − \| chr12: 58023935: −>chr12: 58023079: − |
| B4GALNT1 | chr12: 58023062: −>chr12: 58022686: − \| chr12: 58023935: −>chr12: 58023079: − |
| B4GALNT1 | chr12: 58023062: −>chr12: 58022929: − \| chr12: 58023935: −>chr12: 58023079: − |
| CELSR1 | chr22: 46887031: −>chr22: 46860242: − \| chr22: 46929524: −>chr22: 46887096: − |
| DNER | chr2: 230370928: −>chr2: 230341969: − \| chr2: 230377499: −>chr2: 230370969: − |
| DNER | chr2: 230409481: −>chr2: 230377652: − \| chr2: 230411663: −>chr2: 230409543: − |
| DPY19L2 | chr12: 63961380: −>chr12: 63954442: − \| chr12: 63963004: −>chr12: 63961479: − |
| DPY19L2 | chr12: 63961380: −>chr12: 63954442: − \| chr12: 63964538: −>chr12: 63961479: − |
| FOLH1 | chr11: 49184443: −>chr11: 49179595: − \| chr11: 49186257: −>chr11: 49184464: − |
| FOLH1 | chr11: 49184098: −>chr11: 49179595: − \| chr11: 49186257: −>chr11: 49184464: − |
| GPR143 | chrX: 9715893: −>chrX: 9714193: − \| chrX: 9716614: −>chrX: 9715942: − |
| ITFG1 | chr16: 47195998: −>chr16: 47195743: − \| chr16: 47196451: −>chr16: 47196042: − |
| KCNN3 | chr1: 154709520: −>chr1: 154705620: − \| chr1: 154744451: −>chr1: 154709564: − |
| LHFP | chr13: 39925507: −>chr13: 39918191: − \| chr13: 39952565: −>chr13: 39925574: − |
| PAQR3 | chr4: 79849981: −>chr4: 79847872: − \| chr4: 79851324: −>chr4: 79850039: − |
| RNF175 | chr4: 154666821: −>chr4: 154644610: − \| chr4: 154669797: −>chr4: 154666879: − |
| RNF175 | chr4: 154666821: −>chr4: 154649513: − \| chr4: 154672590: −>chr4: 154666879: − |
| RPN1 | chr3: 128359849: −>chr3: 128356948: − \| chr3: 128363762: −>chr3: 128359896: − |
| SLC12A8 | chr3: 124838710: −>chr3: 124837700: − \| chr3: 124839443: −>chr3: 124838735: − |
| SLC1A7 | chr1: 53602097: −>chr1: 53600101: − \| chr1: 53607987: −>chr1: 53602159: − |
| SLC22A16 | chr6: 110774731: −>chr6: 110768193: − \| chr6: 110777741: −>chr6: 110774810: − |
| SLC22A16 | chr6: 110774731: −>chr6: 110768193: − \| chr6: 110778103: −>chr6: 110774810: − |
| SLC22A3 | chr6: 160823515: +>chr6: 160828073: + \| chr6: 160819114: +>chr6: 160826723: + |
| SLC35F5 | chr2: 114505993: −>chr2: 114503916: − \| chr2: 114508002: −>chr2: 114506009: − |
| SLC38A2 | chr12: 46760160: −>chr12: 46758972: − \| chr12: 46760647: −>chr12: 46760246: − |
| SLC39A11 | chr17: 70670643: −>chr17: 70645407: − \| chr17: 70732789: −>chr17: 70670711: − |
| SLC43A3 | chr11: 57190935: −>chr11: 57188846: − \| chr11: 57191455: −>chr11: 57191196: − |
| SLC47A2 | chr17: 19600139: −>chr17: 19584983: − \| chr17: 19605918: −>chr17: 19600213: − |
| SLCO1A2 | chr12: 21426215: −>chr12: 21422701: − \| chr12: 21427403: −>chr12: 21426319: − |
| STRA6 | chr15: 74475786: −>chr15: 74474801: − \| chr15: 74476197: −>chr15: 74475850: − |
| TMEM66 | chr8: 29925108: −>chr8: 29924434: − \| chr8: 29927158: −>chr8: 29925140: − |
| TMEM68 | chr8: 56661201: −>chr8: 56657680: − \| chr8: 56663523: −>chr8: 56661447: − |

[0529] From the above tables 6 and 7, 27 TE-acceptor fusion and 17 metafusion transcripts with the addition of a c-Myc sequence were synthesized and cloned into a pCDNA 3 plasmid (commercially available). These plasmids were used to ectopically express the predicted chimeric proteins including the c-Myc Tag in the HEK293 cell line. After cell transfection and protein expression, anti-Myc Alexa Fluor 647 2233S Clone 9B11 antibody was used to detect and quantify c-Myc from the extracellular region.

[0530] The following 19 JET derived transcripts were positively validated through this approach, thus proving that the corresponding chimeric proteins are stably translated and inserted into the membrane, in the above-mentioned experimental setting.

TABLE 8

| Gene | Transcript IDs | Chimeric IDs |
|---|---|---|
| ABHD1 | ENST00000316470 | chr2: 27346930: +>chr2: 27347727: + |
| ADCY3 | ENST00000260600 | chr2: 25112189: −>chr2: 25095588: − \| chr2: 25141182: −>chr2: 25112387: − |
| ADRA1B | ENST00000306675 | chr5: 159344861: +>chr5: 159412678: + |
| B4GALNT1 | ENST00000341156 | chr12: 58023935: −>chr12: 58023079: − |
| B4GALNT1 | ENST00000341156 | chr12: 58023062: −>chr12: 58022045: − \| chr12: 58023935: −>chr12: 58023079 − |
| B4GALNT1 | ENST00000341156 | chr12: 58023062: −>chr12: 58022686: − \| chr12: 58023935: −>chr12: 58023079: − |
| DNER | ENST00000341772 | chr2: 230370928: −>chr2: 230341969: − \| chr2: 230377499: −>chr2: 230370969 − |
| DNER | ENST00000341772 | chr2: 230409481: −>chr2: 230377652: − \| chr2: 230411663: −>chr2: 230409543: − |
| FOLH1 | ENST00000256999 | chr11: 49186257: −>chr1 1: 49184464: − |
| FOLH1 | ENST00000256999 | chr11: 49184098: −>chr11: 49179595: − \| chr11: 49186257: −>chr11: 49184464: − |
| FOLH1 | ENST00000256999 | chr11: 49184443: −>chr1 1: 49179595: − \| chr11: 49186257: −chr1 1: 49184464: − |
| GGT1 | ENST00000248923 | chr22: 25019883: +>chr22: 25023093: + |
| ITFG1 | ENST00000320640 | chr16: 47195998: −>chr16 47195743: − \| chr16: 47196451 −>chr16: 47196042 − |
| KCNN3 | ENST00000271915 | chr1: 154709520: −>chr1: 154705620: − \| chr1: 154744451: −>chr1: 154709564: − |
| SLC39A9 | ENST00000336643 | chr14: 69890919: +>chr14: 69895279: + |
| TFRC | ENST00000360110 | chr3: 195780393: −>chr3: 195779399: − |
| TMPRSS6 | ENST00000381792 | chr22: 37492688: −>chr22: 37492292: − |
| TNFSF4 | ENST00000281834 | chr1: 173157660: −>chr1: 173142495: − |
| TSPAN15 | ENST00000373290 | chr10: 71258152: +>chr10: 71271547: + |

FIG. 19 Shows an Example of Flow Cytometry Results (Transfection of the Following Construct: ABHD1; ENST00000316470; chr2: 27346930:+>chr2: 27347727:+):

### 4.2 Total Proteomics

[0531] Mass spectrometry-based proteomics has emerged as a powerful tool to interrogate the actual protein content of a given cell preparation. To confirm that JETs are indeed translated into proteins, mass spectrometry output files (called raw files) generated from cell lines and fresh tumors were analyzed to identify different populations of JET-derived peptides. This study has been grouped into two different analyses, each one providing a different and complementary type of information, that demonstrate that JET derived proteins can reliably be detected in a tumor sample or in a tumor cell line.

[0532] First it was demonstrated that proteins derived from the JETs were found to be highly recurrent in CCLE dataset. Therefore, the in-silico translated junctions from all those JET mRNA sequences predicted in more than 7 different cell lines in the CCLE cohort were used and interrogated to the mass spectrometry raw files from Nusinow et al. 2020, which consists in the proteomics analysis of 375 cell lines from CCLE. These cell lines were grouped in TMT6plex, generating a total amount of 29 MS/MS output files. This MS-based proteomics analysis led to the identification of 57 JET derived proteins, containing at least 1 peptide overlapping the splicing junction and in which the gene involved in the splicing event is annotated to be located in plasma membrane according to Uniprot (Table 9).

TABLE 9

| SEQ | | Recurrence | | Uniprot | |
|---|---|---|---|---|---|
| ID | chimeric_id | in proteome | Gene | ID | Subcellular location [CC] |
| 1 | 2 | 3 | 4 | 5 | 6 |
| 1 | 2 | 3 | 4 | 5 | 6 |
| 8203 | chr16: 16171648: +: AluSx > chr16: | 4 | ABCC1 | P33527 | SUBCELLULAR LOCATION: Cell |
| | 16173209: +: ENST00000349029, | | | | membrane |
| | chr16: 16171648: +: AluSx > chr16: | | | | {ECO: 0000269\|PubMed: 16230346}; |
| | 16173209: +: ENST00000349029, | | | | Multi-pass membrane protein |
| | chr16: 16171648: +: AluSx > chr16: | | | | {ECO: 0000255\|PROSITE- |
| | 16173209: +: ENST00000351154, | | | | ProRule: PRU00441, |
| | chr16: 16171648: +: AluSx > chr16: | | | | ECO: 0000269\|PubMed: 16230346}. |
| | 16173209: +: ENST00000351154, | | | | |
| | chr16: 16171648: +: AluSx > chr16: | | | | |
| | 16173209: +: ENST00000399410, | | | | |
| | chr16: 16171648: +: AluSx > chr16: | | | | |
| | 16173209: +: ENST00000399410 | | | | |
| 8204 | chr2: 114668071: +: MER21B > chr2: | 15 | ACTR3 | P61158 | SUBCELLULAR LOCATION: Cytoplasm, |
| | 114670749: +: ENST00000263238, | | | | cytoskeleton |
| | chr2: 114668071: +: MER21B > chr2: | | | | {ECO: 0000269\|PubMed: 19109554}. Cell |
| | 114670749: +: ENST00000263238, | | | | projection |
| | chr2: 114668071: +: MER21B > chr2: | | | | {ECO: 0000269\|PubMed: 9230079}. |
| | 114670749: +: ENST00000415792, | | | | Nucleus |
| | chr2: 114668071: +: MER21B > chr2: | | | | {ECO: 0000269\|PubMed: 16767080, |
| | 114670749: +: ENST00000415792, | | | | ECO: 0000269\|PubMed: 17220302, |
| | chr2: 114668071: +: MER21B > chr2: | | | | ECO: 0000269\|PubMed: 29925947}. |
| | 114670749: +: ENST00000446821, | | | | Note = In pre-apoptotic cells, colocalizes |
| | chr2: 114668071: +: MER21B > chr2: | | | | with MEFV in large specks (pyroptosomes) |
| | 114670749: +: ENST00000446821 | | | | (PubMed: 19109554). |
| 8205 | chr1: 156962904: −: MIRb > chr1: | 4 | ARHGEF11 | O15085 | SUBCELLULAR LOCATION: Cytoplasm |
| | 156955965: −: ENST00000361409, | | | | {ECO: 0000269\|PubMed: 10900204}. |
| | chr1: 156962904: −: MIRb > chr1: | | | | Membrane |
| | 156955965: −: ENST00000368194 | | | | {ECO: 0000269\|PubMed: 10900204}. |
| | | | | | Note = Translocated to the membrane upon |
| | | | | | stimulation. |
| 8206 | chr12: 110873462: −: AluSz > chr12: | 4 | ARPC3 | O15145 | SUBCELLULAR LOCATION: Cytoplasm, |
| | 110873022: −: ENST00000228825 | | | | cytoskeleton |
| | | | | | ECO: 0000269\|PubMed: 9230079, |
| | | | | | ECO: 0000269\|PubMed: 9359840}. Cell |
| | | | | | projection |
| | | | | | {ECO: 0000269\|PubMed: 9230079, |
| | | | | | ECO: 0000269\|PubMed: 9359840}. Nucleus |
| | | | | | (ECO: 0000269\|PubMed: 29925947}. |
| 8207 | chr16: 84488590: +: ENST00000262429 > | 4 | ATP2C2 | O75185 | SUBCELLULAR LOCATION: Membrane |
| | chr16: 84490583: +: L1HS | | | | {ECO: 0000305}; Multi-pass membrane |
| | | | | | protein {ECO: 0000305}. |
| 8208 | chr10: 98044785: −: MLTIC > chr10: | 4 | BLNK | Q8WV28 | SUBCELLULAR LOCATION: Cytoplasm |
| | 98006805: −: ENST00000224337, | | | | {ECO: 0000269\|PubMed: 9697839}. Cell |
| | chr10: 98044785: −: MLTIC > chr10: | | | | membrane |
| | 98006805: −: ENST00000224337 | | | | {ECO: 0000269\|PubMed: 9697839}. |
| | | | | | Note = BCR activation results in the |
| | | | | | translocation to membrane fraction. |
| 8209 | chr7: 81946024: −: THE1B > chr7: | 4 | CACNA2D1 | P54289 | SUBCELLULAR LOCATION: Membrane |
| | 81799925: −: ENST00000356860 | | | | {ECO: 0000305}; Single-pass type I |
| | | | | | membrane protein {ECO: 0000305}. |
| 8210 | chr5: 149627335: −: ENST00000348628 > | 4 | CAMK2A | Q9UQM7 | SUBCELLULAR LOCATION: Cell |
| | chr5: 149626005: −: MER102b | | | | junction, synapse |
| | | | | | {ECO: 0000250\|UniProtKB: P11275}. Cell |
| | | | | | junction, synapse, postsynaptic density |
| | | | | | {ECO: 0000250\|UniProtKB: P11275}. Cell |
| | | | | | projection, dendritic spine |
| | | | | | {ECO: 0000269\|PubMed: 28130356}. Cell |
| | | | | | projection, dendrite |
| | | | | | {ECO: 0000269\|PubMed: 28130356}. |
| | | | | | Note = Postsynaptic lipid rafts. |
| | | | | | {ECO: 0000250\|UniProtKB: P11275}. |
| 8211 | chr13: 77572426: +: MIRc > chr13: | 4 | CLN5 | O75503 | SUBCELLULAR LOCATION: [Ceroid- |
| | 77574593: +: ENST00000377453 | | | | lipofuscinosis neuronal protein 5, secreted |
| | | | | | form]: Lysosome |
| | | | | | {ECO: 0000269\|PubMed: 11971870, |
| | | | | | ECO: 0000269\|PubMed: 20052765, |
| | | | | | ECO: 0000269\|PubMed: 22431521, |
| | | | | | ECO: 0000269\|PubMed: 24038957, |
| | | | | | ECO: 0000269\|PubMed: 24058541}.; |
| | | | | | SUBCELLULAR LOCATION: [Ceroid- |
| | | | | | lipofuscinosis neuronal protein 5]: |
| | | | | | Membrane |
| | | | | | {ECO: 0000269\|PubMed: 24038957}; |
| | | | | | Single-pass type II membrane protein |
| | | | | | {ECO: 0000269\|PubMed: 24038957}. |
| | | | | | Note = An amphipathic anchor region |
| | | | | | facilitates its association with the |
| | | | | | membrane. |
| | | | | | {ECO: 0000269\|PubMed: 24038957}. |
| 8212 | chr4: 5827221: −: ENST00000324989 > | 3 | CRMP1 | Q14194 | SUBCELLULAR LOCATION: Cytoplasm |
| | chr4: 5744561: −: MER66C, | | | | {ECO: 0000269\|PubMed: 11562390}. |
| | chr4: 5827221: −: ENST00000397890 > | | | | Cytoplasm, cytoskeleton, microtubule |
| | chr4: 5744561: −: MER66C, | | | | organizing center, centrosome |
| | chr4: 5827221: −: ENST00000512574 > | | | | {ECO: 0000269\|PubMed: 11562390}. |
| | chr4: 5744561: −: MER66C | | | | Cytoplasm, cytoskeleton, spindle |
| | | | | | {ECO: 0000269\|PubMed: 11562390}. Cell |
| | | | | | projection, growth cone |
| | | | | | {ECO: 0000250\| UniProtKB: P97427}. |
| | | | | | Cytoplasm, cytoskeleton |
| | | | | | {ECO: 0000250\|UniProtKB: P97427}. |
| | | | | | Perikaryon |
| | | | | | {ECO: 0000250\|UniProtKB: P97427}. |
| | | | | | Note = Associated with centrosomes and the |
| | | | | | mitotic spindle during metaphase |
| | | | | | (PubMed: 11562390). Colocalizes with |
| | | | | | FLNA and tubulin in the central region of |
| | | | | | DRG neuron growth cone (By similarity). |
| | | | | | Following SEMA3A stimulation of DRG |
| | | | | | neurons, colocalizes with F-actin (By |
| | | | | | similarity). |
| | | | | | {ECO: 0000250\|UniProtKB: P97427, |
| | | | | | ECO: 0000269\|PubMed: 11562390}. |
| 8213 | chr20: 35116711: +: MIR > chr20: | 8 | DLGAP4 | Q9Y2H0 | SUBCELLULAR LOCATION: Membrane |
| | 35125108: +: ENST00000373907, | | | | {ECO: 0000250}; Peripheral membrane |
| | chr20: 35116711: +: MIR > chr20: | | | | protein {ECO: 0000250}. |
| | 35125108: +: ENST00000373913 | | | | |
| 8214 | chr1: 51946945: −: ENST00000371730 > | 3 | EPS15 | P42566 | SUBCELLULAR LOCATION: Cytoplasm. |
| | chr1: 51945188: −: L1PA5 | | | | Cell membrane; Peripheral membrane |
| | | | | | protein; Cytoplasmic side. Membrane, |
| | | | | | clathrin-coated pit. Note = Recruited to the |
| | | | | | plasma membrane upon EGFR activation |
| | | | | | and localizes to coated pits. Colocalizes |
| | | | | | with UBQLNI in ubiquitin-rich |
| | | | | | cytoplasmic aggregates that are not |
| | | | | | endocytic compartments and in cytoplasmic |
| | | | | | juxtanuclear structures called aggresomes. |
| | | | | | {ECO: 0000269\|PubMed: 16159959}.; |
| | | | | | SUBCELLULAR LOCATION: [Isoform |
| | | | | | 2]: Early endosome membrane |
| | | | | | {ECO: 0000269\|PubMed: 18362181}; |
| | | | | | Peripheral membrane protein |
| | | | | | {ECO: 0000269\|PubMed: 18362181}; |
| | | | | | Cytoplasmic side |
| | | | | | {ECO: 0000269\|PubMed: 18362181}. |
| | | | | | Note = Colocalizes with HGS on bilayered |
| | | | | | clathrin coats on endosomes. |
| 8215 | chr9: 130341201: −: ENST00000373314 > | 12 | FAM129B | Q96TA1 | SUBCELLULAR LOCATION: Cytoplasm, |
| | chr9: 130334967: −: MIRb | | | | cytosol. Cell junction, adherens junction. |
| | | | | | Membrane {ECO: 0000305}; Lipid-anchor |
| | | | | | {ECO: 0000305}. Note = In exponentially |
| | | | | | growing cells, exclusively cytoplasmic. |
| | | | | | Cell membrane localization is observed |
| | | | | | when cells reach confluency and during |
| | | | | | telophase. In melanoma cells, targeting to |
| | | | | | the plasma membrane may be impaired by |
| | | | | | C-terminal phosphorylation. |
| 8216 | chrX: 138286221: −: ENST00000370603 > | 4 | FGF13 | Q92913 | SUBCELLULAR LOCATION: Cell |
| | chrX: 138072779: −: THE1B | | | | projection, filopodium {ECO: 0000250}. |
| | | | | | Cell projection, growth cone |
| | | | | | {ECO: 0000250}. Cell projection, dendrite |
| | | | | | {ECO: 0000250}. Nucleus |
| | | | | | {ECO: 0000269\|PubMed: 10644718}. |
| | | | | | Cytoplasm |
| | | | | | {ECO: 0000269\|PubMed: 10644718}. |
| | | | | | Note-Not secreted. {ECO: 0000250}.; |
| | | | | | SUBCELLULAR LOCATION: [Isoform |
| | | | | | 1]: Nucleus, nucleolus.; SUBCELLULAR |
| | | | | | LOCATION: [Isoform 2]: Cytoplasm. |
| | | | | | Nucleus. |
| 8217 | chr12: 6646556: +: ENST00000229239 > | 4 | GAPDH | P04406 | SUBCELLULAR LOCATION: Cytoplasm, |
| | chr12: 6648679: +: MIRb, | | | | cytosol |
| | chr12: 6646556: +: ENST00000396856 > | | | | {ECO: 0000269\|PubMed: 12829261}. |
| | chr12: 6648679: +: MIRb, | | | | Nucleus {ECO: 0000250}. Cytoplasm, |
| | chr12: 6646556: +: ENST00000396858 > | | | | perinuclear region |
| | chr12: 6648679: +: MIRb | | | | {ECO: 0000269\| PubMed: 12829261}. |
| | | | | | Membrane |
| | | | | | {ECO: 0000269\|PubMed: 12829261}. |
| | | | | | Cytoplasm, cytoskeleton {ECO: 0000250}. |
| | | | | | Note = Translocates to the nucleus following |
| | | | | | S-nitrosylation and interaction with SIAH1, |
| | | | | | which contains a nuclear localization signal |
| | | | | | (By similarity). Postnuclear and Perinuclear |
| | | | | | regions. {ECO: 0000250}. |
| 8218 | chr13: 92560311: +: ENST00000377067 > | 4 | GPC5 | P78333 | SUBCELLULAR LOCATION: Cell |
| | chr13: 92572670: +: HAL1 | | | | membrane {ECO: 0000250}; Lipid-anchor, |
| | | | | | GPI-anchor {ECO: 0000250}; Extracellular |
| | | | | | side {ECO: 0000250}.; SUBCELLULAR |
| | | | | | LOCATION: [Secreted glypican-5]: |
| | | | | | Secreted, extracellular space |
| | | | | | {ECO: 0000250}. |
| 8219 | chr6: 31360872: −: AluSg > chr6: | 4 | HLA-B | P01889 | SUBCELLULAR LOCATION: Cell |
| | 31324570: −: ENST00000412585 | | | | membrane |
| | | | | | {ECO: 0000269\|PubMed: 25480565, |
| | | | | | ECO: 0000269\|PubMed: 26439010, |
| | | | | | ECO: 0000269\|PubMed: 9620674}; Single- |
| | | | | | pass type I membrane protein |
| | | | | | {ECO: 0000255}. Endoplasmic reticulum |
| | | | | | membrane |
| | | | | | {ECO: 0000305\|PubMed: 9620674}; Single- |
| | | | | | pass type I membrane protein |
| | | | | | {ECO: 0000255}. |
| 8220 | chr14: 106662989: −: HERVS71-int > | 4 | IGHV11-18 | AOA0C4DH31 | SUBCELLULAR LOCATION: Secreted |
| | chr14: 106641867: −: ENST00000390605 | | | | {ECO: 0000303\|PubMed: 20176268, |
| | | | | | ECO: 0000303\|PubMed: 22158414}. Cell |
| | | | | | membrane |
| | | | | | {ECO: 0000303\|PubMed: 20176268, |
| | | | | | ECO: 0000303\|PubMed: 22158414}. |
| 8221 | chr14: 107170059: −: ENST00000390633 > | 3 | IGHV1-69 | P01742 | SUBCELLULAR LOCATION: Secreted |
| | chr14: 107126752: −: L1ME2, chr14: | | | | {ECO: 0000303\|PubMed: 20176268, |
| | 107170059: −: ENST00000390633 > chr14: | | | | ECO: 0000303\|PubMed: 22158414}. Cell |
| | 107126752: −: L1ME2 | | | | membrane |
| | | | | | {ECO: 0000303\|PubMed: 20176268, |
| | | | | | ECO: 0000303\|PubMed: 22158414}. |
| 8222 | chr14: 106573251: −: ENST00000390601 > | 8 | IGHV3-11 | P01762 | SUBCELLULAR LOCATION: Secreted |
| | chr14: 106558237: −: L1PB4 | | | | {ECO: 0000303\|PubMed: 20176268, |
| | | | | | ECO: 0000303\|PubMed: 22158414}. Cell |
| | | | | | membrane |
| | | | | | {ECO: 0000303\|PubMed: 20176268, |
| | | | | | ECO: 0000303\|PubMed: 22158414}. |
| 8223 | chr14: 106552518: −: ENST00000390600 > | 3 | IGHV3-33 | P01772 | SUBCELLULAR LOCATION: Secreted |
| | chr14: 106279761: −: L1PA13, | | | | {ECO: 0000303\|PubMed: 20176268, |
| | chr14: 106815952: −: ENST00000390615 > | | | | ECO: 0000303\|PubMed: 22158414}. Cell |
| | chr14: 106279761: −: L1PA13 | | | | membrane |
| | | | | | {ECO: 0000303\|PubMed: 20176268, |
| | | | | | ECO: 0000303\|PubMed: 22158414}. |
| 8224 | chr14: 106866613: −: ENST00000390618 > | 12 | IGHV3-38 | AOA0C4DH36 | SUBCELLULAR LOCATION: Secreted |
| | chr14: 106764783: −: AluJb | | | | {ECO: 0000303\|PubMed: 20176268, |
| | | | | | ECO: 0000303\|PubMed: 22158414}. Cell |
| | | | | | membrane |
| | | | | | {ECO: 0000303\|PubMed: 20176268, |
| | | | | | ECO: 0000303\|PubMed: 22158414}. |
| 8225 | chr14: 107048875: −: ENST00000390627 > | 3 | IGHV3-53 | P01767 | SUBCELLULAR LOCATION: Secreted |
| | chr14: 107025026: −: L1PB3, | | | | {ECO: 0000303\|PubMed: 20176268, |
| | chr14: 107131236: −: ENST00000390632 > | | | | ECO: 0000303\|PubMed: 22158414}. Cell |
| | chr14: 107025026: −: L1PB3 | | | | membrane |
| | | | | | {ECO: 0000303\|PubMed: 20176268, |
| | | | | | ECO: 0000303\|PubMed: 22158414}. |
| 8226 | chr14: 106877762: −: ENST00000390619 > | 4 | IGHV4-39 | P01824 | SUBCELLULAR LOCATION: Secreted |
| | chr14: 106859351: −: MLTIC | | | | {ECO: 0000303\|PubMed: 20176268, |
| | | | | | ECO: 0000303\|PubMed: 22158414}. Cell |
| | | | | | membrane |
| | | | | | {ECO: 0000303\|PubMed: 20176268, |
| | | | | | ECO: 0000303\|PubMed: 22158414}. |
| 8227 | chr2: 90010195: −: LTR62 > chr2: | 3 | IGKV1-5 | P01602 | SUBCELLULAR LOCATION: Secreted |
| | 89246936: −: ENST00000496168 | | | | {ECO: 0000303\|PubMed: 20176268, |
| | | | | | ECO: 0000303\|PubMed: 22158414}. Cell |
| | | | | | membrane |
| | | | | | {ECO: 0000303\|PubMed: 20176268, |
| | | | | | ECO: 0000303\|PubMed: 22158414}. |
| 8228 | chr2: 90199062: +: ENST00000390276 > | 8 | IGKV1D-2 | P01611 | SUBCELLULAR LOCATION: Secreted |
| | chr2: 90207369: +: MER66−int, | | | | {ECO: 0000303\|PubMed: 20176268, |
| | chr2: 90199062: +: ENST00000390276 > | | | | ECO: 0000303\|PubMed: 22158414}. Cell |
| | chr2: 90207369: +: MER66-int | | | | membrane |
| | | | | | {ECO: 0000303\|PubMed: 20176268, |
| | | | | | ECO: 0000303\|PubMed: 22158414}. |
| 8229 | chr2: 90214357: +: L1ME3 > chr2: | 99 | IGKV1D-8 | AOA087WSZ0 | SUBCELLULAR LOCATION: Secreted |
| | 90249278: +: ENST00000468879, | | | | {ECO: 0000303\|PubMed: 20176268, |
| | chr2: 90214357: +: L1ME3 > chr2: | | | | ECO: 0000303\|PubMed: 22158414}. Cell |
| | 90260131: +: ENST00000471857 | | | | membrane |
| | | | | | {ECO: 0000303\|PubMed: 20176268, |
| | | | | | ECO: 0000303\|PubMed: 22158414}. |
| 8230 | chr2: 134035154: +: L1M5 > chr22: | 100 | IGLC3 | PODOY3 | SUBCELLULAR LOCATION: Secreted |
| | 23248512: +: ENST00000390325 | | | | {ECO: 0000303\|PubMed: 20176268, |
| | | | | | ECO: 0000303\|PubMed: 22158414}. Cell |
| | | | | | membrane |
| | | | | | {ECO: 0000303\|PubMed: 20176268, |
| | | | | | ECO: 0000303\|PubMed: 22158414}. |
| 8231 | chr22: 22689234: +: L1PA8 > | 4 | IGLV1-47 | P01700 | SUBCELLULAR LOCATION: Secreted |
| | chr22: 22712477: +: ENST00000390294, | | | | {ECO: 0000303\|PubMed: 20176268, |
| | chr22: 22689234: +: L1PA8 > | | | | ECO: 0000303\|PubMed: 22158414}. Cell |
| | chr22: 22735583: +: ENST00000390297 | | | | membrane |
| | | | | | {ECO: 0000303\|PubMed: 20176268, |
| | | | | | ECO: 0000303\|PubMed: 22158414}. |
| 8232 | chr3: 118831521: −: L1PA3 > chr3: | 3 | IGSF11 | Q5DX21 | SUBCELLULAR LOCATION: Cell |
| | 118649122: −: ENST00000425327 | | | | membrane {ECO: 0000250}; Single-pass |
| | | | | | type I membrane protein {ECO: 0000250}. |
| 8233 | chr17: 73725517: +: ENST00000579662 > | 4 | ITGB4 | P16144 | SUBCELLULAR LOCATION: Cell |
| | chr17: 73726063: +: AluJo | | | | membrane; Single-pass type I membrane |
| | | | | | protein. Cell membrane; Lipid-anchor. Cell |
| | | | | | junction, hemidesmosome. |
| | | | | | Note-Colocalizes with DST at the leading |
| | | | | | edge of migrating keratinocytes. |
| 8234 | chr3: 44887389: +: MER65D > chr3: | 11 | KIF15 | Q9NS87 | SUBCELLULAR LOCATION: Cytoplasm. |
| | 44889477: +: ENST00000326047 | | | | Cytoplasm, cytoskeleton, spindle. |
| | | | | | Note = Detected during the interphase in the |
| | | | | | cytoplasm as finely punctuate pattern and |
| | | | | | irregularly shaped dots. Detected during |
| | | | | | mitosis on the mitotic spindle. Colocalizes |
| | | | | | with TPX2 in mitosis. Localizes at the |
| | | | | | central spindle at anaphase (By similarity). |
| | | | | | Localizes at the sites of invaginating cell |
| | | | | | membranes, a position that corresponds to |
| | | | | | the location of the contractile actomyosin |
| | | | | | ring of dividing cells (By similarity). |
| | | | | | Colocalizes with actin in interphase (By |
| | | | | | similarity). Colocalizes in dendrites and in |
| | | | | | growth cone of axons with microtubules |
| | | | | | (By similarity). {ECO: 0000250}. |
| 8235 | chr7: 156483036: −Charlie 7a > | 14 | LMBR1 | Q8WVP7 | SUBCELLULAR LOCATION: Membrane |
| | chr7: 156480885: −: ENST00000353442 | | | | {ECO: 0000250}; Multi-pass membrane |
| | | | | | protein {ECO: 0000250}. |
| 8236 | chr8: 54994449: −: AluSq2 > chr8: | 8 | LYPLA1 | O75608 | SUBCELLULAR LOCATION: Cytoplasm |
| | 54978373: −: ENST00000316963, | | | | {ECO: 0000269\|PubMed: 19439193}. Cell |
| | chr8: 54994449: −: AluSq2 > chr8: | | | | membrane |
| | 54978373: −: ENST00000343231, | | | | {ECO: 0000269\|PubMed: 19439193}. |
| | chr8: 54994449: −: AluSq2 > chr8: | | | | Nucleus membrane |
| | 54978373: −: ENST00000518546 | | | | {ECO: 0000269\|PubMed: 19439193}. |
| | | | | | Endoplasmic reticulum |
| | | | | | {ECO: 0000269\| PubMed: 19439193}. |
| | | | | | Note-Shows predominantly a cytoplasmic |
| | | | | | localization with a weak expression in the |
| | | | | | cell membrane, nuclear membrane and |
| | | | | | endoplasmic reticulum. |
| | | | | | {ECO: 0000269\|PubMed: 19439193}. |
| 8237 | chr10: 95240482: −: AluSx > chr10: | 4 | MYOF | Q9NZM1 | SUBCELLULAR LOCATION: Cell |
| | 95216694: −: ENST00000358334 | | | | membrane; Single-pass type II membrane |
| | | | | | protein. Nucleus membrane; Single-pass |
| | | | | | type II membrane protein. Cytoplasmic |
| | | | | | vesicle membrane; Single-pass type II |
| | | | | | membrane protein. Note-Concentrated at |
| | | | | | the membrane sites of both myoblast- |
| | | | | | myoblast and myoblast-myotube fusions. |
| | | | | | Detected at the plasmalemma in endothelial |
| | | | | | cells lining intact blood vessels (By |
| | | | | | similarity). Found at nuclear and plasma |
| | | | | | membranes. Enriched in undifferentiated |
| | | | | | myoblasts near the plasma membrane in |
| | | | | | puncate structures. {ECO: 0000250}. |
| 8238 | chr14: 73754128: −: AluSz6 > chr14: | 4 | NUMB | P49757 | SUBCELLULAR LOCATION: Cell |
| | 73754022: −: ENST00000554546 | | | | membrane |
| | | | | | {ECO: 0000269\|PubMed: 18657069}; |
| | | | | | Peripheral membrane protein |
| | | | | | {ECO: 0000305\|PubMed: 18657069}; |
| | | | | | Cytoplasmic side |
| | | | | | {ECO: 0000305\|PubMed: 18657069}. |
| | | | | | Endosome membrane |
| | | | | | {ECO: 0000269\|PubMed: 18657069}; |
| | | | | | Peripheral membrane protein |
| | | | | | {ECO: 0000305\|PubMed: 18657069}; |
| | | | | | Cytoplasmic side |
| | | | | | {ECO: 0000305\|PubMed: 18657069}. |
| | | | | | Note = Localizes to perinuclear endosomes |
| | | | | | in an AAK1-dependent manner. |
| | | | | | {ECO: 0000269\|PubMed: 18657069}. |
| 8239 | chr19: 10561170: +: MIRb > chr19: | 3 | PDE4A | P27815 | SUBCELLULAR LOCATION: [Isoform |
| | 10561279: +: ENST00000592685 | | | | 1]: Cytoplasm, perinuclear region .; |
| | | | | | SUBCELLULAR LOCATION: [Isoform |
| | | | | | 2]: Cytoplasm, perinuclear region. Cell |
| | | | | | projection, ruffle membrane .; |
| | | | | | SUBCELLULAR LOCATION: [Isoform |
| | | | | | 4]: Membrane; Peripheral membrane |
| | | | | | protein. Note = Isoform 4 has propensity for |
| | | | | | association with membranes .; |
| | | | | | SUBCELLULAR LOCATION: [Isoform |
| | | | | | 6]: Cytoplasm, perinuclear region .; |
| | | | | | SUBCELLULAR LOCATION: [Isoform |
| | | | | | 7]: Cytoplasm. Membrane. |
| | | | | | Note = Predominantly cytoplasmic. |
| 8240 | chr6: 144066592: +: L3 > chr6: | 3 | PHACTR2 | O75167 | SUBCELLULAR LOCATION: [Isoform |
| | 144070122: +: ENST00000367584 | | | | 2]: Membrane {ECO: 0000305}; Lipid- |
| | | | | | anchor {ECO: 0000305}.; SUBCELLULAR |
| | | | | | LOCATION: [Isoform 4]: Membrane |
| | | | | | {ECO: 0000305}; Lipid-anchor |
| | | | | | {ECO: 0000305}. |
| 8241 | chr1: 28810817: +: AluSx > chr1: | 4 | PHACTR4 | Q8IZ21 | SUBCELLULAR LOCATION: Cytoplasm |
| | 28815682: +: ENST00000373839, | | | | {ECO: 0000250}. Cell projection, |
| | chr1: 28810817: +: AluSx > chr1: | | | | lamellipodium {ECO: 0000250}. |
| | 28815682: +: ENST00000373839, | | | | |
| | chr1: 28810817: +: AluSx > chr1: | | | | |
| | 28815682: +: ENST00000373839 | | | | |
| 8242 | chr4: 102117073: −: ENST00000492351 > | 11 | PPP3CA | Q08209 | SUBCELLULAR LOCATION: Cytoplasm |
| | chr4: 102104428: −: MLTIJ | | | | {ECO: 0000269\|PubMed: 19154138, |
| | | | | | ECO: 0000269\|PubMed: 22343722}. Cell |
| | | | | | membrane |
| | | | | | ECO: 0000269\|PubMed: 22343722}; |
| | | | | | Peripheral membrane protein |
| | | | | | ECO: 0000269\| PubMed: 22343722}. Cell |
| | | | | | membrane, sarcolemma |
| | | | | | {ECO: 0000250\| UniProtKB: P63329}. |
| | | | | | Cytoplasm, myofibril, sarcomere, Z line |
| | | | | | {ECO: 0000250\|UniProtKB: P63329}. Cell |
| | | | | | projection, dendritic spine |
| | | | | | {ECO: 0000269\|PubMed: 22343722}. |
| | | | | | Note = Colocalizes with ACTN1 and |
| | | | | | MYOZ2 at the Z line in heart and skeletal |
| | | | | | muscle (By similarity). Recruited to the cell |
| | | | | | membrane by scaffold protein AKAP5 |
| | | | | | following L-type Ca(2+)-channel activation |
| | | | | | (PubMed: 22343722). |
| | | | | | {ECO: 0000250\|UniProtKB: P63329, |
| | | | | | ECO: 0000269\|PubMed: 22343722}. |
| 8243 | chr4: 87716976: +: L1PA6 > chr4: | 4 | PTPN13 | Q12923 | SUBCELLULAR LOCATION: Cytoplasm, |
| | 87718027: +: ENST00000411767 | | | | cytoskeleton |
| | | | | | {ECO: 0000269\|PubMed: 11356191}. |
| | | | | | Nucleus |
| | | | | | {ECO: 0000269\|PubMed: 10826496, |
| | | | | | ECO: 0000269\|PubMed: 11356191}. Cell |
| | | | | | projection, lamellipodium |
| | | | | | {ECO: 0000269\|PubMed: 11356191}. |
| | | | | | Note = Colocalizes with F-actin |
| | | | | | (PubMed: 10826496). Colocalizes with |
| | | | | | PKN2 in lamellipodia-like structure, |
| | | | | | regions of large actin turnover |
| | | | | | (PubMed: 11356191). |
| | | | | | {ECO: 0000269\|PubMed: 10826496, |
| | | | | | ECO: 0000269\|PubMed: 11356191}. |
| 8244 | chr14: 23350226: +: AluSc > chr14: | 3 | REM2 | Q8IYK8 | SUBCELLULAR LOCATION: Cell |
| | 23353883: +: ENST00000267396, | | | | membrane |
| | chr14: 23350226: +: AluSc > chr14: | | | | {ECO: 0000250\|UniProtKB: Q9WTY2}. |
| | 23353883: +: ENST00000536884 | | | | |
| 8245 | chr4: 3344780: +: ENST00000514268 > | 4 | RGS12 | O14924 | SUBCELLULAR LOCATION: Nucleus |
| | chr4: 3377116: +: (CCCCAG)n | | | | {ECO: 0000269\|PubMed: 10869340}. |
| | | | | | Cytoplasm |
| | | | | | {ECO: 0000250\|UniProtKB: 008774}. Cell |
| | | | | | projection, dendrite |
| | | | | | {ECO: 0000250\|UniProtKB: 008774}. Cell |
| | | | | | junction, synapse |
| | | | | | {ECO: 0000250\|UniProtKB: 008774}.; |
| | | | | | SUBCELLULAR LOCATION: [Isoform |
| | | | | | 5]: Nucleus matrix |
| | | | | | {ECO: 0000269\|PubMed: 12024043}. |
| | | | | | Note = Also localized to discrete nuclear foci |
| | | | | | that are distinct from sites of RNA |
| | | | | | processing, PML nuclear bodies, and PcG |
| | | | | | domains. |
| | | | | | {ECO: 0000269\|PubMed: 12024043}. |
| 8246 | chr8: 105152976: +: L2b > chr8: | 4 | RIMS2 | Q9UQ26 | SUBCELLULAR LOCATION: Cell |
| | 105160835: +: ENST00000408894 | | | | membrane {ECO: 0000250}; Peripheral |
| | | | | | membrane protein {ECO: 0000250}. Cell |
| | | | | | junction, synapse {ECO: 0000250}. Cell |
| | | | | | junction, synapse, presynaptic cell |
| | | | | | membrane {ECO: 0000250}; Peripheral |
| | | | | | membrane protein {ECO: 0000250}. |
| 8247 | chrX: 38146409: +: CT-rich > chrX: | 4 | RPGR | Q92834 | SUBCELLULAR LOCATION: Cytoplasm, |
| | 38146366: −: ENST00000318842, | | | | cytoskeleton, flagellum axoneme |
| | chrX: 38146409: +: CT-rich > chrX: | | | | {ECO: 0000250\|UniProtKB: Q9R0X5}. |
| | 38146366: −: ENST00000378505, | | | | Golgi apparatus |
| | chrX: 38146409: +: CT-rich > chrX: | | | | {ECO: 0000269\|PubMed: 15772089}. Cell |
| | 38146366: −: ENST00000482855 | | | | projection, cilium |
| | | | | | {ECO: 0000250\| UniProtKB: Q9R0X5}. |
| | | | | | Note = In the retinal photoreceptor cell layer, |
| | | | | | localizes at the connecting cilium (By |
| | | | | | similarity). Colocalizes with WHRN in the |
| | | | | | photoreceptor connecting cilium (By |
| | | | | | similarity). Colocalizes with CEP290 in the |
| | | | | | photoreceptor connecting cilium (By |
| | | | | | similarity). Colocalizes with RPGRIP1 in |
| | | | | | the photoreceptor connecting cilium (By |
| | | | | | similarity). |
| | | | | | {ECO: 0000250\| UniProtKB: Q9R0X5}.; |
| | | | | | SUBCELLULAR LOCATION: [Isoform |
| | | | | | 6]: Cytoplasm, cytoskeleton, microtubule |
| | | | | | organizing center, centrosome. Cytoplasm, |
| | | | | | cytoskeleton, cilium basal body. |
| | | | | | Cytoplasm, cytoskeleton, cilium axoneme. |
| 8248 | chr19: 49497180: +: ENST00000595090 > | 8 | RUVBL2 | Q9Y230 | SUBCELLULAR LOCATION: Nucleus |
| | chr19: 49497762: +: L2a | | | | matrix. Nucleus, nucleoplasm. Cytoplasm. |
| | | | | | Membrane. Note = Mainly localized in the |
| | | | | | nucleus, associated with nuclear matrix or |
| | | | | | in the nuclear cytosol. Although it is also |
| | | | | | present in the cytoplasm and associated |
| | | | | | with the cell membranes. |
| 8249 | chr10: 29778636: −: AluJb > chr10: | 4 | SVIL | O95425 | SUBCELLULAR LOCATION: Cell |
| | 29777685: −: ENST00000375400 | | | | membrane; Peripheral membrane protein; |
| | | | | | Cytoplasmic side. Cytoplasm, cytoskeleton. |
| | | | | | Cell projection, invadopodium. Cell |
| | | | | | projection, podosome. Midbody |
| | | | | | {ECO: 0000250\| UniProtKB: 046385}. |
| | | | | | Cleavage furrow |
| | | | | | {ECO: 0000250\|UniProtKB: 046385}. |
| | | | | | Note = Tightly associated with both actin |
| | | | | | filaments and plasma membranes. |
| 8250 | chr3: 194340620: −: L3 > chr3: | 12 | TMEM44 | Q2T9K0 | SUBCELLULAR LOCATION: Membrane |
| | 194337998: −: ENST00000392432 | | | | {ECO: 0000305}; Multi-pass membrane |
| | | | | | protein {ECO: 0000305}. |
| 8251 | chr15: 81281080: −: MIR3 > chr15: | 4 | #N/A | POD0X7 | SUBCELLULAR LOCATION: Secreted |
| | 81274523: −: ENST00000561312 | | | | {ECO: 0000303\|PubMed: 20176268, |
| | | | | | ECO: 0000303\|PubMed: 22158414}. Cell |
| | | | | | membrane |
| | | | | | {ECO: 0000303\|PubMed: 20176268, |
| | | | | | ECO: 0000303\|PubMed: 22158414}. |
| 8252 | chr17: 43880005: +: Tigger12 > chr17: | 6 | #N/A | POD0X7 | SUBCELLULAR LOCATION: Secreted |
| | 43884376: +: ENST00000347197, | | | | {ECO: 0000303\|PubMed: 20176268, |
| | chr17: 43880005: +: Tigger12 > chr17: | | | | ECO: 0000303\|PubMed: 22158414}. Cell |
| | 43884376: +: ENST00000352855 | | | | membrane |
| | | | | | {ECO: 0000303\|PubMed: 20176268, |
| | | | | | ECO: 0000303\|PubMed: 22158414}. |
| 8253 | chr19: 32948256: +: L4 > chr19: | 7 | #N/A | P0DOX7 | SUBCELLULAR LOCATION: Secreted |
| | 32949006: +: ENST00000392250 | | | | {ECO: 0000303\|PubMed: 20176268, |
| | | | | | ECO: 0000303\|PubMed: 22158414}. Cell |
| | | | | | membrane |
| | | | | | {ECO: 0000303\|PubMed: 20176268, |
| | | | | | ECO: 0000303\|PubMed: 22158414}. |
| 8254 | chr2: 164591413: −: ENST00000409634 > | 4 | #N/A | P0DOX7 | SUBCELLULAR LOCATION: Secreted |
| | chr2: 164561904: −: MIR3 | | | | {ECO: 0000303\|PubMed: 20176268, |
| | | | | | ECO: 0000303\|PubMed: 22158414}. Cell |
| | | | | | membrane |
| | | | | | {ECO: 0000303\|PubMed: 20176268, |
| | | | | | ECO: 0000303\|PubMed: 22158414}. |
| 8255 | chr17: 53344521: +: MIRb > chr17: | 4 | #N/A | P0DOX7 | SUBCELLULAR LOCATION: Secreted |
| | 53345112: +: ENST00000226067 | | | | {ECO: 0000303\|PubMed: 20176268, |
| | | | | | ECO: 0000303\|PubMed: 22158414}. Cell |
| | | | | | membrane |
| | | | | | {ECO: 0000303\|PubMed: 20176268, |
| | | | | | ECO: 0000303\|PubMed: 22158414}. |
| 8256 | chr1: 182920453: −: ENST00000367547 > | 4 | #N/A | P0DOX7 | SUBCELLULAR LOCATION: Secreted |
| | chr1: 182915515: −: HAL1, | | | | {ECO: 0000303\|PubMed: 20176268, |
| | chr1: 182920453: −: ENST00000423786 > | | | | ECO: 0000303\|PubMed: 22158414}. Cell |
| | chr1: 182915515: −: HAL1 | | | | membrane |
| | | | | | {ECO: 0000303\|PubMed: 20176268, |
| | | | | | ECO: 0000303\|PubMed: 22158414}. |
| 8257 | chr19: 32948256: +: L4 > chr19: | 4 | #N/A | P0DOX7 | SUBCELLULAR LOCATION: Secreted |
| | 32949006: +: ENST00000392250, | | | | {ECO: 0000303\|PubMed: 20176268, |
| | chr19: 32948256: +: L4 > chr19: | | | | ECO: 0000303\|PubMed: 22158414}. Cell |
| | 32949006: +: ENST00000586987, | | | | membrane |
| | chr19: 32948256: +: L4 > chr19: | | | | {ECO: 0000303\|PubMed: 20176268, |
| | 32949006: +: ENST00000588648 | | | | ECO: 0000303\|PubMed: 22158414}. |
| 8258 | chrX: 114878268: +: AluSx > chrX: | 7 | #N/A | P0DOX7 | SUBCELLULAR LOCATION: Secreted |
| | 114879341: +: ENST00000355899, | | | | {ECO: 0000303\|PubMed: 20176268, |
| | chrX: 114878268: +: AluSx > chrX: | | | | ECO: 0000303\|PubMed: 22158414}. Cell |
| | 114879341: +: ENST00000497870 | | | | membrane |
| | | | | | {ECO: 0000303\|PubMed: 20176268, |
| | | | | | ECO: 0000303\|PubMed: 22158414}. |
| 8259 | chr19: 58288037: +: ENST00000391702 > | 3 | #N/A | P0DOX7 | SUBCELLULAR LOCATION: Secreted |
| | chr19: 58308975: +: AluSp | | | | {ECO: 0000303\|PubMed: 20176268, |
| | | | | | ECO: 0000303\|PubMed: 22158414}. Cell |
| | | | | | membrane |
| | | | | | {ECO: 0000303\|PubMed: 20176268, |
| | | | | | ECO: 0000303\|PubMed: 22158414}. |

[0533] In the table below the column's numbers refer to the following items.

[0534] Despite the limitations inherent to the isobaric tagging methods, such as TMT, that cause significant label cross-talking between channels, it was confirmed that JETs were identified in more than 1 TMT group and, consequently, in more than 1 tumor sample.

### Surface Proteins Enrichment:

[0535] It has been described that transmembrane proteins are underrepresented in total proteomics experiments because the lysis protocol used. Therefore, a second approach has been used to enrich for extracellular exposed proteins through biotin labelling in H1650 lung cell line. Two different analyses were conducted with the mass spectrometry raw file obtained from this experiment. Firstly, to understand if fusion-derived proteins (chimeric proteins) are expressed on plasma membrane from a general point of view, all junctions expressed in more than 7 cell lines from CCLE cohort (tumor-specific and not) were analyzed in the mass spectrometry files from this experiment. provided the identification of 10 chimeric peptides, of which 6 involved a junction where amino acids from both TE and exon were found. From the junction sequences, 4 of them were related to a protein annotated in membrane compartments. The prediction of transmembrane helixes was carried out on TMHMM algorithm ((http://www.cbs.dtu.dk/) and the topology of the translated sequence was studied. Based on the predicted topology of the sequence, only those candidates where the TE was predicted to be exposed to the extracellular compartment were retained. A total amount of 10 fusion-derived peptides were identified, 6 of them overlapping the splicing site (Table 10).

TABLE 10

| pJET | | Peptide | | |
|---|---|---|---|---|
| SEQ | | location | Gene | Gene subcellular |
| ID | chimeric_id | on JET | Name | location |
| 8260 | chr15: 91490144: +>chr15: 91490300: + | junction | UNC45A | Nucleus |
| 8261 | chr19: 49867375: +>chr19: 49867839: + | junction | DKKL1 | Secreted, |
| | | | | Extracellular |
| 8262 | chr8: 54994122: −>chr8: 54978373: − | junction | LYPLA1 | Membrane, ER, |
| | | | | Nucleus |
| 8263 | chrX: 48669479: +>chrX: 48672847: + | junction | HDAC6 | Membrane (GO), |
| | | | | Nucleus, |
| | | | | Cytoskeleton |
| 8264 | chr16: 718154: +>chr16: 718358: + | junction | RHOT2 | Mitochondria, |
| | | | | Membrane (GO) |
| 8265 | chr8: 104778647: +>chr8: 104821508: + | junction | RIMS2 | Membrane |
| 8266 | chr15: 91490144: +>chr15: 91490300: + | acceptor | UNC45A | Nucleus |
| 8267 | chr6: 31153803: −>chr6: 31133824: − | donor | POU5F1 | Cytoplasm, Nucleus |
| 8268 | chr9: 123585221: −>chr9: 123583742: − | donor | PSMD5 | Cytosol |
| 8269 | chr20: 29628331: +>chr20: 29652124: + | acceptor | FRG1BP | Nucleus |

[0536] In addition, one peptide, involving the canonical gene product RHOT2, carrying a TE predicted to be exposed to the extracellular compartment was found. Following this analysis, it has been further shown that tumour-specific fusion derived proteins can also be identified using this approach. Lung tumor specific JETs from lung TCGA and CCLE cohorts (as described previously) were thus used to interrogate them to the MS files. Of the 16 identified sequences, 8 of them involved a junction, with the identified amino acids originated both from a TE and a canonical gene product. According to the annotated subcellular localization of the involved canonical protein, 5 of the 16 chimeric peptides could be located in the plasma membrane while the rest of them (11) would belong to other membrane compartments or to contaminant cytosol (Table 11).

TABLE 11

| | | Peptide | | |
|---|---|---|---|---|
| SEQ | | location | Gene | Gene subcellular |
| ID | chimeric_id_Tx | on JET | Name | location |
| 8270 | chr15: 91490144: +: ENST00000394275 > chr15: 91490300: +: AluJb | junction | UNC45A | Nucleus |
| 8271 | chr19: 49867375: +: AluJb > chr19: 49867839: +: ENST00000221498 | junction | DKKL1 | Secreted, |
| | | | | Extracellular |
| 8272 | chr5: 32357128: −: AluJb > chr5: 32356045: −: ENST00000265069 | junction | ZFR | Nucleus |
| 8273 | chrX: 48669479: +: AluSz > chrX: 48672847: +: ENST00000334136 | junction | HDAC6 | Membrane (GO), |
| | | | | Nucleus, |
| | | | | Cytoskeleton |
| 8274 | chr9: 111632255: −: Tigger2 > chr9: 111631462: −: ENST00000374647 | junction | ELP1 | Cytoplasm, |
| | | | | Nucleus |
| 8275 | chr14: 45702609: −: L2a > chr14: 45702023: −: ENST00000453142 | junction | MIS18BP1 | Nucleus |
| 8276 | chr11: 77637512: −: L2c > chr11: 77635938: −: ENST00000529807 | junction | INTS4 | Nucleus |
| 8277 | chr8: 104778647: +: ENST00000406091 > chr8: 104821508: +: L2b | junction | RIMS2 | Membrane |
| 8278 | chr13: 113474264: +: ENST00000283558 > chr13: 113502272: +: AluJr | acceptor | ATP11A | Membrane, |
| | | | | Endosome, ER |
| 8279 | chr9: 123585221: −: AluJb > chr9: 123583742: −: ENST00000210313 | donor | PSMD5 | Cytosol |
| 8280 | chr6: 31153803: −: Harlequin-int > chr6: 31133478: −: ENST00000259915 | donor | POU5F1 | Cytoplasm, |
| | | | | Nucleus |
| 8281 | chr10: 71900499: −: L1MC4a > chr10: 71899897: −: ENST00000287078 | donor | TYSND1 | Peroxisome, |
| | | | | Membrane (GO) |
| 8282 | chr4: 75902022: +: L1PA 10 > chr4: 75937635: +: ENST00000307428 | donor | PARM1 | Membrane- |
| | | | | Endosome, |
| | | | | Golgi |
| 8283 | chr1: 44279346: +: L4 > chr1: 44280563: +: ENST00000353126 | donor | ST3GAL3 | Secreted, |
| | | | | Golgi |
| | | | | membrane |
| 8284 | chrX: 16819258: +: MSTB > chrX: 16836697: +: ENST00000380122 | donor | TXLNG | Nucleus |
| | | | | membrane |
| 8285 | chr12: 82850599: +: ENST00000248306 > chr12: 82868575: +: L1M7 | acceptor | METTL25 | |

[0537] The presence of transmembrane helix domain/s was calculated according to the predicted sequence of the translated junction, using TMHMM algorithm. This resulted in two candidates of interest, involving ATP11A and PARM1 gene products.

[0538] These preliminary results reveal the presence of chimeric peptides within the surfaceome and the capability of our methodology to investigate the translated epigenetic products exposed to the cell surface. Likewise, the demonstrated applicability of our pipeline paves the path for further analysis on different cellular models, expanding the scope of our study and allowing the identification of a greater population of JETs (junctions of exon-transposable element).

[0539] Analysis of raw dataset deposited to the ProteomeXchange Consortium via the PRIDE partner repository with the data set identifier PXD016582. These analyses correspond to patient-derived organoid clones, from single tumor cells that retain heterogeneity and recapitulate the hallmarks of colorectal carcinomas. From the same patient, four tumor clones were isolated and maintained in organoid culture, alongside a normal colon organoid line generated from tumor-free colon mucosal tissue biopsied from the same patient. Tumor clones T1, T3, T4, and T5 are morphologically distinct from normal organoids of the same patient. For further details see Demmers, L. C., Kretzschmar, K., Van Hoeck, A. et al. Single-cell derived tumor organoids display diversity in HLA class I peptide presentation (see Nat Commun 11, 5338 (2020). https://doi.org/10.1038/s41467-020-19142-9).

[0540] Following the same pipeline as described previously, the following list of peptides derived from JET transcripts have been identified:

TABLE 12

| SEQ | | |
|---|---|---|
| ID | chimeric_iD | chimeric_id_tx_orf |
| 8286 | chr9: 75524323: −>chr9: 75520948: − | chr9: 75524323: −: AluSq2 > chr9: 75520948: −: ENST00000297785/ORF2 |
| 8287 | chr19: 42225096: +>chr19: 42233104: + | chr19: 42225096: +: ENST00000398599 > chr19: 42233104: +: MER65-int/ORF1 |
| 8288 | chr19: 42225096: +>chr19: 42233104: + | chr19: 42225096: +: ENST00000221992 > chr19: 42233104: +: MER65-int/ORF1 |
| 8289 | chr19: 8047556: −>chr19: 8046070: − | chr19: 8047556: −: L1MC3 > chr19: 8046070: −: ENST00000593807/ORF2 |
| 8290 | chr19: 8047556: −>chr19: 8046070: − | chr19: 8047556: −: L1MC3 > chr19: 8046070: −: ENST00000407627/ORF2 |
| 8291 | chr7: 56121213: +>chr7: 56122062: + | chr7: 56121213: +: AluSz > chr7: 56122062: +: ENST00000275603/ORF1 |
| 8292 | chr15: 41646513: +>chr15: 41648237: + | chr15: 41646513: +: AluSx > chr15: 41648237: +: ENST00000260359/ORF2 |
| 8293 | chr15: 41643802: +>chr15: 41648237: + | chr15: 41643802: +: AluJb > chr15: 41648237: +: ENST00000260359/ORF3 |
| 8294 | chr12: 53865132: +>chr12: 53865422: + | chr12: 53865132: +: AluSc > chr12: 53865422: +: ENST00000553064/ORF1 |
| 8295 | chr12: 53863413: +>chr12: 53865422: + | chr12: 53863413: +: AluSp > chr12: 53865422: +: ENST00000553064/ORF3 |
| 8296 | chr12: 53865132: +>chr12: 53865422: + | chr12: 53865132: +: AluSc > chr12: 53865422: +: ENST00000359282/ORF1 |
| 8297 | chr12: 53863413: +>chr12: 53865422: + | chr12: 53863413: +: AluSp > chr12: 53865422: +: ENST00000359282/ORF3 |
| 8298 | chr13: 100502502: +>chr13: 100511115: + | chr13: 100502502: +: L1MB4 > chr13: 100511115: +: ENST00000376355/ORF2 |
| 8299 | chr22: 38245070: −>chr22: 38236241: − | chr22: 38245070: −: AluSp > chr22: 38236241: −: ENST00000458278/ORF2 |
| 8300 | chr22: 38245070: −>chr22: 38236241: − | chr22: 38245070: −: AluSp > chr22: 38236241: −: ENST00000434930/ORF2 |
| 8301 | chr22: 38245070: −>chr22: 38236241: − | chr22: 38245070: −: AluSp > chr22: 38236241: −: ENST00000413497/ORF2 |
| 8302 | chr22: 38245070: −>chr22: 38236241: − | chr22: 38245070: −: AluSp > chr22: 38236241: −: ENST00000215941/ORF2 |
| 8303 | chr2: 196772498: −>chr2: 196771733: − | chr2: 196772498: −: MIRb > chr2: 196771733: −: ENST00000312428/ORF1 |
| 8304 | chr11: 126273381: +>chr11: 126275991: + | chr11: 126273381: +: MER5B > chr11: 126275991: +: ENST00000534733/ORF1 |
| 8305 | chr11: 61558935: −>chr11: 61558074: − | chr11: 61558935: −: AluSx3 > chr11: 61558074: −: ENST00000541893/ORF1 |
| 8306 | chr11: 61558935: −>chr11: 61558074: − | chr11: 61558935: −: AluSx3 > chr11: 61558074: −: ENST00000537328/ORF1 |
| 8307 | chr12: 54862609: −>chr12: 54858951: − | chr12: 54862609: −: MER5A1 > chr12: 54858951: −: ENST00000546931/ORF3 |
| 8308 | chr8: 126194498: +>chr8: 126207297: + | chr8: 126194498: +: ENST00000517315 > chr8: 126207297: +: MER5A/ORF1 |
| 8309 | chr8: 126194498: +>chr8: 126207297: + | chr8: 126194498: +: ENST00000523741 > chr8: 126207297: +: MER5A/ORF1 |
| 8310 | chr1: 24297828: −>chr1: 24294213: − | chr1: 24297828: −: ENST00000343255 > chr1: 24294213: −: CR1 Mam/ORF1 |
| 8311 | chr1: 24297828: −>chr1: 24294213: − | chr1: 24297828: −: ENST00000492112 > chr1: 24294213: −: CR1_Mam/ORF1 |
| 8312 | chrX: 118124523: +>chrX: 118130144: + | chrX: 118124523: +: ENST00000439603 > chrX: 118130144: +: L1PB1/ORF1 |
| 8313 | chr11: 27709882: −>chr11: 27680132: − | chr11: 27709882: −: L1PA7 > chr11: 27680132: −: ENST00000395986/ORF3 |
| 8314 | chr14: 50671969: −>chr14: 50671127: − | chr14: 50671969: −: AluJb > chr14: 50671127: −: ENST00000216373/ORF3 |
| 8315 | chr15: 41646513: +>chr15: 41648237: + | chr15: 41646513: +: AluSx > chr15: 41648237: +: ENST00000260359/ORF2 |
| 8316 | chr15: 41643802: +>chr15: 41648237: + | chr15: 41643802: +: AluJb > chr15: 41648237: +: ENST00000260359/ORF3 |
| 8317 | chr3: 126167703: −>chr3: 126160789: − | chr3: 126167703: −: LTR33A > chr3: 126160789: −: ENST00000389709/ORF2 |
| 8318 | chr5: 147649705: +>chr5: 147650360: + | chr5: 147649705: +: ENST00000512953 > chr5: 147650360: +: MLT1D/ORF1 |
| 8319 | chr3: 185370866: −>chr3: 185369956: − | chr3: 185370866: −: AluSx1 > chr3: 185369956: −: ENST00000382199/ORF2 |
| 8320 | chr19: 53646709: −>chr19: 53645809: − | chr19: 53646709: −: L1PA4 > chr19: 53645809: −: ENST00000334197/ORF1 |
| 8321 | chr19: 53646709: −>chr19: 53645809: − | chr19: 53646709: −: L1PA4 > chr19: 53645809: −: ENST00000597183/ORF1 |
| 8322 | chr19: 53646709: −>chr19: 53645809: − | chr19: 53646709: −: L1PA4 > chr19: 53645809: −: ENST00000595967/ORF1 |
| 8323 | chr14: 21699360: −>chr14: 21699231: − | chr14: 21699360: −: AluSx3 > chr14: 21699231: −: ENST00000554383/ORF2 |
| 8324 | chr14: 21699360: −>chr14: 21699231: − | chr14: 21699360: −: AluSx3 > chr14: 21699231: −: ENST00000336053/ORF2 |
| 8325 | chr14: 21699360: −>chr14: 21699231: − | chr14: 21699360: −: AluSx3 > chr14: 21699231: −: ENST00000320084/ORF2 |
| 8326 | chr14: 21699360: −>chr14: 21699231: − | chr14: 21699360: −: AluSx3 > chr14: 21699231: −: ENST00000449098/ORF2 |
| 8327 | chr14: 21699360: −>chr14: 21699231: − | chr14: 21699360: −: AluSx3 > chr14: 21699231: −: ENST00000555914/ORF2 |
| 8328 | chr14: 21699360: −>chr14: 21699231: − | chr14: 21699360: −: AluSx3 > chr14: 21699231: −: ENST00000554891/ORF2 |
| 8329 | chr14: 21699360: −>chr14: 21699231: − | chr14: 21699360: −: AluSx3 > chr14: 21699231: −: ENST00000556226/ORF2 |
| 8330 | chr14: 21699360: −>chr14: 21699231: − | chr14: 21699360: −: AluSx3 > chr14: 21699231: −: ENST00000556142/ORF2 |
| 8331 | chr14: 21699360: −>chr14: 21699231: − | chr14: 21699360: −: AluSx3 > chr14: 21699231: −: ENST00000555137/ORF2 |
| 8332 | chr14: 21699360: −>chr14: 21699231: − | chr14: 21699360: −: AluSx3 > chr14: 21699231: −: ENST00000555309/ORF2 |
| 8333 | chr14: 21699360: −>chr14: 21699231: − | chr14: 21699360: −: AluSx3 > chr14: 21699231: −: ENST00000555883/ORF2 |
| 8334 | chr14: 21699360: −>chr14: 21699231: − | chr14: 21699360: −: AluSx3 > chr14: 21699231: −: ENST00000555176/ORF2 |
| 8335 | chr14: 21699360: −>chr14: 21699231: − | chr14: 21699360: −: AluSx3 > chr14: 21699231: −: ENST00000557442/ORF2 |
| 8336 | chr14: 21699360: −>chr14: 21699231: − | chr14: 21699360: −: AluSx3 > chr14: 21699231: −: ENST00000555215/ORF2 |
| 8337 | chr7: 27581234: −>chr7: 27578036: − | chr7: 27581234: −: Tigger2 > chr7: 27578036: −: ENST00000265395/ORF2 |
| 8338 | chr7: 27581188: −>chr7: 27578036: − | chr7: 27581188: −: Tigger2 > chr7: 27578036: −: ENST00000425715/ORF2 |
| 8339 | chr7: 27581188: −>chr7: 27578036: − | chr7: 27581188: −: Tigger2 > chr7: 27578036: −: ENST00000265395/ORF2 |
| 8340 | chr10: 91522592: +>chr10: 91525277: + | chr10: 91522592: +: ENST00000394289 > chr10: 91525277: +: L1PA3/ORF1 |
| 8341 | chr10: 91522592: +>chr10: 91525277: + | chr10: 91522592: +: ENST00000416354 > chr10: 91525277: +: L1PA3/ORF1 |
| 8342 | chr10: 91522592: +>chr10: 91525277: + | chr10: 91522592: +: ENST00000260753 > chr10: 91525277: +: L1PA3/ORF1 |
| 8343 | chr9: 20773946: +>chr9: 20778680: + | chr9: 20773946: +: MER1B > chr9: 20778680: +: ENST00000380249/ORF1 |
| 8344 | chr13: 95908378: −>chr13: 95900007: − | chr13: 95908378: −: AluJr > chr13: 95900007: −: ENST00000412704/ORF1 |
| 8345 | chr12: 53296405: −>chr12: 53295856: − | chr12: 53296405: −: AluY > chr12: 53295856: −: ENST00000552551/ORF3 |
| 8346 | chr9: 140260945: −>chr9: 140253058: − | chr9: 140260945: −: ENST00000478344 > chr9: 140253058: −: HAL1/ORF1 |
| 8347 | chr8: 143751986: +>chr8: 143762745: + | chr8: 143751986: +: MLT1D-int > chr8: 143762745: +: ENST00000513264/ORF2 |
| 8348 | chr8: 143751986: +>chr8: 143762745: + | chr8: 143751986: +: MLT1D-int > chr8: 143762745: +: ENST00000301258/ORF2 |
| 8349 | chr12: 120635892: −>chr12: 120635265: − | chr12: 120635892: −: MIR > chr12: 120635265: −: ENST00000550856/ORF2 |
| 8350 | chr12: 120635892: −>chr12: 120635265: − | chr12: 120635892: −: MIR > chr12: 120635265: −: ENST00000392514/ORF2 |
| 8351 | chr12: 120635892: −>chr12: 120635265: − | chr12: 120635892: −: MIR > chr12: 120635265: −: ENST00000546990/ORF2 |
| 8352 | chr12: 120635892: −>chr12: 120635265: − | chr12: 120635892: −: MIR > chr12: 120635265: −: ENST00000547211/ORF2 |
| 8353 | chr6: 42019877: +>chr6: 42023269: + | chr6: 42019877: +: MIRb > chr6: 42023269: +: ENST00000372978/ORF3 |
| 8354 | chr6: 42019877: +>chr6: 42023269: + | chr6: 42019877: +: MIRb > chr6: 42023269: +: ENST00000472818/ORF3 |
| 8355 | chr2: 64327532: −>chr2: 64324411: − | chr2: 64327532: −: ENST00000358912 > chr2: 64324411: −Tigger15a/ORF1 |
| 8356 | chr7: 21979880: −>chr7: 21956512: − | chr7: 21979880: −: MLT1I > chr7: 21956512: −: ENST00000406877/ORF3 |
| 8357 | chr1: 168203452: +>chr1: 168204339: + | chr1: 168203452: +: AluSc > chr1: 168204339: +: ENST00000271375/ORF3 |
| 8358 | chr8: 41520137: −>chr8: 41519459: − | chr8: 41520137: −: L2c > chr8: 41519459: −: ENST00000522231/ORF1 |
| 8359 | chr8: 41520137: −>chr8: 41519459: − | chr8: 41520137: −: L2c > chr8: 41519459: −: ENST00000289734/ORF1 |
| 8360 | chr8: 41520137: −>chr8: 41519459: − | chr8: 41520137: −: L2c > chr8: 41519459: −: ENST00000347528/ORF1 |
| 8361 | chr3: 45018242: +>chr3: 45030632: + | chr3: 45018242: +: MIRc > chr3: 45030632: +: ENST00000265564/ORF2 |
| 8362 | chr22: 24200216: +>chr22: 24200767: + | chr22: 24200216: +: ENST00000436643 > chr22: 24200767: +: L2a/ORF1 |
| 8363 | chr5: 149907179: +>chr5: 149907366: + | chr5: 149907179: +: MIR > chr5: 149907366: +: ENST00000523767/ORF3 |
| 8364 | chr9: 133984764: +>chr9: 133986984: + | chr9: 133984764: +: AluSz6 > chr9: 133986984: +: ENST00000372314/ORF1 |
| 8365 | chr9: 133984764: +>chr9: 133986984: + | chr9: 133984764: +: AluSz6 > chr9: 133986984: +: ENST00000372309/ORF1 |
| 8366 | chr2: 38824403: −>chr2: 38818790: − | chr2: 38824403: −: L3 > chr2: 38818790: −: ENST00000449105/ORF1 |
| 8367 | chr6: 13699751: −>chr6: 13697128: − | chr6: 13699751: −: Tigger4a > chr6: 13697128: −: ENST00000011619/ORF3 |
| 8368 | chr1: 236885705: +>chr1: 236889233: + | chr1: 236885705: +: AluSg > chr1: 236889233: +: ENST00000542672/ORF3 |
| 8369 | chr1: 236885705: +>chr1: 236889233: + | chr1: 236885705: +: AluSg > chr1: 236889233: +: ENST00000366578/ORF3 |
| 8370 | chr12: 102569444: +>chr12: 102571636: + | chr12: 102569444: +: ENST00000327680 > chr12: 102571636: +: L2c/ORF1 |
| 8371 | chr12: 102569444: +>chr12: 102571636: + | chr12: 102569444: +: ENST00000358383 > chr12: 102571636: +: L2c/ORF1 |
| 8372 | chr12: 102569444: +>chr12: 102571636: + | chr12: 102569444: +: ENST00000541394 > chr12: 102571636: +: L2c/ORF1 |
| 8373 | chr10: 4884696: +>chr10: 4915406: + | chr10: 4884696: +: ENST00000474119 > chr10: 4915406: +: THE1B/ORF1 |
| 8374 | chr10: 4884696: +>chr10: 4915406: + | chr10: 4884696: +: ENST00000463345 > chr10: 4915406: +: THE1B/ORF1 |
| 8375 | chr10: 4884696: +>chr10: 4915406: + | chr10: 4884696: +: ENST00000532248 > chr10: 4915406: +: THE1B/ORF1 |
| 8376 | chr10: 4884696: +>chr10: 4915406: + | chr10: 4884696: +: ENST00000345253 > chr10: 4915406: +: THE1B/ORF1 |
| 8377 | chr1: 21925216: −>chr1: 21924995: − | chr1: 21925216: −: L2c > chr1: 21924995: −ENST00000374761/ORF1 |
| 8378 | chr12: 94072848: +>chr12: 94209180: + | chr12: 94072848: +: ENST00000552983 > chr12: 94209180: +: MER20B/ORF1 |
| 8379 | chr15: 89430657: −>chr15: 89430576: − | chr15: 89430657: −: L2b > chr15: 89430576: −: ENST00000562889/ORF1 |
| 8380 | chr2: 224804247: −>chr2: 224782727: − | chr2: 224804247: −: THE1B > chr2: 224782727: −ENST00000429915/ORF2 |
| 8381 | chr2: 224804247: −>chr2: 224782727: − | chr2: 224804247: −: THE1B > chr2: 224782727: −: ENST00000233055/ORF2 |
| 8382 | chr12: 16054613: +>chr12: 16055851: + | chr12: 16054613: +: AluSx1 > chr12: 16055851: +: ENST00000538352/ORF3 |
| 8383 | chr21: 45222268: +>chr21: 45240407: + | chr21: 45222268: +: ENST00000497547 > chr21: 45240407: +: MLT1C/ORFI |
| 8384 | chr15: 63336351: +>chr15: 63342246: + | chr15: 63336351: +: ENST00000559831 > chr15: 63342246: +: MIR/ORF1 |
| 8385 | chr15: 63342340: +>chr15: 63349184: + | chr15: 63342340: +: MIR > chr15: 63349184: +: ENST00000288398/ORF2 |
| 8386 | chr15: 63336351: +>chr15: 63342246: + | chr15: 63336351: +: ENST00000288398 > chr15: 63342246: +: MIR/ORF1 |
| 8387 | chr15: 63336351: +>chr15: 63342246: + | chr15: 63336351: +: ENST00000357980 > chr15: 63342246: +: MIR/ORF1 |

[0541] The second set of results comes from proteome profiles for 375 cell lines in The Cancer Cell Line Encyclopedia (CCLE) collected using TMT 10-plex reagent and SPS-MS3 acquisition. Further information about the origin and characteristics of the samples are available in the following publication: Nusinow D P, Szpyt J, Ghandi M, Rose C M, McDonald E R, Kalocsay M, Jané-Valbuena J, Gelfand E, Schweppe D K, Jedrychowski M, Golji J, Porter D A, Rejtar T, Wang Y K, Kryukov G V, Stegmeier F, Erickson B K, Garraway L A, Sellers W R, Gygi S P. Quantitative Proteomics of the Cancer Cell Line Encyclopedia. Cell. 2020 Jan. 23; 180 (2): 387-402.e16. The raw files have all been uploaded to the MassIVE repository at UCSD.

TABLE 13

| SEQ ID | chimeric_id | chimeric_id_tx_orf |
|---|---|---|
| 8388 | chr20: 34315958: −>chr20: 34313077: − | chr20: 34315958: −: AluSx > chr20: 34313077: −: ENST00000448303/ORF2 |
| 8389 | chr20: 34315958: −>chr20: 34313077: − | chr20: 34315958: −: AluSx > chr20: 34313077: −: ENST00000361162/ORF2 |
| 8390 | chr20: 34315958: −>chr20: 34313077: − | chr20: 34315958: −: AluSx > chr20: 34313077: −: ENST00000253363/ORF2 |
| 8391 | chr20: 34315958: −>chr20: 34313077: − | chr20: 34315958: −: AluSx > chr20: 34313077: −: ENST00000374038/ORF2 |
| 8392 | chr20: 34315958: −>chr20: 34313077: − | chr20: 34315958: −: AluSx > chr20: 34313077: −: ENST00000434927/ORF2 |
| 8393 | chr20: 34315958: −>chr20: 34313077: − | chr20: 34315958: −: AluSx > chr20: 34313077: −: ENST00000338163/ORF2 |
| 8394 | chr16: 21987564: +>chr16: 21988399: + | chr16: 21987564: +: ENST00000268379 > chr16: 21988399: +: AluJr/ORF1 |
| 8395 | chr8: 141727697: −>chr8: 141723228: − | chr8: 141727697: −: ENST00000521986 > chr8: 141723228: −: Charlie1a/ORF1 |
| 8396 | chr8: 141727697: −>chr8: 141723228: − | chr8: 141727697: −: ENST00000522684 > chr8: 141723228: −: Charlie1a/ORF1 |
| 8397 | chr8: 141727697: −>chr8: 141723228: − | chr8: 141727697: −: ENST00000538769 > chr8: 141723228: −: Charlie1a/ORF1 |
| 8398 | chr8: 141727697: −>chr8: 141723228: − | chr8: 141727697: −: ENST00000523539 > chr8: 141723228: −: Charlie1a/ORF1 |
| 8399 | chr8: 141727697: −>chr8: 141723228: − | chr8: 141727697: −: ENST00000519465 > chr8: 141723228: −: Charlie1a/ORF1 |
| 8400 | chr8: 141727697: −>chr8: 141723228: − | chr8: 141727697: −: ENST00000517887 > chr8: 141723228: −: Charlie1a/ORF1 |
| 8401 | chr8: 141727697: −>chr8: 141723228: − | chr8: 141727697: −: ENST00000430260 > chr8: 141723228: −: Charlie1a/ORF1 |
| 8402 | chr8: 72942008: +>chr8: 72964774: + | chr8: 72942008: +: Tigger5 > chr8: 72964774: +: ENST00000524152/ORF1 |
| 8403 | chr8: 38697785: +>chr8: 38698832: + | chr8: 38697785: +: ENST00000518415 > chr8: 38698832: +: MER82/ORF1 |
| 8404 | chr8: 38697785: +>chr8: 38698832: + | chr8: 38697785: +: ENST00000519416 > chr8: 38698832: +: MER82/ORF1 |
| 8405 | chr8: 38697785: +>chr8: 38698832: + | chr8: 38697785: +: ENST00000520973 > chr8: 38698832: +: MER82/ORF1 |
| 8406 | chr8: 38697785: +>chr8: 38698832: + | chr8: 38697785: +: ENST00000317827 > chr8: 38698832: +: MER82/ORF1 |
| 8407 | chr8: 38697785: +>chr8: 38698832: + | chr8: 38697785: +: ENST00000276520 > chr8: 38698832: +: MER82/ORF1 |
| 8408 | chr8: 38697785: +>chr8: 38698832: + | chr8: 38697785: +: ENST00000379931 > chr8: 38698832: +: MER82/ORF1 |
| 8409 | chr8: 38697785: +>chr8: 38698832: + | chr8: 38697785: +: ENST00000443286 > chr8: 38698832: +: MER82/ORF1 |
| 8410 | chr8: 38697785: +>chr8: 38698832: + | chr8: 38697785: +: ENST00000520611 > chr8: 38698832: +: MER82/ORF1 |
| 8411 | chr8: 38697785: +>chr8: 38698832: + | chr8: 38697785: +: ENST00000348567 > chr8: 38698832: +: MER82/ORF1 |
| 8412 | chr8: 38697785: +>chr8: 38698832: + | chr8: 38697785: +: ENST00000520615 > chr8: 38698832: +: MER82/ORF1 |
| 8413 | chr8: 38697785: +>chr8: 38698832: + | chr8: 38697785: +: ENST00000330691 > chr8: 38698832: +: MER82/ORF1 |
| 8414 | chr2: 153400699: +>chr2: 153405535: + | chr2: 153400699: +: AluSq2 > chr2: 153405535: +: ENST00000288670/ORF1 |
| 8415 | chr16: 29912241: +>chr16: 29912873: + | chr16: 29912241: +: G-rich > chr16: 29912873: +: ENST00000308748/ORF2 |
| 8416 | chr2: 99224656: −>chr2: 99220650: − | chr2: 99224656: −: MIRb > chr2: 99220650: −: ENST00000409997/ORF1 |
| 8417 | chr2: 99224656: −>chr2: 99220650: − | chr2: 99224656: −: MIRb > chr2: 99220650: −: ENST00000328709/ORF1 |
| 8418 | chr18: 244302: −>chr18: 226901: − | chr18: 244302: −: L1MEg > chr18: 226901: −: ENST00000579891/ORF3 |
| 8419 | chr18: 244302: −>chr18: 226901: − | chr18: 244302: −: L1MEg > chr18: 226901: −: ENST00000261600/ORF3 |
| 8420 | chr12: 110005159: −>chr12: 110002981: − | chr12: 110005159: −: MIRb > chr12: 110002981: −: ENST00000537496/ORF3 |
| 8421 | chr12: 110005159: −>chr12: 110004972: − | chr12: 110005159: −: MIRb > chr12: 110004972: −: ENST00000503497/ORF3 |
| 8422 | chr12: 110005159: −>chr12: 110002981: − | chr12: 110005159: −: MIRb > chr12: 110002981: −: ENST00000545712/ORF3 |
| 8423 | chr12: 7125578: −>chr12: 7120720: − | chr12: 7125578: −: ENST00000535479 > chr12: 7120720: −: L2b/ORF1 |
| 8424 | chr15: 49600974: +>chr15: 49611801: + | chr15: 49600974: +: L3 > chr15: 49611801: +: ENST00000327171/ORF3 |
| 8425 | chr21: 43290029: −>chr21: 43280481: − | chr21: 43290029: −: L1MD1 > chr21: 43280481: −: ENST00000398548/ORF2 |
| 8426 | chr6: 17837109: −>chr6: 17835895: − | chr6: 17837109: −: ENST00000378816 > chr6: 17835895: −: L2c/ORF1 |
| 8427 | chr6: 17837109: −>chr6: 17835895: − | chr6: 17837109: −: ENST00000378814 > chr6: 17835895: −: L2c/ORF1 |
| 8428 | chr3: 185370866: −>chr3: 185369956: − | chr3: 185370866: −: AluSx1 > chr3: 185369956: −: ENST00000382199/ORF2 |
| 8429 | chr1: 64036799: +>chr1: 64048982: + | chr1: 64036799: +: ENST00000371088 > chr1: 64048982: +: Tigger2/ORF1 |
| 8430 | chr13: 44432917: −>chr13: 44413224: − | chr13: 44432917: −: ENST00000444614 > chr13: 44413224: −: LTR35B/ORF1 |
| 8431 | chr22: 42085308: +>chr22: 42089467: + | chr22: 42085308: +: AluSx1 > chr22: 42089467: +: ENST00000402966/ORF1 |
| 8432 | chr4: 2886393: +>chr4: 2888303: + | chr4: 2886393: +: ENST00000264758 > chr4: 2888303: +: L2a/ORF1 |
| 8433 | chr15: 79649214: +>chr15: 79703742: + | chr15: 79649214: +: L1ME4a > chr15: 79703742: +: ENST00000424155/ORF2 |
| 8434 | chr1: 22263648: −>chr1: 22224962: − | chr1: 22263648: −: ENST00000374695 > chr1: 22224962: −: MER5A/ORF1 |
| 8435 | chr8: 72942008: +>chr8: 72964774: + | chr8: 72942008: +: Tigger5 > chr8: 72964774: +: ENST00000524152/ORF1 |
| 8436 | chrX: 57620887: +>chrX: 57667223: + | chrX: 57620887: +: ENST00000374888 > chrX: 57667223: +: THE1A-int/ORF1 |
| 8437 | chr1: 36637320: +>chr1: 36638065: + | chr1: 36637320: +: AluSp > chr1: 36638065: +: ENST00000429533/ORF3 |
| 8438 | chr1: 36637320: +>chr1: 36638065: + | chr1: 36637320: +: AluSp > chr1: 36638065: +: ENST00000530729/ORF3 |
| 8439 | chr6: 147981955: +>chr6: 148058453: + | chr6: 147981955: +: MSTA > chr6: 148058453: +: ENST00000566741/ORF3 |
| 8440 | chr17: 43475315: −>chr17: 43474814: − | chr17: 43475315: −: ENST00000532891 > chr17: 43474814: −: L3/ORF1 |
| 8441 | chr17: 43475315: −>chr17: 43474814: − | chr17: 43475315: −: ENST00000528384 > chr17: 43474814: −: L3/ORF1 |
| 8442 | chr17: 43475315: −>chr17: 43474814: − | chr17: 43475315: −: ENST00000532038 > chr17: 43474814: −: L3/ORF1 |
| 8443 | chr17: 43475315: −>chr17: 43474814: − | chr17: 43475315: −: ENST00000428638 > chr17: 43474814: −: L3/ORF1 |
| 8444 | chr17: 43475315: −>chr17: 43474814: − | chr17: 43475315: −: ENST00000376922 > chr17: 43474814: −: L3/ORF1 |
| 8445 | chr17: 43475315: −>chr17: 43474814: − | chr17: 43475315: −: ENST00000442348 > chr17: 43474814: −: L3/ORF1 |
| 8446 | chr3: 128828867: −>chr3: 128814012: − | chr3: 128828867: −: AluJo > chr3: 128814012: −: ENST00000418265/ORF3 |
| 8447 | chr3: 128828867: −>chr3: 128814012: − | chr3: 128828867: −: AluJo > chr3: 128814012: −: ENST00000315150/ORF3 |
| 8448 | chr3: 128828867: −>chr3: 128814012: − | chr3: 128828867: −: AluJo > chr3: 128814012: −: ENST00000476465/ORF3 |
| 8449 | chr3: 128828867: −>chr3: 128814012: − | chr3: 128828867: −: AluJo > chr3: 128814012: −: ENST00000457077/ORF3 |
| 8450 | chr20: 42212014: +>chr20: 42213492: + | chr20: 42212014: +: MIRc > chr20: 42213492: +: ENST00000373100/ORF1 |
| 8451 | chr7: 107256834: +>chr7: 107258773: + | chr7: 107256834: +: LTR33A > chr7: 107258773: +: ENST00000445771/ORF3 |
| 8452 | chr7: 107256834: +>chr7: 107258773: + | chr7: 107256834: +: LTR33A > chr7: 107258773: +: ENST00000005259/ORF3 |
| 8453 | chr6: 17835789: −>chr6: 17834302: − | chr6: 17835789: −: MIR > chr6: 17834302: −: ENST00000378843/ORF1 |
| 8454 | chr6: 17835789: −>chr6: 17834302: − | chr6: 17835789: −: MIR > chr6: 17834302: −: ENST00000378826/ORF1 |
| 8455 | chr6: 17835789: −>chr6: 17834302: − | chr6: 17835789: −: MIR > chr6: 17834302: −: ENST00000378814/ORF1 |
| 8456 | chr6: 17835789: −>chr6: 17834302: − | chr6: 17835789: −: MIR > chr6: 17834302: −: ENST00000259711/ORF1 |
| 8457 | chr9: 128421519: −>chr9: 128420078: − | chr9: 128421519: −: MIR > chr9: 128420078: −: ENST00000373498/ORF1 |
| 8458 | chr9: 128421519: −>chr9: 128420078: − | chr9: 128421519: −: MIR > chr9: 128420078: −: ENST00000350766/ORF1 |
| 8459 | chr9: 128421519: −>chr9: 128420078: − | chr9: 128421519: −: MIR > chr9: 128420078: −: ENST00000373496/ORF1 |
| 8460 | chr9: 128421519: −>chr9: 128420078: − | chr9: 128421519: −: MIR > chr9: 128420078: −: ENST00000373511/ORF1 |
| 8461 | chr9: 128421519: −>chr9: 128420078: − | chr9: 128421519: −: MIR > chr9: 128420078: −: ENST00000394060/ORF1 |
| 8462 | chr6: 74228940: −>chr6: 74213929: − | chr6: 74228940: −: ENST00000316292 > chr6: 74213929: −: AluJb/ORF1 |
| 8463 | chr12: 44164907: +>chr12: 44165023: + | chr12: 44164907: +: MSTD > chr12: 44165023: +: ENST00000550616/ORF1 |
| 8464 | chr12: 112149997: +>chr12: 112150302: + | chr12: 112149997: +: LTR10C > chr12: 112150302: +: ENST00000552706/ORF3 |
| 8465 | chr12: 112149997: +>chr12: 112150302: + | chr12: 112149997: +: LTR10C > chr12: 112150302: +: ENST00000455480/ORF3 |
| 8466 | chr12: 112149997: +>chr12: 112150302: + | chr12: 112149997: +: LTR10C > chr12: 112150302: +: ENST00000549590/ORF3 |
| 8467 | chr2: 238991995: +>chr2: 238992535: + | chr2: 238991995: +: ENST00000433750 > chr2: 238992535: +: L1MDa/ORF1 |
| 8468 | chr16: 89607754: +>chr16: 89611056: + | chr16: 89607754: +: L1MD2 > chr16: 89611056: +: ENST00000268704/ORF3 |
| 8469 | chr7: 72720556: −>chr7: 72719094: − | chr7: 72720556: −: L2c > chr7: 72719094: −: ENST00000438747/ORF1 |
| 8470 | chr7: 72720556: −>chr7: 72719094: − | chr7: 72720556: −: L2c > chr7: 72719094: −: ENST00000455763/ORF1 |
| 8471 | chr7: 72720556: −>chr7: 72719094: − | chr7: 72720556: −: L2c > chr7: 72719094: −: ENST00000310326/ORF1 |
| 8472 | chr7: 72720556: −>chr7: 72719094: − | chr7: 72720556: −: L2c > chr7: 72719094: −: ENST00000428206/ORF1 |
| 8473 | chr3: 15058779: +>chr3: 15062260: + | chr3: 15058779: +: L2c > chr3: 15062260: +: ENST00000425241/ORF3 |
| 8474 | chr22: 32787416: −>chr22: 32784086: − | chr22: 32787416: −: AluSx1 > chr22: 32784086: −: ENST00000216038/ORF3 |
| 8475 | chr3: 40555431: +>chr3: 40557351: + | chr3: 40555431: +: LTR13 > chr3: 40557351: +: ENST00000420891/ORF3 |
| 8476 | chr9: 116123017: +>chr9: 116123330: + | chr9: 116123017: +: ENST00000374183 > chr9: 116123330: +: MER31A/ORF1 |
| 8477 | chr18: 8708134: +>chr18: 8718422: + | chr18: 8708134: +: L2c > chr18: 8718422: +: ENST00000306329/ORF3 |
| 8478 | chr7: 102421195: +>chr7: 102427782: + | chr7: 102421195: +: LIPA4 > chr7: 102427782: +: ENST00000409231/ORF2 |
| 8479 | chr17: 42188097: −>chr17: 42182463: − | chr17: 42188097: −: ENST00000588703 > chr17: 42182463: −: MIR3/ORF1 |
| 8480 | chr17: 42188097: −>chr17: 42182463: − | chr17: 42188097: −: ENST00000393622 > chr17: 42182463: −: MIR3/ORF1 |
| 8481 | chr17: 42188097: −>chr17: 42182463: − | chr17: 42188097: −: ENST00000591714 > chr17: 42182463: −: MIR3/ORF1 |
| 8482 | chr17: 42188097: −>chr17: 42182463: − | chr17: 42188097: −: ENST00000225983 > chr17: 42182463: −: MIR3/ORF1 |
| 8483 | chr3: 101520833: +>chr3: 101524929: + | chr3: 101520833: +: ENST00000273347 > chr3: 101524929: +: L2a/ORF1 |
| 8484 | chr16: 4667729: +>chr16: 4700366: + | chr16: 4667729: +: AluJb > chr16: 4700366: +: ENST00000262370/ORF3 |
| 8485 | chr19: 1045618: +>chr19: 1046229: + | chr19: 1045618: +: AluJb > chr19: 1046229: +: ENST00000263094/ORF2 |
| 8486 | chr5: 94876747: −>chr5: 94876534: − | chr5: 94876747: −: AluSp > chr5: 94876534: −: ENST00000358746/ORF2 |
| 8487 | chr5: 94876747: −>chr5: 94876534: − | chr5: 94876747: −: AluSp > chr5: 94876534: −: ENST00000514952/ORF2 |
| 8488 | chrX: 138072670: −>chrX: 137791090: − | chrX: 138072670: −: THE1B > chrX: 137791090: −: ENST00000315930/ORF2 |
| 8489 | chr18: 74574245: +>chr18: 74580641: + | chr18: 74574245: +: L1MDa > chr18: 74580641: +: ENS T00000543926/ORF2 |
| 8490 | chr18: 74574245: +>chr18: 74580641: + | chr18: 74574245: +: L1MDa > chr18: 74580641: +: ENS T00000320610/ORF2 |
| 8491 | chr18: 74574245: +>chr18: 74580641: + | chr18: 74574245: +: L1MDa > chr18: 74580641: +: ENS T00000579322/ORF2 |
| 8492 | chr10: 90707015: −>chr10: 90706810: − | chr10: 90707015: − : ENST00000224784 > chr10: 90706810: −: LIPA4/ORF1 |
| 8493 | chr17: 40046175: −>chr17: 40043956: − | chr17: 40046175: −: AluSq2 > chr17: 40043956: −: ENST00000352035/ORF3 |
| 8494 | chr19: 20025631: +>chr19: 20026089: + | chr19: 20025631: +: MER5A1 > chr19: 20026089: +: EN ST00000591366/ORF1 |
| 8495 | chr19: 20025631: +>chr19: 20026089: + | chr19: 20025631: +: MER5A1 > chr19: 20026089: +: EN ST00000592160/ORF1 |
| 8496 | chr19: 20025631: +>chr19: 20026089: + | chr19: 20025631: +: MER5A1 > chr19: 20026089: +: EN ST00000586021/ORF1 |
| 8497 | chr19: 20025631: +>chr19: 20026089: + | chr19: 20025631: +: MER5A1 > chr19: 20026089: +: EN ST00000343769/ORF1 |
| 8498 | chr13: 45576476: +>chr13: 45578440: + | chr13: 45576476: +: 7SLRNA > chr13: 45578440: +: EN ST00000379151/ORF3 |
| 8499 | chr16: 90158141: −>chr16: 90141431: − | chr16: 90158141: −: THE1B > chr16: 90141431: −: ENST00000449207/ORF2 |
| 8500 | chr19: 54502735: +>chr19: 54515205: + | chr19: 54502735: +: MIR3 > chr19: 54515205: +: ENST 00000352529/ORF3 |
| 8501 | chr3: 93715528: +>chr3: 93716091: + | chr3: 93715528: +: ENST00000475206 > chr3: 937160 91: +: MERIA/ORF1 |
| 8502 | chr3: 93715528: +>chr3: 93716091: + | chr3: 93715528: +: ENST00000478400 > chr3: 937160 91: +: MER1A/ORF1 |
| 8503 | chr3: 93715528: +>chr3: 93716091: + | chr3: 93715528: +: ENST00000335438 > chr3: 937160 91: +: MER1A/ORF1 |
| 8504 | chr15: 79168112: +>chr15: 79170555: + | chr15: 79168112: +: AluSx1 > chr15: 79170555: +: ENS T00000331268/ORF1 |
| 8505 | chr15: 79168112: +>chr15: 79170555: + | chr15: 79168112: +: AluSx1 > chr15: 79170555: +: ENS T00000558746/ORF1 |
| 8506 | chr15: 79168112: +>chr15: 79170555: + | chr15: 79168112: +: AluSx1 > chr15: 79170555: +: ENS T00000560422/ORF1 |
| 8507 | chr15: 79168112: +>chr15: 79170555: + | chr15: 79168112: +: AluSx1 > chr15: 79170555: +: ENS T00000379535/ORF1 |
| 8508 | chr11: 44960717: −>chr11: 44959917: − | chr11: 44960717: −: L2b > chr11: 44959917: −: ENST00000525138/ORF3 |
| 8509 | chr14: 97307963: +>chr14: 97312432: + | chr14: 97307963: +: AluSx > chr14: 97312432: +: ENST 00000216639/ORF1 |
| 8510 | chr10: 6010739: −>chr10: 6008302: − | chr10: 6010739: −: L1MCc > chr10: 6008302: −: ENST00000379977/ORF2 |
| 8511 | chr7: 44883388: −>chr7: 44882953: − | chr7: 44883388: −: AluSz > chr7: 44882953: −: ENST00000349299/ORF3 |
| 8512 | chr7: 44883388: −>chr7: 44882953: − | chr7: 44883388: −: AluSz > chr7: 44882953: −: ENST00000446531/ORF3 |
| 8513 | chr7: 44883388: −>chr7: 44882953: − | chr7: 44883388: −: AluSz > chr7: 44882953: −: ENST00000437072/ORF3 |
| 8514 | chr7: 44883388: −>chr7: 44882953: − | chr7: 44883388: −: AluSz > chr7: 44882953: −: ENST00000222690/ORF3 |
| 8515 | chr7: 44883388: −>chr7: 44882953: − | chr7: 44883388: −: AluSz > chr7: 44882953: −: ENST00000308153/ORF3 |
| 8516 | chr7: 44883388: −>chr7: 44882953: − | chr7: 44883388: −: AluSz > chr7: 44882953: −: ENST00000381124/ORF3 |
| 8517 | chr9: 130924301: +>chr9: 130925722: + | chr9: 130924301: +: MIR3 > chr9: 130925722: +: ENST00000372994/ORF2 |
| 8518 | chr9: 15506559: −>chr9: 15492223: − | chr9: 15506559: −: ENST00000380738 > chr9: 15492223: −: THEID-int/ORF1 |
| 8519 | chr17: 78263365: +>chr17: 78263458: + | chr17: 78263365: +: AluSq > chr17: 78263458: +: ENST00000456466/ORF2 |
| 8520 | chr17: 78263365: +>chr17: 78263458: + | chr17: 78263365: +: AluSq > chr17: 78263458: +: ENST00000319921/ORF2 |
| 8521 | chr17: 78263365: +>chr17: 78263458: + | chr17: 78263365: +: AluSq > chr17: 78263458: +: ENST00000508628/ORF2 |
| 8522 | chr8: 103282996: −>chr8: 103282411: − | chr8: 103282996: −: AluSx > chr8: 103282411: −: ENST00000520539/ORF1 |
| 8523 | chr1: 53346501: +>chr1: 53347143: + | chr1: 53346501: +: MLT1E1A > chr1: 53347143: +: ENST00000371532/ORF1 |
| 8524 | chr3: 185370866: −>chr3: 185369956: − | chr3: 185370866: −: AluSx1 > chr3: 185369956: −: ENST00000382199/ORF3 |
| 8525 | chr11: 64643083: −>chr11: 64641990: − | chr11: 64643083: −: MamSINE1 > chr11: 64641990: −: ENST00000411683/ORF1 |
| 8526 | chr2: 99224660: −>chr2: 99220654: − | chr2: 99224660: −: MIRb > chr2: 99220654: −: ENST00000409997/ORF1 |
| 8527 | chr2: 99224660: −>chr2: 99220654: − | chr2: 99224660: −: MIRb > chr2: 99220654: −: ENST00000328709/ORF1 |
| 8528 | chr5: 113769590: +>chr5: 113798746: + | chr5: 113769590: +: LTR12C > chr5: 113798746: +: ENST00000512097/ORF1 |
| 8529 | chr20: 44442103: +>chr20: 44442603: + | chr20: 44442103: +: ENST00000405520 > chr20: 44442603: +: AluSz6/ORF1 |
| 8530 | chr17: 17735071: −>chr17: 17723835: − | chr17: 17735071: −: MIR3 > chr17: 17723835: −: ENST00000338854/ORF2 |
| 8531 | chr12: 63961380: −>chr12: 63954442: − | chr12: 63961380: −: L1ME1 > chr12: 63954442: −: ENST00000324472/ORF3 |
| 8532 | chr17: 76700853: −>chr17: 76698686: − | chr17: 76700853: −: AluJr4 > chr17: 76698686: −: ENST00000591455/ORF1 |
| 8533 | chr2: 99224633: −>chr2: 99220654: − | chr2: 99224633: −: MIRb > chr2: 99220654: −: ENST00000328709/ORF1 |
| 8534 | chr2: 99224633: −>chr2: 99220654: − | chr2: 99224633: −: MIRb > chr2: 99220654: −: ENST00000409997/ORF1 |
| 8535 | chr10: 28824988: +>chr10: 28872328: + | chr10: 28824988: +: AluSx1 > chr10: 28872328: +: ENST00000375664/ORF1 |
| 8536 | chr10: 28824988: +>chr10: 28872328: + | chr10: 28824988: +: AluSx1 > chr10: 28872328: +: ENST00000448193/ORF1 |
| 8537 | chr17: 46134864: +>chr17: 46165707: + | chr17: 46134864: +: ENST00000583210 > chr17: 46165707: +: AluSg/ORF1 |
| 8538 | chr9: 116859581: −>chr9: 116858787: − | chr9: 116859581: −: ENST00000468460 > chr9: 116858787: −: L2c/ORF1 |
| 8539 | chr16: 82201145: −>chr16: 82197799: − | chr16: 82201145: −: MERIA > chr16: 82197799: −: ENST00000258169/ORF3 |
| 8540 | chr1: 116206078: +>chr1: 116206282: + | chr1: 116206078: +: Tigger15a > chr1: 116206282: +: ENST00000355485/ORF2 |
| 8541 | chr12: 72301769: +>chr12: 72307606: + | chr12: 72301769: +: AluSx > chr12: 72307606: +: ENST00000550746/ORF3 |
| 8542 | chr3: 149581921: +>chr3: 149589816: + | chr3: 149581921: +: MSTB1 > chr3: 149589816: +: ENST00000470151/ORF2 |
| 8543 | chr8: 128749923: +>chr8: 128750494: + | chr8: 128749923: +: G-rich > chr8: 128750494: +: ENST00000377970/ORF3 |
| 8544 | chr2: 37520065: −>chr2: 37518142: − | chr2: 37520065: −: AluJb > chr2: 37518142: −: ENST00000443187/ORF2 |
| 8545 | chr2: 37520065: −>chr2: 37518142: − | chr2: 37520065: −: AluJb > chr2: 37518142: −: ENST00000379066/ORF2 |
| 8546 | chr5: 179238682: +>chr5: 179250858: + | chr5: 179238682: +: MER61-int > chr5: 179250858: +: ENST00000376929/ORF2 |
| 8547 | chr5: 1475076: −>chr5: 1474800: − | chr5: 1475076: −: Tigger1 > chr5: 1474800: − ENST00000475622/ORF2 |
| 8548 | chr12: 22831248: +>chr12: 22837417: + | chr12: 22831248: +: L2 > chr12: 22837417: +: ENST000 00538218/ORF2 |
| 8549 | chr5: 145153908: −>chr5: 145144563: − | chr5: 145153908: −: MIRb > chr5: 145144563: −: ENST00000334744/ORF2 |
| 8550 | chr20: 49307663: −>chr20: 49307455: − | chr20: 49307663: −: ENST00000535356 > chr20: 49307455: −: MIR3/ORF1 |
| 8551 | chr10: 102711867: +>chr10: 102716208: + | chr10: 102711867: +: AluSz > chr10: 102716208: +: EN ST00000238961/ORF1 |
| 8552 | chr9: 119602892: −>chr9: 119583062: − | chr9: 119602892: −: SVA_D > chr9: 119583062: −: ENST00000373996/ORF1 |
| 8553 | chr2: 113956803: +>chr2: 113966557: + | chr2: 113956803: +: ENST00000245796 > chr2: 11396 6557: +: L4/ORF1 |
| 8554 | chr2: 113956803: +>chr2: 113966557: + | chr2: 113956803: +: ENST00000441564 > chr2: 11396 6557: +: L4/ORF1 |
| 8555 | chr6: 18260552: −>chr6: 18258636: − | chr6: 18260552: −: MER2 > chr6: 18258636: −: ENST00000397239/ORF2 |
| 8556 | chr6: 18260552: −>chr6: 18258636: − | chr6: 18260552: −: MER2 > chr6: 18258636: −: ENST00000515742/ORF2 |
| 8557 | chr6: 18260552: −>chr6: 18258636: − | chr6: 18260552: −: MER2 > chr6: 18258636: −: ENST00000505224/ORF2 |
| 8558 | chr22: 31947110: +>chr22: 31952928: + | chr22: 31947110: +: L2 > chr22: 31952928: +: ENST000 00540643/ORF3 |
| 8559 | chr22: 31947110: +>chr22: 31952928: + | chr22: 31947110: +: L2 > chr22: 31952928: +: ENST000 00524296/ORF3 |
| 8560 | chr22: 31947110: +>chr22: 31952928: + | chr22: 31947110: +: L2 > chr22: 31952928: +: ENST000 00450787/ORF3 |
| 8561 | chr22: 31947110: +>chr22: 31952928: + | chr22: 31947110: +: L2 > chr22: 31952928: +: ENST00000443326/ORF3 |
| 8562 | chr17: 62609987: −>chr17: 62602758: − | chr17: 62609987: −: MERIA > chr17: 62602758: −: ENST00000578386/ORF3 |
| 8563 | chr17: 45356073: +>chr17: 45360720: + | chr17: 45356073: +: MER1B > chr17: 45360720: +: ENST00000435993/ORF2 |
| 8564 | chr17: 45356073: +>chr17: 45360720: + | chr17: 45356073: +: MER1B > chr17: 45360720: +: ENST00000571680/ORF2 |
| 8565 | chr17: 45356073: +>chr17: 45360720: + | chr17: 45356073: +: MER1B > chr17: 45360720: +: ENST00000559488/ORF2 |
| 8566 | chr17: 47441711: +>chr17: 47450375: + | chr17: 47441711: +: MSTD > chr17: 47450375: +: ENST00000576461/ORF3 |
| 8567 | chr6: 100379769: −>chr6: 100369131: − | chr6: 100379769: −: LIPA3 > chr6: 100369131: −: ENST00000281806/ORF3 |
| 8568 | chr3: 136005373: +>chr3: 136012598: + | chr3: 136005373: +: L2 > chr3: 136012598: +: ENST00000251654/ORF3 |
| 8569 | chr12: 42795298: +>chr12: 42835117: + | chr12: 42795298: +: MER1B > chr12: 42835117: +: ENST00000549190/ORF1 |
| 8570 | chr17: 38177572: −>chr17: 38176606: − | chr17: 38177572: −: MIRb > chr17: 38176606: −: ENST00000394126/ORF1 |
| 8571 | chr17: 38177572: −>chr17: 38176606: − | chr17: 38177572: −: MIRb > chr17: 38176606: −: ENST00000491466/ORF1 |
| 8572 | chr16: 29692733: +>chr16: 29705985: + | chr16: 29692733: +: Charlie4z > chr16: 29705985: +: ENST00000449759/ORF2 |
| 8573 | chr16: 29692733: +>chr16: 29705985: + | chr16: 29692733: +: Charlie4z > chr16: 29705985: +: ENST00000562473/ORF2 |
| 8574 | chr16: 29692733: +>chr16: 29705985: + | chr16: 29692733: +: Charlie4z > chr16: 29705985: +: ENST00000395384/ORF2 |
| 8575 | chr12: 110470515: +>chr12: 110471602: + | chr12: 110470515: +: L1ME3D > chr12: 110471602: +: ENST00000261739/ORF2 |
| 8576 | chr11: 74830434: +>chr11: 74873700: + | chr11: 74830434: +: LIPA4 > chr11: 74873700: +: ENST00000289575/ORF3 |
| 8577 | chr8: 74872000: −>chr8: 74871067: − | chr8: 74872000: −: ENST00000602840 > chr8: 74871067: −: Tigger3b/ORF1 |
| 8578 | chr1: 51218110: −>chr1: 51210447: − | chr1: 51218110: −: L1MEc > chr1: 51210447: −: ENST00000396153/ORF2 |
| 8579 | chr7: 99674926: −>chr7: 99674180: − | chr7: 99674926: −: ENST00000413658 > chr7: 99674180: −: AluSc8/ORF1 |
| 8580 | chr18: 12635061: −>chr18: 12628847: − | chr18: 12635061: −: ENST00000309836 > chr18: 12628847: −: LIPA6/ORF1 |
| 8581 | chr7: 121018964: −>chr7: 121018536: − | chr7: 121018964: −: ENST00000426156 > chr7: 121018536: −FRAM/ORF1 |
| 8582 | chr12: 95596369: −>chr12: 95566520: − | chr12: 95596369: −: FLAM C > chr12: 95566520: −: ENST00000343958/ORF3 |
| 8583 | chr6: 30629093: −>chr6: 30628019: − | chr6: 30629093: −: AluY > chr6: 30628019: −: ENST00000376437/ORF2 |
| 8584 | chr5: 68551355: +>chr5: 68551980: + | chr5: 68551355: +: ENST00000506563 > chr5: 68551980: +: AluJo/ORF1 |
| 8585 | chr18: 19147325: −>chr18: 19146167: − | chr18: 19147325: −: AluSz > chr18: 19146167: −: ENST00000269214/ORF3 |
| 8586 | chr6: 17835789: −>chr6: 17834302: − | chr6: 17835789: −: MIR > chr6: 17834302: −: ENST00000378843/ORF1 |
| 8587 | chr6: 17835789: −>chr6: 17834302: − | chr6: 17835789: −: MIR > chr6: 17834302: −: ENST00000378826/ORF1 |
| 8588 | chr6: 17835789: −>chr6: 17834302: − | chr6: 17835789: −: MIR > chr6: 17834302: −: ENST00000378814/ORF1 |
| 8589 | chr6: 17835789: −>chr6: 17834302: − | chr6: 17835789: −: MIR > chr6: 17834302: −: ENST00000259711/ORF1 |
| 8590 | chr4: 102117073: −>chr4: 102104428: − | chr4: 102117073: −: ENST00000512215 > chr4: 102104428: −: MLTIJ/ORF1 |
| 8591 | chr4: 102117073: −>chr4: 102104428: − | chr4: 102117073: −: ENST00000529324 > chr4: 102104428: −: MLTIJ/ORF1 |
| 8592 | chr10: 1100108: −>chr10: 1090111: − | chr10: 1100108: −: Tigger1 > chr10: 1090111: −: ENST00000381344/ORF1 |
| 8593 | chr9: 97177535: +>chr9: 97179629: + | chr9: 97177535: +: ENST00000428393 > chr9: 97179629: +: AluSp/ORF1 |
| 8594 | chr2: 131824664: −>chr2: 131813268: − | chr2: 131824664: −: THE1B > chr2: 131813268: −: ENST00000409185/ORF3 |
| 8595 | chr2: 131840150: −>chr2: 131829742: − | chr2: 131840150: −: ENST00000409185 > chr2: 131829742: −: AluSq2/ORF1 |
| 8596 | chr14: 71471132: +>chr14: 71476351: + | chr14: 71471132: +: MER1B > chr14: 71476351: +: ENST00000238570/ORF3 |
| 8597 | chr16: 2115231: +>chr16: 2115520: + | chr16: 2115231: +: AluY > chr16: 2115520: +: ENST00000401874/ORF1 |
| 8598 | chr16: 2115231: +>chr16: 2115520: + | chr16: 2115231: +: AluY > chr16: 2115520: +: ENST00000382538/ORF1 |
| 8599 | chr16: 2115231: +>chr16: 2115520: + | chr16: 2115231: +: AluY > chr16: 2115520: +: ENST00000219476/ORF1 |
| 8600 | chr16: 2115231: +>chr16: 2115520: + | chr16: 2115231: +: AluY > chr16: 2115520: +: ENST00000353929/ORF1 |
| 8601 | chr16: 2115231: +>chr16: 2115520: + | chr16: 2115231: +: AluY > chr16: 2115520: +: ENST00000350773/ORF1 |
| 8602 | chr14: 105335983: +>chr14: 105342593: + | chr14: 105335983: +: MLT1A1 > chr14: 105342593: +: ENST00000453495/ORF1 |
| 8603 | chr6: 34511797: −>chr6: 34511385: − | chr6: 34511797: −: ENST00000374037 > chr6: 34511385: −: L2a/ORF1 |
| 8604 | chr19: 53119971: −>chr19: 53097557: − | chr19: 53119971: −: ENST00000596930 > chr19: 53097557: −: SVA_D/ORF1 |
| 8605 | chr6: 3432328: −>chr6: 3416089: − | chr6: 3432328: −: MIRc > chr6: 3416089: −: ENST00000436008/ORF3 |
| 8606 | chr12: 69249761: −>chr12: 69236109: − | chr12: 69249761: −: AluSx1 > chr12: 69236109: −: ENST00000551897/ORF3 |
| 8607 | chr3: 10160654: +>chr3: 10167310: + | chr3: 10160654: +: Tigger2 > chr3: 10167310: +: ENST00000530758/ORF2 |
| 8608 | chr3: 10160654: +>chr3: 10167310: + | chr3: 10160654: +: Tigger2 > chr3: 10167310: +: ENST00000256463/ORF2 |
| 8609 | chr13: 113897987: +>chr13: 113898724: + | chr13: 113897987: +: L1MC5 > chr13: 113898724: +: ENST00000375441/ORF2 |
| 8610 | chr17: 1003877: −>chr17: 1001199: − | chr17: 1003877: −: ENST00000302538 > chr17: 1001199: −: MIRc/ORF1 |
| 8611 | chr17: 1003877: −>chr17: 1001199: − | chr17: 1003877: −: ENST00000570441 > chr17: 1001199: −: MIRc/ORF1 |
| 8612 | chr17: 1003877: −>chr17: 1001199: − | chr17: 1003877: −: ENST00000544583 > chr17: 1001199: −: MIRc/ORF1 |
| 8613 | chr17: 1003877: −>chr17: 1001199: − | chr17: 1003877: −: ENST00000291107 > chr17: 1001199: −: MIRc/ORF1 |
| 8614 | chr1: 222838358: +>chr1: 222838651: + | chr1: 222838358: +: AluJb > chr1: 222838651: +: ENST00000344922/ORF2 |
| 8615 | chr17: 25958330: +>chr17: 25965125: + | chr17: 25958330: +: ENST00000310394 > chr17: 25965125: +: L2a/ORF1 |
| 8616 | chr1: 193028315: −>chr1: 193022970: − | chr1: 193028315: −: ENST00000367455 > chr1: 193022970: −: L2c/ORF1 |
| 8617 | chr1: 193028315: −>chr1: 193022970: − | chr1: 193028315: −: ENST00000367450 > chr1: 193022970: −: L2c/ORF1 |
| 8618 | chr5: 132253438: −>chr5: 132240096: − | chr5: 132253438: −: AluSx > chr5: 132240096: −: ENST00000425658/ORF3 |
| 8619 | chr5: 132253438: −>chr5: 132240096: − | chr5: 132253438: −: AluSx > chr5: 132240096: −: ENST00000378595/ORF3 |
| 8620 | chr5: 132253438: −>chr5: 132240096: − | chr5: 132253438: −: AluSx > chr5: 132240096: −: ENST00000265343/ORF3 |
| 8621 | chr13: 41835827: −>chr13: 41835011: − | chr13: 41835827: −: MIR3 > chr13: 41835011: −: ENST00000379480/ORF1 |
| 8622 | chr1: 97187663: +>chr1: 97189120: + | chr1: 97187663: +: G-rich > chr1: 97189120: +: ENST00000609116/ORF3 |
| 8623 | chr22: 46193106: +>chr22: 46202839: + | chr22: 46193106: +: L1ME1 > chr22: 46202839: +: ENST00000381061/ORF1 |
| 8624 | chr7: 56052571: +>chr7: 56059164: + | chr7: 56052571: +: ENST00000446778 > chr7: 56059164: +: AluSp/ORF1 |
| 8625 | chr7: 56052571: +>chr7: 56059164: + | chr7: 56052571: +: ENST00000322090 > chr7: 56059164: +: AluSp/ORF1 |
| 8626 | chr7: 56052571: +>chr7: 56059164: + | chr7: 56052571: +: ENST00000437587 > chr7: 56059164: +: AluSp/ORF1 |
| 8627 | chr6: 129786434: +>chr6: 129788349: + | chr6: 129786434: +: ENST00000421865 > chr6: 129788349: +: LIPA17/ORF1 |
| 8628 | chr2: 43779972: −>chr2: 43779478: − | chr2: 43779972: −: L1MB8 > chr2: 43779478: −: ENST00000330266/ORF3 |
| 8629 | chr12: 86274547: +>chr12: 86276001: + | chr12: 86274547: +: AluY > chr12: 86276001: +: ENST00000551529/ORF1 |
| 8630 | chr7: 116555100: +>chr7: 116556114: + | chr7: 116555100: +: AluSz6 > chr7: 116556114: +: ENST00000361183/ORF3 |
| 8631 | chr3: 12604393: +>chr3: 12610374: + | chr3: 12604393: +: MER1A > chr3: 12610374: +: ENST00000448482/ORF2 |
| 8632 | chr3: 12604393: +>chr3: 12610374: + | chr3: 12604393: +: MERIA > chr3: 12610374: +: ENST00000170447/ORF2 |
| 8633 | chr2: 201751637: −>chr2: 201750495: − | chr2: 201751637: −: AluJo > chr2: 201750495: −: ENST00000286175/ORF3 |
| 8634 | chr7: 75083158: −>chr7: 75070925: − | chr7: 75083158: −: MLT1G1 > chr7: 75070925: −: ENST00000257665/ORF2 |
| 8635 | chr20: 1532337: −>chr20: 1530245: − | chr20: 1532337: −: ENST00000381621 > chr20: 1530245: −: L1MB7/ORF1 |
| 8636 | chr12: 79996543: −>chr12: 79990438: − | chr12: 79996543: −: AluJo > chr12: 79990438: −: ENST00000328827/ORF3 |
| 8637 | chr1: 6531548: −>chr1: 6531300: − | chr1: 6531548: −: ENST00000377748 > chr1: 6531300: −: MIRb/ORF1 |
| 8638 | chr1: 6531548: −>chr1: 6531300: − | chr1: 6531548: −: ENST00000400915 > chr1: 6531300: −: MIRb/ORF1 |
| 8639 | chr1: 6531548: −>chr1: 6531300: − | chr1: 6531548: −: ENST00000535355 > chr1: 6531300: −: MIRb/ORF1 |
| 8640 | chr1: 6531548: −>chr1: 6531300: − | chr1: 6531548: −: ENST00000377732 > chr1: 6531300: −: MIRb/ORF1 |
| 8641 | chr1: 6531548: −>chr1: 6531300: − | chr1: 6531548: −: ENST00000537245 > chr1: 6531300: −: MIRb/ORF1 |
| 8642 | chr1: 6531548: −>chr1: 6531300: − | chr1: 6531548: −: ENST00000400913 > chr1: 6531300: −: MIRb/ORF1 |
| 8643 | chr2: 37490123: −>chr2: 37487527: − | chr2: 37490123: −: L1M5 > chr2: 37487527: −: ENST00000443977/ORF3 |
| 8644 | chr5: 175504713: +>chr5: 175516466: + | chr5: 175504713: +: AluY > chr5: 175516466: +: ENST00000253490/ORF3 |
| 8645 | chr5: 177450333: +>chr5: 177462097: + | chr5: 177450333: +: AluY > chr5: 177462097: +: ENST00000511856/ORF3 |
| 8646 | chr5: 177187438: −>chr5: 177175700: − | chr5: 177187438: −: AluY > chr5: 177175700: −: ENST00000504518/ORF3 |
| 8647 | chr5: 177450333: +>chr5: 177462097: + | chr5: 177450333: +: AluY > chr5: 177462097: +: ENST00000511189/ORF3 |
| 8648 | chr20: 32888526: −>chr20: 32883391: − | chr20: 32888526: −: L2b > chr20: 32883391: −: ENST00000217426/ORF1 |
| 8649 | chr8: 141727697: −>chr8: 141723228: − | chr8: 141727697: −: ENST00000521986 > chr8: 141723228: −: Charlie1a/ORF1 |
| 8650 | chr8: 141727697: −>chr8: 141723228: − | chr8: 141727697: −: ENST00000522684 > chr8: 141723228: −: Charlie1a/ORF1 |
| 8651 | chr8: 141727697: −>chr8: 141723228: − | chr8: 141727697: −: ENST00000538769 > chr8: 141723228: −: Charlie1a/ORF1 |
| 8652 | chr8: 141727697: −>chr8: 141723228: − | chr8: 141727697: −: ENST00000523539 > chr8: 141723228: −: Charlie1a/ORF1 |
| 8653 | chr8: 141727697: −>chr8: 141723228: − | chr8: 141727697: −: ENST00000519465 > chr8: 141723228: −: Charlie1a/ORF1 |
| 8654 | chr8: 141727697: −>chr8: 141723228: − | chr8: 141727697: −: ENST00000517887 > chr8: 141723228: −: Charlie1a/ORF1 |
| 8655 | chr8: 141727697: −>chr8: 141723228: − | chr8: 141727697: −: ENST00000430260 > chr8: 141723228: −: Charlie1a/ORF1 |
| 8656 | chr6: 31150660: −>chr6: 31133824: − | chr6: 31150660: −: Harlequin-int > chr6: 31133824: −: ENST00000259915/ORF2 |
| 8657 | chr20: 17550856: +>chr20: 17565018: + | chr20: 17550856: +: ENST00000246069 > chr20: 17565018: +: AluSp/ORF1 |
| 8658 | chr2: 98263129: +>chr2: 98263530: + | chr2: 98263129: +: AluSq2 > chr2: 98263530: +: ENST00000258424/ORF3 |
| 8659 | chr8: 66633382: −>chr8: 66631730: − | chr8: 66633382: −: L3 > chr8: 66631730: −: ENST00000401827/ORF3 |
| 8660 | chr20: 32888526: −>chr20: 32883391: − | chr20: 32888526: −: L2b > chr20: 32883391: −: ENST00000217426/ORF1 |
| 8661 | chr7: 50595367: −>chr7: 50571757: − | chr7: 50595367: −: L2a > chr7: 50571757: −: ENST00000357936/ORF3 |
| 8662 | chr7: 50595367: −>chr7: 50571757: − | chr7: 50595367: −: L2a > chr7: 50571757: −: ENST00000380984/ORF3 |
| 8663 | chr5: 1257816: −>chr5: 1255526: − | chr5: 1257816: −: L4 > chr5: 1255526: −: ENST00000310581/ORF3 |
| 8664 | chr2: 3381419: −>chr2: 3360102: − | chr2: 3381419: −: ENST00000398659 > chr2: 3360102: −: LTR16A/ORF1 |
| 8665 | chr8: 99648370: −>chr8: 99608397: − | chr8: 99648370: −: MIR > chr8: 99608397: −: ENST00000518165/ORF1 |
| 8666 | chr8: 99648370: −>chr8: 99608397: − | chr8: 99648370: −: MIR > chr8: 99608397: −: ENST00000419617/ORF1 |
| 8667 | chr4: 154669797: −>chr4: 154666879: − | chr4: 154669797: −: ENST00000274068 > chr4: 154666879: −: MSTD/ORF1 |
| 8668 | chr2: 231040909: −>chr2: 231037675: − | chr2: 231040909: −: AluJb > chr2: 231037675: −: ENST00000258381/ORF1 |
| 8669 | chr10: 104231153: +>chr10: 104231667: + | chr10: 104231153: +: ENST00000366277 > chr10: 104231667: +: MIR3/ORF1 |
| 8670 | chr1: 183107957: +>chr1: 183109539: + | chr1: 183107957: +: AluSx1 > chr1: 183109539: +: ENST00000258341/ORF2 |
| 8671 | chr19: 19976808: +>chr19: 19982937: + | chr19: 19976808: +: ENST00000589717 > chr19: 19982937: +: LTR70/ORF1 |
| 8672 | chr6: 130374597: +>chr6: 130376316: + | chr6: 130374597: +: AluY > chr6: 130376316: +: ENST00000529410/ORF1 |
| 8673 | chr22: 36007617: −>chr22: 36007153: − | chr22: 36007617: −: L3 > chr22: 36007153: −: ENST00000397326/ORF3 |
| 8674 | chr22: 37870550: −>chr22: 37861756: − | chr22: 37870550: −: ENST00000356998 > chr22: 37861756: −: L2a/ORF1 |
| 8675 | chr22: 37870550: −>chr22: 37861756: − | chr22: 37870550: −: ENST00000416983 > chr22: 37861756: −: L2a/ORF1 |
| 8676 | chr2: 37570066: +>chr2: 37579932: + | chr2: 37570066: +: LTR16A > chr2: 37579932: +: ENST00000338415/ORF2 |
| 8677 | chr2: 10135488: +>chr2: 10136007: + | chr2: 10135488: +: AluJb > chr2: 10136007: +: ENST00000405379/ORF3 |
| 8678 | chr2: 10135488: +>chr2: 10136007: + | chr2: 10135488: +: AluJb > chr2: 10136007: +: ENST00000472167/ORF3 |
| 8679 | chr9: 97214855: +>chr9: 97216240: + | chr9: 97214855: +: AluSx > chr9: 97216240: +: ENST00000375344/ORF1 |
| 8680 | chr12: 112169999: +>chr12: 112171727: + | chr12: 112169999: +: L1M5 > chr12: 112171727: +: ENST00000552706/ORF3 |
| 8681 | chr12: 112169999: +>chr12: 112171727: + | chr12: 112169999: +: L1M5 > chr12: 112171727: +: ENST00000392636/ORF3 |
| 8682 | chr3: 122863676: +>chr3: 122864369: + | chr3: 122863676: +: AluY > chr3: 122864369: +: ENST00000316218/ORF3 |
| 8683 | chr1: 70612092: −>chr1: 70611588: − | chr1: 70612092: −: MIR > chr1: 70611588: −: ENST00000370952/ORF3 |
| 8684 | chr5: 86704905: −>chr5: 86704003: − | chr5: 86704905: −: L2 > chr5: 86704003: −: ENST00000508855/ORF2 |
| 8685 | chr13: 115035095: +>chr13: 115037659: + | chr13: 115035095: +: L1ME3 > chr13: 115037659: +: ENST00000360383/ORF3 |
| 8686 | chr19: 49834874: −>chr19: 49797810: − | chr19: 49834874: −: MLT1J2 > chr19: 49797810: −: ENST00000454748/ORF1 |
| 8687 | chr19: 49834874: −>chr19: 49797810: − | chr19: 49834874: −: MLT1J2 > chr19: 49797810: −: ENST00000335875/ORF1 |
| 8688 | chr16: 70333257: +>chr16: 70333775: + | chr16: 70333257: +: ENST00000288071 > chr16: 70333775: +: L2c/ORF1 |
| 8689 | chr11: 129978600: +>chr11: 129979324: + | chr11: 129978600: +: L1PA5 > chr11: 129979324: +: ENST00000533195/ORF1 |
| 8690 | chr20: 30254794: −>chr20: 30253889: − | chr20: 30254794: −: MIRb > chr20: 30253889: −: ENST00000376062/ORF2 |
| 8691 | chr20: 30254794: −>chr20: 30253889: − | chr20: 30254794: −: MIRb > chr20: 30253889: −: ENST00000450273/ORF2 |
| 8692 | chr9: 96211969: −>chr9: 96209979: − | chr9: 96211969: −: AluSc > chr9: 96209979: −: ENST00000428378/ORF1 |
| 8693 | chr9: 96211969: −>chr9: 96209979: − | chr9: 96211969: −: AluSc > chr9: 96209979: −: ENST00000423591/ORF1 |
| 8694 | chr6: 110774731: −>chr6: 110768193: − | chr6: 110774731: −: LTR40c > chr6: 110768193: −: ENST00000451557/ORF2 |
| 8695 | chr20: 60835987: +>chr20: 60838672: + | chr20: 60835987: +: AluJo > chr20: 60838672: +: ENST00000313733/ORF3 |
| 8696 | chr19: 49832179: +>chr19: 49838971: + | chr19: 49832179: +: MLT1F1 > chr19: 49838971: +: ENST00000391859/ORF2 |
| 8697 | chr10: 112572705: +>chr10: 112576399: + | chr10: 112572705: +: ENST00000369519 > chr10: 112576399: +: L2a/ORF1 |
| 8698 | chr14: 60442915: +>chr14: 60443943: + | chr14: 60442915: +: MER1A > chr14: 60443943: +: ENST00000254271/ORF3 |
| 8699 | chr5: 179238682: +>chr5: 179250858: + | chr5: 179238682: +: MER61-int > chr5: 179250858: +: ENST00000376929/ORF2 |
| 8700 | chr3: 77121427: +>chr3: 77147165: + | chr3: 77121427: +: MERIA > chr3: 77147165: +: ENST00000487694/ORF2 |
| 8701 | chr19: 50010181: +>chr19: 50027764: + | chr19: 50010181: +: MER45A > chr19: 50027764: +: ENST00000221466/ORF3 |
| 8702 | chr5: 414855: +>chr5: 422844: + | chr5: 414855: +: L1MEd > chr5: 422844: +: ENST00000510400/ORF2 |
| 8703 | chr13: 115049839: +>chr13: 115051777: + | chr13: 115049839: +: (TG)n > chr13: 115051777: +: ENST00000375299/ORF1 |
| 8704 | chr2: 28190310: +>chr2: 28210860: + | chr2: 28190310: +: THE1B > chr2: 28210860: +: ENST00000436924/ORF3 |
| 8705 | chr4: 103554408: −>chr4: 103553438: − | chr4: 103554408: −: MLTIN2 > chr4: 103553438: −: ENST00000226578/ORF3 |
| 8706 | chr3: 50089360: +>chr3: 50091768: + | chr3: 50089360: +: L1MB7 > chr3: 50091768: +: ENST00000446471/ORF3 |
| 8707 | chr3: 50089360: +>chr3: 50091768: + | chr3: 50089360: +: L1MB7 > chr3: 50091768: +: ENST00000434592/ORF3 |
| 8708 | chr3: 50089360: +>chr3: 50091768: + | chr3: 50089360: +: L1MB7 > chr3: 50091768: +: ENST00000454079/ORF3 |
| 8709 | chr3: 50089360: +>chr3: 50091768: + | chr3: 50089360: +: L1MB7 > chr3: 50091768: +: ENST00000442092/ORF3 |
| 8710 | chr3: 50089360: +>chr3: 50091768: + | chr3: 50089360: +: L1MB7 > chr3: 50091768: +: ENST00000419610/ORF3 |
| 8711 | chr3: 50089360: +>chr3: 50091768: + | chr3: 50089360: +: L1MB7 > chr3: 50091768: +: ENST00000446471/ORF3 |
| 8712 | chr3: 50089360: +>chr3: 50091768: + | chr3: 50089360: +: L1MB7 > chr3: 50091768: +: ENST00000434592/ORF3 |
| 8713 | chr3: 50089360: +>chr3: 50091768: + | chr3: 50089360: +: L1MB7 > chr3: 50091768: +: ENST00000454079/ORF3 |
| 8714 | chr3: 50089360: +>chr3: 50091768: + | chr3: 50089360: +: L1MB7 > chr3: 50091768: +: ENST00000442092/ORF3 |
| 8715 | chr3: 50089360: +>chr3: 50091768: + | chr3: 50089360: +: L1MB7 > chr3: 50091768: +: ENST00000419610/ORF3 |
| 8716 | chr9: 97843062: +>chr9: 97909493: + | chr9: 97843062: +: ENST00000433691 > chr9: 97909493: +: Charlie 1/ORF1 |
| 8717 | chr9: 97843062: +>chr9: 97909493: + | chr9: 97843062: +: ENST00000375315 > chr9: 97909493: +: Charlie 1/ORF1 |
| 8718 | chr9: 97843062: +>chr9: 97909493: + | chr9: 97843062: +: ENST00000424143 > chr9: 97909493: +: Charlie 1/ORF1 |
| 8719 | chr9: 97843062: +>chr9: 97909493: + | chr9: 97843062: +: ENST00000425634 > chr9: 97909493: +: Charlie1/ORF1 |
| 8720 | chr9: 97843062: +>chr9: 97909493: + | chr9: 97843062: +: ENST00000428313 > chr9: 97909493: +: Charlie1/ORF1 |
| 8721 | chr9: 97843062: +>chr9: 97909493: + | chr9: 97843062: +: ENST00000297979 > chr9: 97909493: +: Charlie 1/ORF1 |
| 8722 | chr10: 118750845: −>chr10: 118738819: − | chr10: 118750845: −: MSTB1 > chr10: 118738819: −: ENST00000355371/ORF2 |
| 8723 | chr10: 118750845: −>chr10: 118738819: − | chr10: 118750845: −: MSTB1 > chr10: 118738819: −: ENST00000392903/ORF2 |
| 8724 | chr10: 118750845: −>chr10: 118738819: − | chr10: 118750845: −: MSTB1 > chr10: 118738819: −: ENST00000260777/ORF2 |
| 8725 | chr17: 76700853: −>chr17: 76698686: − | chr17: 76700853: −: AluJr4 > chr17: 76698686: −: ENST00000591455/ORF1 |
| 8726 | chr11: 18491675: −>chr11: 18490765: − | chr11: 18491675: −: AluSz6 > chr11: 18490765: −: ENST00000536719/ORF1 |
| 8727 | chr3: 50089360: +>chr3: 50091768: + | chr3: 50089360: +: L1MB7 > chr3: 50091768: +: ENST00000446471/ORF3 |
| 8728 | chr3: 50089360: +>chr3: 50091768: + | chr3: 50089360: +: L1MB7 > chr3: 50091768: +: ENST00000434592/ORF3 |
| 8729 | chr3: 50089360: +>chr3: 50091768: + | chr3: 50089360: +: L1MB7 > chr3: 50091768: +: ENST00000454079/ORF3 |
| 8730 | chr3: 50089360: +>chr3: 50091768: + | chr3: 50089360: +: L1MB7 > chr3: 50091768: +: ENST00000442092/ORF3 |
| 8731 | chr3: 50089360: +>chr3: 50091768: + | chr3: 50089360: +: L1MB7 > chr3: 50091768: +: ENST00000419610/ORF3 |
| 8732 | chr11: 18491675: −>chr11: 18490765: − | chr11: 18491675: −: AluSz6 > chr11: 18490765: −: ENST00000536719/ORF1 |
| 8733 | chr12: 42835231: +>chr12: 42836287: + | chr12: 42835231: +: ENST00000552761 > chr12: 42836287: +: LTR22A/ORF1 |
| 8734 | chr12: 42835231: +>chr12: 42836287: + | chr12: 42835231: +: ENST00000256678 > chr12: 42836287: +: LTR22A/ORF1 |
| 8735 | chr12: 42835231: +>chr12: 42836287: + | chr12: 42835231: +: ENST00000317560 > chr12: 42836287: +: LTR22A/ORF1 |
| 8736 | chr12: 42835231: +>chr12: 42836287: + | chr12: 42835231: +: ENST00000449194 > chr12: 42836287: +: LTR22A/ORF1 |
| 8737 | chr12: 42835231: +>chr12: 42836287: + | chr12: 42835231: +: ENST00000549190 > chr12: 42836287: +: LTR22A/ORF1 |
| 8738 | chr12: 42835231: +>chr12: 42836287: + | chr12: 42835231: +: ENST00000395580 > chr12: 42836287: +: LTR22A/ORF1 |
| 8739 | chr12: 42835231: +>chr12: 42836287: + | chr12: 42835231: +: ENST00000358314 > chr12: 42836287: +: LTR22A/ORF1 |
| 8740 | chr12: 42835231: +>chr12: 42836287: + | chr12: 42835231: +: ENST00000337898 > chr12: 42836287: +: LTR22A/ORF1 |
| 8741 | chr11: 76708271: +>chr11: 76709807: + | chr11: 76708271: +: L2c > chr11: 76709807: +: ENST00000534206/ORF2 |
| 8742 | chr11: 76708271: +>chr11: 76709807: + | chr11: 76708271: +: L2c > chr11: 76709807: +: ENST00000532485/ORF2 |
| 8743 | chr1: 154709520: −>chr1: 154705620: − | chr1: 154709520: −: L2c > chr1: 154705620: −: ENST00000271915/ORF1 |
| 8744 | chr9: 96211969: −>chr9: 96210771: − | chr9: 96211969: −: AluSc > chr9: 96210771: −: ENST00000476484/ORF3 |
| 8745 | chr5: 60220118: −>chr5: 60217982: − | chr5: 60220118: −: L1MC4 > chr5: 60217982: −: ENST00000265038/ORF1 |
| 8746 | chr17: 43536749: −>chr17: 43531638: − | chr17: 43536749: −: L1MB7 > chr17: 43531638: −: ENST00000430334/ORF2 |
| 8747 | chr2: 219296440: +>chr2: 219296580: + | chr2: 219296440: +: MIRb > chr2: 219296580: +: ENST00000248444/ORF1 |
| 8748 | chr22: 25019883: +>chr22: 25023093: + | chr22: 25019883: +: ENST00000248923 > chr22: 25023093: +: L2b/ORF1 |
| 8749 | chr3: 141809634: −>chr3: 141724386: − | chr3: 141809634: −: AluSx1 > chr3: 141724386: −: ENST00000489671/ORF2 |
| 8750 | chr3: 141809634: −>chr3: 141724386: − | chr3: 141809634: −: AluSx1 > chr3: 141724386: −: ENST00000467634/ORF2 |
| 8751 | chr3: 141809634: −>chr3: 141724386: − | chr3: 141809634: −: AluSx1 > chr3: 141724386: −: ENST00000487734/ORF2 |
| 8752 | chr12: 52641995: +>chr12: 52645561: + | chr12: 52641995: +: ENST00000331817 > chr12: 52645561: +: MER58A/ORF1 |
| 8753 | chr12: 111950004: −>chr12: 111948386: − | chr12: 111950004: −: AluSq2 > chr12: 111948386: −: ENST00000389153/ORF1 |
| 8754 | chr20: 56286012: −>chr20: 56234753: − | chr20: 56286012: −: L2b > chr20: 56234753: −: ENST00000341744/ORF2 |
| 8755 | chr20: 56265035: −>chr20: 56234753: − | chr20: 56265035: −: MIRb > chr20: 56234753: −: ENST00000341744/ORF3 |
| 8756 | chr16: 23574051: +>chr16: 23575360: + | chr16: 23574051: +: ENST00000219638 > chr16: 23575360: +: L2c/ORF1 |
| 8757 | chr2: 55845886: −>chr2: 55842642: − | chr2: 55845886: −: AluSc8 > chr2: 55842642: −: ENST00000272313/ORF1 |
| 8758 | chr12: 124872018: −>chr12: 124870433: − | chr12: 124872018: −: MIRc > chr12: 124870433: −: ENST00000356219/ORF1 |
| 8759 | chr12: 124835133: −>chr12: 124834994: − | chr12: 124835133: −: ENST00000356219 > chr12: 124834994: −: L3/ORF1 |
| 8760 | chr12: 124852429: −>chr12: 124848345: − | chr12: 124852429: −: AluSz > chr12: 124848345: −: ENST00000356219/ORF2 |
| 8761 | chr20: 60739957: +>chr20: 60740478: + | chr20: 60739957: +: AluJb > chr20: 60740478: +: ENST00000421564/ORF1 |
| 8762 | chr11: 105130369: −>chr11: 105009805: − | chr11: 105130369: −: MER44D > chr11: 105009805: −: ENST00000530950/ORF3 |
| 8763 | chr19: 42335940: +>chr19: 42365240: + | chr19: 42335940: +: AluSx > chr19: 42365240: +: ENST00000600467/ORF2 |
| 8764 | chr1: 147120048: −>chr1: 147074300: − | chr1: 147120048: −: ENST00000369238 > chr1: 147074300: −: AluSg/ORF1 |
| 8765 | chr19: 42335940: +>chr19: 42365240: + | chr19: 42335940: +: AluSx > chr19: 42365240: +: ENST00000600467/ORF2 |
| 8766 | chr8: 120069570: +>chr8: 120101919: + | chr8: 120069570: +: THE1D > chr8: 120101919: +: ENST00000332843/ORF3 |
| 8767 | chr8: 119919242: +>chr8: 120079593: + | chr8: 119919242: +: THE1B > chr8: 120079593: +: ENST00000332843/ORF1 |
| 8768 | chr8: 120050389: +>chr8: 120101919: + | chr8: 120050389: +: MIRb > chr8: 120101919: +: ENST00000332843/ORF2 |
| 8769 | chr8: 119919242: +>chr8: 120101919: + | chr8: 119919242: +: THE1B > chr8: 120101919: +: ENST00000332843/ORF3 |
| 8770 | chr8: 119776623: +>chr8: 120101919: + | chr8: 119776623: +: MER57A-int > chr8: 120101919: +: ENST00000332843/ORF2 |
| 8771 | chr8: 120021792: +>chr8: 120101919: + | chr8: 120021792: +: MSTB2 > chr8: 120101919: +: ENST00000332843/ORF1 |
| 8772 | chr17: 53207643: +>chr17: 53218671: + | chr17: 53207643: +: MLT1E3 > chr17: 53218671: +: ENST00000376352/ORF3 |
| 8773 | chr1: 179339213: +>chr1: 179340287: + | chr1: 179339213: +: ENST00000434088 > chr1: 179340287: +: AluSz/ORF1 |
| 8774 | chr13: 111909972: +>chr13: 111919895: + | chr13: 111909972: +: L1M1 > chr13: 111919895: +: ENST00000544132/ORF3 |
| 8775 | chr19: 18493439: +>chr19: 18497039: + | chr19: 18493439: +: AluSx > chr19: 18497039: +: ENST00000595973/ORF3 |
| 8776 | chr6: 47547012: +>chr6: 47547121: + | chr6: 47547012: +: AluJb > chr6: 47547121: +: ENST00000359314/ORF1 |
| 8777 | chr19: 36390354: +>chr19: 36394253: + | chr19: 36390354: +: AluSx1 > chr19: 36394253: +: ENST00000246551/ORF1 |
| 8778 | chr2: 26947428: +>chr2: 26950535: + | chr2: 26947428: +: MIR > chr2: 26950535: +: ENST00000302909/ORF1 |
| 8779 | chr5: 115421303: +>chr5: 115423194: + | chr5: 115421303: +: MER113 > chr5: 115423194: +: ENST00000274458/ORF3 |
| 8780 | chr5: 115421275: +>chr5: 115423194: + | chr5: 115421275: +: MER113 > chr5: 115423194: +: ENST00000274458/ORF2 |
| 8781 | chr12: 69649832: +>chr12: 69650477: + | chr12: 69649832: +: L1MB8 > chr12: 69650477: +: ENST00000435070/ORF1 |
| 8782 | chr7: 76044541: +>chr7: 76054369: + | chr7: 76044541: +: AluSz > chr7: 76054369: +: ENST00000394857/ORF1 |
| 8783 | chr10: 104637429: +>chr10: 104638136: + | chr10: 104637429: +: FLAM A > chr10: 104638136: +: ENST00000369880/ORF1 |
| 8784 | chr3: 4872631: −>chr3: 4871958: − | chr3: 4872631: −: ENST00000449914 > chr3: 4871958: −AluSx/ORF1 |
| 8785 | chr3: 176780176: −>chr3: 176771706: − | chr3: 176780176: −: MER5A > chr3: 176771706: −: ENST00000430069/ORF1 |
| 8786 | chr3: 176780176: −>chr3: 176771706: − | chr3: 176780176: −: MER5A > chr3: 176771706: −: ENST00000427349/ORF1 |
| 8787 | chr9: 135519082: −>chr9: 135517450: − | chr9: 135519082: −: MIR > chr9: 135517450: −: ENST00000372159/ORF2 |
| 8788 | chr1: 33775216: −>chr1: 33773054: − | chr1: 33775216: −: SVA B > chr1: 33773054: −: ENST00000330379/ORF1 |
| 8789 | chr9: 99067556: −>chr9: 99064349: − | chr9: 99067556: −: MLTIF2 > chr9: 99064349: −: ENST00000375263/ORF3 |
| 8790 | chr16: 30635061: −>chr16: 30620959: − | chr16: 30635061: −: HERVK3-int > chr16: 30620959: −: ENST00000287461/ORF1 |
| 8791 | chr1: 28861892: +>chr1: 28862122: + | chr1: 28861892: +: ENST00000434290 > chr1: 28862122: +: MIR/ORF1 |
| 8792 | chr2: 85804390: +>chr2: 85806132: + | chr2: 85804390: +: FLAM C > chr2: 85806132: +: ENST00000263864/ORF3 |
| 8793 | chr19: 852716: +>chr19: 852876: + | chr19: 852716: +: MIR3 > chr19: 852876: +: ENST00000590230/ORF1 |
| 8794 | chr11: 725377: +>chr11: 725728: + | chr11: 725377: +: AluJb > chr11: 725728: +: ENST00000318562/ORF1 |
| 8795 | chr11: 725414: +>chr11: 725728: + | chr11: 725414: +: AluJb > chr11: 725728: +: ENST00000318562/ORF2 |
| 8796 | chr9: 125788579: +>chr9: 125827627: + | chr9: 125788579: +: AluSx1 > chr9: 125827627: +: ENST00000373647/ORF3 |
| 8797 | chr9: 125788389: +>chr9: 125827627: + | chr9: 125788389: +: AluSx1 > chr9: 125827627: +: ENST00000373647/ORF2 |
| 8798 | chr9: 125788389: +>chr9: 125827627: + | chr9: 125788389: +: AluSx1 > chr9: 125827627: +: ENST00000456584/ORF2 |
| 8799 | chr9: 125788579: +>chr9: 125827627: + | chr9: 125788579: +: AluSx1 > chr9: 125827627: +: ENST00000456584/ORF3 |
| 8800 | chr2: 73490341: −>chr2: 73490138: − | chr2: 73490341: −: ENST00000295133 > chr2: 73490138: −: AluSp/ORF1 |
| 8801 | chr2: 73487517: −>chr2: 73487263: − | chr2: 73487517: −: ENST00000295133 > chr2: 73487263: −: MIR/ORF1 |
| 8802 | chrX: 134482809: +>chrX: 134483035: + | chrX: 134482809: +: MER33 > chrX: 134483035: +: ENST00000339249/ORF1 |
| 8803 | chr10: 123689954: −>chr10: 123683844: − | chr10: 123689954: −: LTR5B > chr10: 123683844: −: ENST00000369043/ORF1 |
| 8804 | chr10: 123690092: −>chr10: 123683844: − | chr10: 123690092: −: LTR5B > chr10: 123683844: −: ENST00000369043/ORF1 |
| 8805 | chr9: 131672740: +>chr9: 131678375: + | chr9: 131672740: +: AluJo > chr9: 131678375: +: ENST00000372600/ORF3 |
| 8806 | chr14: 20787171: −>chr14: 20784719: − | chr14: 20787171: −: AluSz > chr14: 20784719: −: ENST00000556563/ORF3 |
| 8807 | chr16: 23574051: +>chr16: 23575360: + | chr16: 23574051: +: ENST00000219638 > chr16: 23575360: +: L2c/ORF1 |
| 8808 | chr1: 155987923: −>chr1: 155984860: − | chr1: 155987923: −: L3b > chr1: 155984860: −: ENST00000295702/ORF2 |
| 8809 | chr3: 50130475: +>chr3: 50131153: + | chr3: 50130475: +: AluJb > chr3: 50131153: +: ENST00000404526/ORF3 |
| 8810 | chr19: 17444964: −>chr19: 17444609: − | chr19: 17444964: −: MIR > chr19: 17444609: −: ENST00000597643/ORF2 |
| 8811 | chr19: 8531498: +>chr19: 8533658: + | chr19: 8531498: +: AluSx1 > chr19: 8533658: +: ENST00000594907/ORF2 |
| 8812 | chr18: 74574245: +>chr18: 74580641: + | chr18: 74574245: +: L1MDa > chr18: 74580641: +: ENST00000320610/ORF3 |
| 8813 | chr19: 10743677: +>chr19: 10745432: + | chr19: 10743677: +: MIR > chr19: 10745432: +: ENST00000588409/ORF3 |
| 8814 | chr3: 128828867: −>chr3: 128814012: − | chr3: 128828867: −: AluJo > chr3: 128814012: −: ENST00000418265/ORF3 |
| 8815 | chr14: 23350226: +>chr14: 23353883: + | chr14: 23350226: +: AluSc > chr14: 23353883: +: ENST00000267396/ORF1 |
| 8816 | chr8: 72875283: +>chr8: 72937597: + | chr8: 72875283: +: ENST00000521467 > chr8: 72937597: +: THE1D/ORF1 |
| 8817 | chr10: 81838940: +>chr10: 81841396: + | chr10: 81838940: +: ENST00000372273 > chr10: 81841396: +: AluJr/ORF1 |
| 8818 | chr8: 150392: −>chr8: 129347: − | chr8: 150392: −: ENST00000523795 > chr8: 129347: −: THE1B-int/ORF1 |
| 8819 | chr8: 150392: −>chr8: 36580: − | chr8: 150392: −: ENST00000523795 > chr8: 36580: −L1MC4a/ORF1 |
| 8820 | chr3: 51424477: +>chr3: 51425168: + | chr3: 51424477: +: AluJb > chr3: 51425168: +: ENST00000528157/ORF2 |
| 8821 | chr17: 15930016: +>chr17: 15931568: + | chr17: 15930016: +: ENST00000486880 > chr17: 15931568: +: MER5B/ORF1 |
| 8822 | chr17: 15909882: +>chr17: 15912292: + | chr17: 15909882: +: ENST00000486880 > chr17: 15912292: +: L2a/ORF1 |
| 8823 | chr1: 165863816: +>chr1: 165865427: + | chr1: 165863816: +: MER5B > chr1: 165865427: +: ENST00000367879/ORF1 |
| 8824 | chr14: 64908293: +>chr14: 64908772: + | chr14: 64908293: +: AluY > chr14: 64908772: +: ENST00000545908/ORF3 |
| 8825 | chr5: 176408378: −>chr5: 176402481: − | chr5: 176408378: −: AluSc8 > chr5: 176402481: −: ENST00000510698/ORF2 |
| 8826 | chr9: 33787393: +>chr9: 33796641: + | chr9: 33787393: +: ERVL-E-int > chr9: 33796641: +: ENST00000361005/ORF2 |
| 8827 | chr20: 3653818: −>chr20: 3653545: − | chr20: 3653818: −: MIR > chr20: 3653545: −: ENST00000356518/ORF1 |
| 8828 | chr12: 8273702: +>chr12: 8278157: + | chr12: 8273702: +: MLT1I > chr12: 8278157: +: ENST00000229332/ORF1 |
| 8829 | chr19: 45397323: +>chr19: 45399580: + | chr19: 45397323: +: ENST00000592041 > chr19: 45399580: +: MIR/ORF1 |
| 8830 | chr10: 135216277: +>chr10: 135240587: + | chr10: 135216277: +: ENST00000468317 > chr10: 135240587: +: L1M5/ORF1 |
| 8831 | chr10: 135233096: +>chr10: 135240587: + | chr10: 135233096: +: ENST00000468317 > chr10: 135240587: +: L1M5/ORF1 |
| 8832 | chr4: 84195547: −>chr4: 84194770: − | chr4: 84195547: −: AluSx1 > chr4: 84194770: −: ENST00000503915/ORF2 |
| 8833 | chr4: 84195547: −>chr4: 84194770: − | chr4: 84195547: −: AluSx1 > chr4: 84194770: −: ENST00000503391/ORF2 |
| 8834 | chr16: 69418483: −>chr16: 69413560: − | chr16: 69418483: −: ENST00000603068 > chr16: 69413560: −: Charlie1a/ORF1 |
| 8835 | chr8: 48353104: +>chr8: 48358023: + | chr8: 48353104: +: ENST00000519401 > chr8: 48358023: +: Tigger1/ORF1 |
| 8836 | chr3: 53163843: −>chr3: 53160010: − | chr3: 53163843: −: MIR > chr3: 53160010: −: ENST00000296292/ORF1 |
| 8837 | chr22: 35777322: +>chr22: 35779099: + | chr22: 35777322: +: MIRb > chr22: 35779099: +: ENST00000216117/ORF1 |
| 8838 | chr22: 35777322: +>chr22: 35779099: + | chr22: 35777322: +: MIRb > chr22: 35779099: +: ENST00000412893/ORF1 |
| 8839 | chr11: 34654351: +>chr11: 34664175: + | chr11: 34654351: +: L2a > chr11: 34664175: +: ENST00000531794/ORF3 |
| 8840 | chr1: 43897572: +>chr1: 43897822: + | chr1: 43897572: +: ENST00000372442 > chr1: 43897822: +: MIRb/ORF1 |
| 8841 | chr16: 17215958: −>chr16: 17211836: − | chr16: 17215958: −: LIPB1 > chr16: 17211836: −: ENST00000261381/ORF2 |
| 8842 | chrX: 69218743: +>chrX: 69243068: + | chrX: 69218743: +: THE1A > chrX: 69243068: +: ENST00000374552/ORF1 |
| 8843 | chrX: 69218743: +>chrX: 69243068: + | chrX: 69218743: +: THE1A > chrX: 69243068: +: ENST00000503592/ORF1 |
| 8844 | chrX: 69218743: +>chrX: 69243068: + | chrX: 69218743: +: THE1A > chrX: 69243068: +: ENST00000524573/ORF1 |
| 8845 | chr12: 46760160: −>chr12: 46758972: − | chr12: 46760160: −: Tigger4b > chr12: 46758972: −: ENST00000256689/ORF1 |
| 8846 | chr12: 95657285: +>chr12: 95660133: + | chr12: 95657285: +: AluJr > chr12: 95660133: +: ENST00000552821/ORF2 |
| 8847 | chr19: 17125357: −>chr19: 17122567: − | chr19: 17125357: −: THE1B > chr19: 17122567: −: ENST00000443236/ORF2 |
| 8848 | chr2: 62199161: +>chr2: 62227836: + | chr2: 62199161: +: AluJb > chr2: 62227836: +: ENST00000311832/ORF1 |
| 8849 | chr2: 62189783: +>chr2: 62227836: + | chr2: 62189783: +: MER77B > chr2: 62227836: +: ENST00000311832/ORF1 |
| 8850 | chr15: 65831275: +>chr15: 65844014: + | chr15: 65831275: +: Tigger1 > chr15: 65844014: +: ENST00000261875/ORF3 |
| 8851 | chr20: 33190934: −>chr20: 33176411: − | chr20: 33190934: −: L1MC5 > chr20: 33176411: −: ENST00000217446/ORF2 |
| 8852 | chr18: 74574245: +>chr18: 74580641: + | chr18: 74574245: +: L1MDa > chr18: 74580641: +: ENST00000320610/ORF3 |
| 8853 | chr10: 47919476: +>chr10: 47919942: + | chr10: 47919476: +: AluY > chr10: 47919942: +: ENST00000358474/ORF3 |
| 8854 | chr10: 47928311: +>chr10: 47929795: + | chr10: 47928311: +: L1MB7 > chr10: 47929795: +: ENST00000358474/ORF1 |
| 8855 | chr10: 47919476: +>chr10: 47919942: + | chr10: 47919476: +: AluY > chr10: 47919942: +: ENST00000355876/ORF3 |
| 8856 | chr10: 47928311: +>chr10: 47929795: + | chr10: 47928311: +: L1MB7 > chr10: 47929795: +: ENST00000355876/ORF1 |
| 8857 | chr16: 47484313: −>chr16: 47462809: − | chr16: 47484313: −: 5S > chr16: 47462809: −: ENST00000320640/ORF1 |
| 8858 | chr19: 48627044: −>chr19: 48626575: − | chr19: 48627044: −: AluSx3 > chr19: 48626575: −: ENST00000263274/ORF2 |
| 8859 | chr15: 66775033: +>chr15: 66777328: + | chr15: 66775033: +: L2b > chr15: 66777328: +: ENST00000307102/ORF3 |
| 8860 | chr10: 105819196: −>chr10: 105817948: − | chr10: 105819196: −: MER5A1 > chr10: 105817948: −: ENST00000353479/ORF2 |
| 8861 | chr6: 159316398: +>chr6: 159329766: + | chr6: 159316398: +: ENST00000367073 > chr6: 159329766: +: FordPrefect_a/ORF1 |
| 8862 | chr11: 129980556: +>chr11: 129987692: + | chr11: 129980556: +: ENST00000543137 > chr11: 129987692: +: AluSc8/ORF1 |
| 8863 | chr10: 47919476: +>chr10: 47919942: + | chr10: 47919476: +: AluY > chr10: 47919942: +: ENST00000358474/ORF3 |
| 8864 | chr10: 47928311: +>chr10: 47929795: + | chr10: 47928311: +: L1MB7 > chr10: 47929795: +: ENST00000358474/ORF1 |
| 8865 | chr10: 47919476: +>chr10: 47919942: + | chr10: 47919476: +: AluY > chr10: 47919942: +: ENST00000355876/ORF3 |
| 8866 | chr10: 47928311: +>chr10: 47929795: + | chr10: 47928311: +: L1MB7 > chr10: 47929795: +: ENST00000355876/ORF1 |
| 8867 | chr5: 52301822: +>chr5: 52322578: + | chr5: 52301822: +: LIPA10 > chr5: 52322578: +: ENST00000296585/ORF1 |
| 8868 | chr5: 52301822: +>chr5: 52322578: + | chr5: 52301822: +: LIPA10 > chr5: 52322578: +: ENST00000509814/ORF1 |
| 8869 | chr5: 52301822: +>chr5: 52322578: + | chr5: 52301822: +: LIPA10 > chr5: 52322578: +: ENST00000509960/ORF1 |
| 8870 | chr5: 52301822: +>chr5: 52322578: + | chr5: 52301822: +: LIPA10 > chr5: 52322578: +: ENST00000503810/ORF1 |
| 8871 | chr5: 52301822: +>chr5: 52322578: + | chr5: 52301822: +: LIPA10 > chr5: 52322578: +: ENST00000510722/ORF1 |
| 8872 | chr3: 38398618: +>chr3: 38401830: + | chr3: 38398618: +: MLT1B > chr3: 38401830: +: ENST00000207870/ORF1 |
| 8873 | chr10: 98821532: −>chr10: 98820544: − | chr10: 98821532: −: L1ME3 > chr10: 98820544: −: ENST00000314867/ORF1 |
| 8874 | chr10: 98821532: −>chr10: 98820544: − | chr10: 98821532: −: L1ME3 > chr10: 98820544: −: ENST00000266058/ORF1 |
| 8875 | chr4: 38696173: +>chr4: 38696367: + | chr4: 38696173: +: L2b > chr4: 38696367: +: ENST00000261438/ORF2 |
| 8876 | chr13: 20425495: −>chr13: 20423562: − | chr13: 20425495: −: ENST00000502168 > chr13: 20423562: −: AluJr/ORF1 |
| 8877 | chr10: 127633904: +>chr10: 127668730: + | chr10: 127633904: +: LIPA2 > chr10: 127668730: +: ENST00000368693/ORF3 |
| 8878 | chr14: 24631779: +>chr14: 24632175: + | chr14: 24631779: +: AluSc5 > chr14: 24632175: +: ENST00000559284/ORF2 |
| 8879 | chr14: 24631779: +>chr14: 24632175: + | chr14: 24631779: +: AluSc5 > chr14: 24632175: +: ENST00000560275/ORF2 |
| 8880 | chr14: 24631779: +>chr14: 24632175: + | chr14: 24631779: +: AluSc5 > chr14: 24632175: +: ENST00000396864/ORF2 |
| 8881 | chr1: 45278355: +>chr1: 45278668: + | chr1: 45278355: +: AluSc8 > chr1: 45278668: +: ENST00000450269/ORF3 |
| 8882 | chr16: 718154: +>chr16: 718358: + | chr16: 718154: +: G-rich > chr16: 718358: +: ENST00000561929/ORF1 |
| 8883 | chr16: 718154: +>chr16: 718353: + | chr16: 718154: +: G-rich > chr16: 718353: +: ENST00000561929/ORF3 |
| 8884 | chr14: 51355621: +>chr14: 51359931: + | chr14: 51355621: +: ENST00000395752 > chr14: 51359931: +: LTR7/ORF1 |
| 8885 | chr12: 48166365: +>chr12: 48172811: + | chr12: 48166365: +: AluJr > chr12: 48172811: +: ENST00000442218/ORF2 |
| 8886 | chr16: 89765443: −>chr16: 89764713: − | chr16: 89765443: −: AluSc > chr16: 89764713: −: ENST00000289805/ORF3 |
| 8887 | chr16: 89765443: −>chr16: 89764713: − | chr16: 89765443: −: AluSc > chr16: 89764713: −: ENST00000335360/ORF3 |
| 8888 | chr18: 33076739: −>chr18: 33060527: − | chr18: 33076739: −: AluJr4 > chr18: 33060527: −: ENST00000592173/ORF3 |
| 8889 | chr18: 33076739: −>chr18: 33060527: − | chr18: 33076739: −: AluJr4 > chr18: 33060527: −: ENST00000334598/ORF3 |
| 8890 | chr18: 33076739: −>chr18: 33060527: − | chr18: 33076739: −: AluJr4 > chr18: 33060527: −: ENST00000591139/ORF3 |
| 8891 | chr19: 1385282: +>chr19: 1387810: + | chr19: 1385282: +: AluSp > chr19: 1387810: +: ENST00000414651/ORF2 |
| 8892 | chr1: 65890007: +>chr1: 65890986: + | chr1: 65890007: +: L3 > chr1: 65890986: +: ENST00000371065/ORF1 |
| 8893 | chr16: 67063052: +>chr16: 67063630: + | chr16: 67063052: +: (CGG)n > chr16: 67063630: +: ENST00000290858/ORF1 |
| 8894 | chr14: 91641326: +>chr14: 91642278: + | chr14: 91641326: +: MER21B > chr14: 91642278: +: ENST00000520328/ORF1 |
| 8895 | chr18: 77906530: +>chr18: 77920399: + | chr18: 77906530: +: L3 > chr18: 77920399: +: ENST00000586421/ORF1 |
| 8896 | chr18: 77906530: +>chr18: 77920399: + | chr18: 77906530: +: L3 > chr18: 77920399: +: ENST00000587254/ORF1 |
| 8897 | chr16: 8890694: −>chr16: 8890447: − | chr16: 8890694: −: MIRb > chr16: 8890447: −: ENST00000333050/ORF3 |
| 8898 | chr20: 33851310: +>chr20: 33851594: + | chr20: 33851310: +: L2c > chr20: 33851594: +: ENST00000246186/ORF3 |
| 8899 | chr9: 5690038: +>chr9: 5710416: + | chr9: 5690038: +: ENST00000381532 > chr9: 5710416: +: HAL1/ORF1 |
| 8900 | chr9: 5732479: +>chr9: 5736335: + | chr9: 5732479: +: ENST00000381532 > chr9: 5736335: +: L1MEc/ORF1 |
| 8901 | chr9: 5690038: +>chr9: 5712361: + | chr9: 5690038: +: ENST00000381532 > chr9: 5712361: +: L1PA5/ORF1 |
| 8902 | chr20: 60717124: −>chr20: 60716000: − | chr20: 60717124: −: MER20 > chr20: 60716000: −: ENST00000370873/ORF2 |
| 8903 | chr2: 131824664: −>chr2: 131813268: − | chr2: 131824664: −: THE1B > chr2: 131813268: −: ENST00000409185/ORF1 |
| 8904 | chr14: 102937942: +>chr14: 102963316: + | chr14: 102937942: +: AluJo > chr14: 102963316: +: ENST00000359520/ORF2 |
| 8905 | chr9: 79947029: +>chr9: 79950293: + | chr9: 79947029: +: ENST00000376634 > chr9: 79950293: +: LIPA7/ORF1 |
| 8906 | chr9: 79947029: +>chr9: 79950293: + | chr9: 79947029: +: ENST00000376636 > chr9: 79950293: +: LIPA7/ORF1 |
| 8907 | chr13: 22254080: +>chr13: 22255181: + | chr13: 22254080: +: AluY > chr13: 22255181: +: ENST00000382353/ORF2 |
| 8908 | chr3: 11862757: −>chr3: 11858811: − | chr3: 11862757: −: MER1A > chr3: 11858811: −: ENST00000455809/ORF2 |
| 8909 | chr1: 240569786: +>chr1: 240601361: + | chr1: 240569786: +: MIR > chr1: 240601361: +: ENST00000319653/ORF2 |
| 8910 | chr19: 49642169: +>chr19: 49642925: + | chr19: 49642169: +: AluSz > chr19: 49642925: +: ENST00000334186/ORF2 |
| 8911 | chr9: 42256117: +>chr9: 42671887: + | chr9: 42256117: +: GSATII > chr9: 42671887: +: ENST00000456520/ORF2 |
| 8912 | chr6: 11217909: −>chr6: 11213960: − | chr6: 11217909: −: MIR3 > chr6: 11213960: −: ENST00000379446/ORF1 |
| 8913 | chr6: 11217909: −>chr6: 11213960: − | chr6: 11217909: −: MIR3 > chr6: 11213960: −: ENST00000508546/ORF1 |
| 8914 | chr11: 104970090: −>chr11: 104969741: − | chr11: 104970090: −: ENST00000375707 > chr11: 104969741: −: L2/ORF1 |
| 8915 | chr9: 124066789: +>chr9: 124072962: + | chr9: 124066789: +: MIRc > chr9: 124072962: +: ENST00000373823/ORF2 |
| 8916 | chr9: 98759695: +>chr9: 98766802: + | chr9: 98759695: +: Tigger1 > chr9: 98766802: +: ENST00000407474/ORF2 |
| 8917 | chr15: 83697368: −>chr15: 83687605: − | chr15: 83697368: −: L1M5 > chr15: 83687605: −: ENST00000261721/ORF2 |
| 8918 | chr15: 83697368: −>chr15: 83689514: − | chr15: 83697368: −: L1M5 > chr15: 83689514: −: ENST00000261721/ORF2 |
| 8919 | chr11: 78278238: −>chr11: 78277318: − | chr11: 78278238: −: MER44D > chr11: 78277318: −: ENST00000281038/ORF3 |
| 8920 | chr7: 84736037: −>chr7: 84727281: − | chr7: 84736037: −: THEID > chr7: 84727281: −: ENST00000284136/ORF3 |
| 8921 | chr7: 84736037: −>chr7: 84727281: − | chr7: 84736037: −: THE1D > chr7: 84727281: −: ENST00000444867/ORF3 |
| 8922 | chr17: 65894534: +>chr17: 65899905: + | chr17: 65894534: +: L1MD > chr17: 65899905: +: ENST00000544778/ORF2 |
| 8923 | chr12: 123907591: −>chr12: 123897983: − | chr12: 123907591: −: ENST00000280571 > chr12: 123897983: −: LTR12C/ORF1 |
| 8924 | chr20: 18449705: +>chr20: 18451948: + | chr20: 18449705: +: ENST00000377603 > chr20: 18451948: +: L2c/ORF1 |
| 8925 | chr6: 79595160: +>chr6: 79606401: + | chr6: 79595160: +: ENST00000607739 > chr6: 79606401: +: AluJb/ORF1 |
| 8926 | chr6: 79595160: +>chr6: 79606401: + | chr6: 79595160: +: ENST00000369940 > chr6: 79606401: +: AluJb/ORF1 |
| 8927 | chr6: 79595160: +>chr6: 79606401: + | chr6: 79595160: +: ENST00000606868 > chr6: 79606401: +: AluJb/ORF1 |
| 8928 | chr5: 33794368: −>chr5: 33751653: − | chr5: 33794368: −: L1PBal > chr5: 33751653: −: ENST00000352040/ORF1 |
| 8929 | chr5: 33794368: −>chr5: 33751653: − | chr5: 33794368: −: L1PBal > chr5: 33751653: −: ENST00000515401/ORF1 |
| 8930 | chr5: 33794368: −>chr5: 33751653: − | chr5: 33794368: −: L1PBal > chr5: 33751653: −: ENST00000504830/ORF1 |
| 8931 | chr11: 104970090: −>chr11: 104969741: − | chr11: 104970090: −: ENST00000375707 > chr11: 104969741: −: L2/ORF1 |
| 8932 | chr19: 51853970: −>chr19: 51853645: − | chr19: 51853970: −: AluSx1 > chr19: 51853645: −: ENST00000354232/ORF3 |
| 8933 | chr11: 70208594: +>chr11: 70217126: + | chr11: 70208594: +: ENST00000253925 > chr11: 70217126: +: AluSz/ORF1 |
| 8934 | chr1: 45988450: −>chr1: 45980667: − | chr1: 45988450: −: AluSx3 > chr1: 45980667: −: ENST00000262746/ORF3 |
| 8935 | chr7: 138950208: +>chr7: 138951079: + | chr7: 138950208: +: AluSc8 > chr7: 138951079: +: ENST00000288561/ORF3 |
| 8936 | chr1: 45988450: −>chr1: 45981479: − | chr1: 45988450: −: AluSx3 > chr1: 45981479: −: ENST00000262746/ORF3 |
| 8937 | chr20: 50669039: −>chr20: 50668671: − | chr20: 50669039: −: AluY > chr20: 50668671: −: ENST00000371518/ORF1 |
| 8938 | chr2: 9691604: −>chr2: 9683414: − | chr2: 9691604: −: AluY > chr2: 9683414: −: ENST00000497134/ORF2 |
| 8939 | chrX: 1557990: −>chrX: 1555154: − | chrX: 1557990: −: ENST00000381317 > chrX: 1555154: −: AluSx/ORF1 |
| 8940 | chr2: 9691604: −>chr2: 9683414: − | chr2: 9691604: −: AluY > chr2: 9683414: −: ENST00000310823/ORF2 |
| 8941 | chr1: 45988450: −>chr1: 45981479: − | chr1: 45988450: −: AluSx3 > chr1: 45981479: −: ENST00000447184/ORF3 |
| 8942 | chr22: 21340186: +>chr22: 21341610: + | chr22: 21340186: +: ENST00000215739 > chr22: 21341610: +: AluSx1/ORF1 |
| 8943 | chrX: 1557990: −>chrX: 1555154: − | chrX: 1557990: −: ENST00000534940 > chrX: 1555154: −: AluSx/ORF1 |
| 8944 | chr19: 18513606: +>chr19: 18538161: + | chr19: 18513606: +: LTR5B > chr19: 18538161: +: ENST00000597724/ORF3 |
| 8945 | chr22: 18351213: −>chr22: 18348778: − | chr22: 18351213: −: MIR > chr22: 18348778: −: ENST00000441493/ORF1 |
| 8946 | chr12: 32630008: +>chr12: 32717071: + | chr12: 32630008: +: AluSx1 > chr12: 32717071: +: ENST00000534526/ORF3 |
| 8947 | chr2: 135128769: +>chr2: 135160559: + | chr2: 135128769: +: MIR3 > chr2: 135160559: +: ENST00000409645/ORF3 |
| 8948 | chr1: 6260335: −>chr1: 6257816: − | chr1: 6260335: −: MER5A1 > chr1: 6257816: −: ENST00000234875/ORF3 |
| 8949 | chr7: 129915476: +>chr7: 129916468: + | chr7: 129915476: +: CR1_Mam > chr7: 129916468: +: ENST00000222481/ORF1 |
| 8950 | chr6: 109740390: −>chr6: 109736869: − | chr6: 109740390: −: ENST00000520723 > chr6: 109736869: −Tigger2/ORF1 |
| 8951 | chr4: 54179803: −>chr4: 54149354: − | chr4: 54179803: −: ENST00000401642 > chr4: 54149354: −: L1ME3/ORF1 |
| 8952 | chr1: 116927464: +>chr1: 116928351: + | chr1: 116927464: +: ENST00000295598 > chr1: 116928351: +: MER21A/ORF1 |
| 8953 | chr1: 116927464: +>chr1: 116928351: + | chr1: 116927464: +: ENST00000418797 > chr1: 116928351: +: MER21A/ORF1 |
| 8954 | chr1: 116927464: +>chr1: 116928351: + | chr1: 116927464: +: ENST00000537345 > chr1: 116928351: +: MER21A/ORF1 |
| 8955 | chr2: 10282081: +>chr2: 10304486: + | chr2: 10282081: +: ENST00000381786 > chr2: 10304486: +: MIR/ORF1 |
| 8956 | chr11: 104970090: −>chr11: 104969741: − | chr11: 104970090: −: ENST00000375707 > chr11: 104969741: −: L2/ORF1 |
| 8957 | chr1: 27480474: −>chr1: 27465146: − | chr1: 27480474: −: ENST00000263980 > chr1: 27465146: −: L2a/ORF1 |
| 8958 | chr1: 27480474: −>chr1: 27465188: − | chr1: 27480474: −: ENST00000263980 > chr1: 27465188: −: L2a/ORF1 |
| 8959 | chr6: 30526730: +>chr6: 30529611: + | chr6: 30526730: +: L1ME3A > chr6: 30529611: +: ENST00000376560/ORF2 |
| 8960 | chr2: 136531849: +>chr2: 136533819: + | chr2: 136531849: +: L1MB7 > chr2: 136533819: +: ENST00000272638/ORF1 |
| 8961 | chr2: 136531946: +>chr2: 136533819: + | chr2: 136531946: +: L1MB7 > chr2: 136533819: +: ENST00000272638/ORF1 |
| 8962 | chr9: 15865593: +>chr9: 15874530: + | chr9: 15865593: +: Tigger2a > chr9: 15874530: +: ENST00000297641/ORF3 |
| 8963 | chr7: 129757509: +>chr7: 129760589: + | chr7: 129757509: +: AluJo > chr7: 129760589: +: ENST00000335420/ORF1 |
| 8964 | chr7: 129757509: +>chr7: 129760589: + | chr7: 129757509: +: AluJo > chr7: 129760589: +: ENST00000463413/ORF1 |
| 8965 | chr5: 125936006: +>chr5: 125939262: + | chr5: 125936006: +: LTR10C > chr5: 125939262: +: ENST00000297540/ORF3 |
| 8966 | chr9: 88264917: −>chr9: 88261333: − | chr9: 88264917: −: L1M6 > chr9: 88261333: −: ENST00000432218/ORF3 |
| 8967 | chr9: 88264917: −>chr9: 88261333: − | chr9: 88264917: −: L1M6 > chr9: 88261333: −: ENST00000376083/ORF3 |
| 8968 | chr13: 28209668: +>chr13: 28222516: + | chr13: 28209668: +: MIRc > chr13: 28222516: +: ENST00000399697/ORF3 |
| 8969 | chr13: 103314171: +>chr13: 103315998: + | chr13: 103314171: +: L1MB8 > chr13: 103315998: +: ENST00000376065/ORF1 |
| 8970 | chrX: 107934392: +>chrX: 107935978: + | chrX: 107934392: +: L1MA4A > chrX: 107935978: +: ENST00000328300/ORF3 |
| 8971 | chr10: 69695910: −>chr10: 69694344: − | chr10: 69695910: −: ENST00000373700 > chr10: 69694344: −: HAL1/ORF1 |
| 8972 | chr10: 69695910: −>chr10: 69694344: − | chr10: 69695910: −: ENST00000412272 > chr10: 69694344: −: HAL1/ORF1 |
| 8973 | chr10: 69695910: −>chr10: 69694344: − | chr10: 69695910: −: ENST00000395198 > chr10: 69694344: −: HALI/ORF1 |
| 8974 | chr10: 69695910: −>chr10: 69694344: − | chr10: 69695910: −: ENST00000277817 > chr10: 69694344: −: HAL1/ORF1 |
| 8975 | chr3: 50356387: −>chr3: 50349850: − | chr3: 50356387: −: ENST00000447092 > chr3: 50349850: −: SVA_D/ORF1 |
| 8976 | chr15: 57542903: +>chr15: 57543548: + | chr15: 57542903: +: AluSz > chr15: 57543548: +: ENST00000438423/ORF1 |
| 8977 | chr15: 57542903: +>chr15: 57543548: + | chr15: 57542903: +: AluSz > chr15: 57543548: +: ENST00000267811/ORF1 |
| 8978 | chr3: 128828867: −>chr3: 128814012: − | chr3: 128828867: −: AluJo > chr3: 128814012: −: ENST00000418265/ORF3 |
| 8979 | chr3: 128828867: −>chr3: 128814012: − | chr3: 128828867: −: AluJo > chr3: 128814012: −: ENST00000315150/ORF3 |
| 8980 | chr3: 128828867: −>chr3: 128814012: − | chr3: 128828867: −: AluJo > chr3: 128814012: −: ENST00000476465/ORF3 |
| 8981 | chr3: 128828867: −>chr3: 128814012: − | chr3: 128828867: −: AluJo > chr3: 128814012: −: ENST00000457077/ORF3 |
| 8982 | chr5: 113769626: +>chr5: 113798746: + | chr5: 113769626: +: LTR12C > chr5: 113798746: +: ENST00000512097/ORF1 |
| 8983 | chr10: 12280484: +>chr10: 12301986: + | chr10: 12280484: +: ENST00000378900 > chr10: 12301986: +: MLT1B/ORF1 |
| 8984 | chr10: 12280484: +>chr10: 12301986: + | chr10: 12280484: +: ENST00000281141 > chr10: 12301986: +: MLT1B/ORF1 |
| 8985 | chr2: 48593264: +>chr2: 48600431: + | chr2: 48593264: +: AluSx > chr2: 48600431: +: ENST00000340553/ORF3 |
| 8986 | chr2: 48593264: +>chr2: 48600431: + | chr2: 48593264: +: AluSx > chr2: 48600431: +: ENST00000413569/ORF3 |
| 8987 | chr5: 37496626: +>chr5: 37516616: + | chr5: 37496626: +: LTR12B > chr5: 37516616: +: ENST00000504564/ORF3 |
| 8988 | chr10: 18875224: −>chr10: 18875022: − | chr10: 18875224: −: LTR12 > chr10: 18875022: −: ENST00000377304/ORF2 |
| 8989 | chr5: 37496626: +>chr5: 37516616: + | chr5: 37496626: +: LTR12B > chr5: 37516616: +: ENST00000265107/ORF3 |
| 8990 | chr9: 98759695: +>chr9: 98766802: + | chr9: 98759695: +: Tigger1 > chr9: 98766802: +: ENST00000407474/ORF2 |
| 8991 | chr9: 33787393: +>chr9: 33796641: + | chr9: 33787393: +: ERVL-E-int > chr9: 33796641: +: ENST00000361005/ORF3 |
| 8992 | chr2: 42615589: −>chr2: 42580483: − | chr2: 42615589: −: MLT1B > chr2: 42580483: −: ENST00000378669/ORF3 |
| 8993 | chr2: 42615589: −>chr2: 42580483: − | chr2: 42615589: −: MLT1B > chr2: 42580483: −: ENST00000468711/ORF3 |
| 8994 | chr2: 42615589: −>chr2: 42580483: − | chr2: 42615589: −: MLT1B > chr2: 42580483: −: ENST00000463055/ORF3 |
| 8995 | chr6: 30705934: −>chr6: 30698877: − | chr6: 30705934: −: MER5A1 > chr6: 30698877: −: ENST00000376389/ORF3 |
| 8996 | chr6: 30705934: −>chr6: 30698877: − | chr6: 30705934: −: MER5A1 > chr6: 30698877: −: ENST00000438162/ORF3 |
| 8997 | chr11: 118885078: +>chr11: 118885704: + | chr11: 118885078: +: AluSg > chr11: 118885704: +: ENST00000334418/ORF2 |
| 8998 | chr1: 116202394: +>chr1: 116205953: + | chr1: 116202394: +: ENST00000355485 > chr1: 116205953: +: Tigger15a/ORF1 |
| 8999 | chr2: 54097965: −>chr2: 54096675: − | chr2: 54097965: −: AluJo > chr2: 54096675: −: ENST00000421748/ORF3 |
| 9000 | chr7: 73776406: +>chr7: 73778585: + | chr7: 73776406: +: AluSx1 > chr7: 73778585: +: ENST00000223398/ORF3 |
| 9001 | chr7: 73776406: +>chr7: 73778585: + | chr7: 73776406: +: AluSx1 > chr7: 73778585: +: ENST00000361545/ORF3 |
| 9002 | chr10: 105614953: −>chr10: 105563607: − | chr10: 105614953: −: ENST00000369774 > chr10: 105563607: −: MER4B/ORF1 |
| 9003 | chr4: 39699922: +>chr4: 39739040: + | chr4: 39699922: +: (CGG)n > chr4: 39739040: +: ENST00000261427/ORF1 |
| 9004 | chr19: 58433833: −>chr19: 58423557: − | chr19: 58433833: −: PRIMAX-int > chr19: 58423557: −: ENST00000312026/ORF2 |
| 9005 | chr10: 111874654: +>chr10: 111876017: + | chr10: 111874654: +: AluJr > chr10: 111876017: +: ENST00000360162/ORF3 |
| 9006 | chr19: 53386494: −>chr19: 53385236: − | chr19: 53386494: −: AluSx > chr19: 53385236: −: ENST00000391781/ORF2 |
| 9007 | chr20: 18452009: +>chr20: 18453486: + | chr20: 18452009: +: L2c > chr20: 18453486: +: ENST00000377603/ORF1 |
| 9008 | chr9: 37853518: +>chr9: 37854777: + | chr9: 37853518: +: L1MEe > chr9: 37854777: +: ENST00000377724/ORF3 |
| 9009 | chr17: 35702210: −>chr17: 35696810: − | chr17: 35702210: −: AluSx4 > chr17: 35696810: −: ENST00000353139/ORF3 |
| 9010 | chr8: 11690251: +>chr8: 11695897: + | chr8: 11690251: +: MER20 > chr8: 11695897: +: ENST00000538689/ORF2 |
| 9011 | chr3: 53915693: −>chr3: 53914136: − | chr3: 53915693: −: MIRb > chr3: 53914136: −: ENST00000335754/ORF3 |
| 9012 | chr3: 53915693: −>chr3: 53914099: − | chr3: 53915693: −: MIRb > chr3: 53914099: −: ENST00000335754/ORF3 |
| 9013 | chr9: 21808999: +>chr9: 21815432: + | chr9: 21808999: +: MLT1B > chr9: 21815432: +: ENST00000580718/ORF1 |
| 9014 | chr9: 21808999: +>chr9: 21815432: + | chr9: 21808999: +: MLT1B > chr9: 21815432: +: ENST00000404796/ORF1 |
| 9015 | chr9: 21808999: +>chr9: 21815432: + | chr9: 21808999: +: MLT1B > chr9: 21815432: +: ENST00000380172/ORF1 |
| 9016 | chr9: 21808999: +>chr9: 21815432: + | chr9: 21808999: +: MLT1B > chr9: 21815432: +: ENST00000419385/ORF1 |
| 9017 | chr9: 21808999: +>chr9: 21815432: + | chr9: 21808999: +: MLT1B > chr9: 21815432: +: ENST00000580900/ORF1 |
| 9018 | chr16: 21059883: −>chr16: 21051265: − | chr16: 21059883: −: LIPA2 > chr16: 21051265: −: ENST00000261383/ORF3 |
| 9019 | chr16: 21059883: −>chr16: 21053525: − | chr16: 21059883: −: L1PA2 > chr16: 21053525: −: ENST00000261383/ORF3 |
| 9020 | chr18: 57333308: −>chr18: 57147470: − | chr18: 57333308: −: THE1B > chr18: 57147470: −: ENST00000439986/ORF1 |
| 9021 | chr19: 39346206: −>chr19: 39338074: − | chr19: 39346206: −: SVA_D > chr19: 39338074: −: ENST00000601813/ORF3 |
| 9022 | chr19: 39346206: −>chr19: 39338074: − | chr19: 39346206: −: SVA_D > chr19: 39338074: −: ENST00000221419/ORF3 |
| 9023 | chr19: 39346206: −>chr19: 39338074: − | chr19: 39346206: −: SVA_D > chr19: 39338074: −: ENST00000600233/ORF3 |
| 9024 | chr6: 110731713: −>chr6: 110729645: − | chr6: 110731713: −: THE1C > chr6: 110729645: −: ENST00000368923/ORF2 |
| 9025 | chr5: 145540727: −>chr5: 145540049: − | chr5: 145540727: −: Tigger1 > chr5: 145540049: −: ENST00000394434/ORF2 |
| 9026 | chr1: 113246006: −>chr1: 113245741: − | chr1: 113246006: −: MIRb > chr1: 113245741: −: ENST00000414971/ORF2 |
| 9027 | chr1: 113246006: −>chr1: 113245741: − | chr1: 113246006: −: MIRb > chr1: 113245741: −: ENST00000534717/ORF2 |
| 9028 | chr1: 113246006: −>chr1: 113245741: − | chr1: 113246006: −: MIRb > chr1: 113245741: −: ENST00000436685/ORF2 |
| 9029 | chr1: 113246006: −>chr1: 113245741: − | chr1: 113246006: −: MIRb > chr1: 113245741: −: ENST00000425265/ORF2 |
| 9030 | chr1: 113246006: −>chr1: 113245741: − | chr1: 113246006: −: MIRb > chr1: 113245741: −: ENST00000605933/ORF2 |
| 9031 | chr1: 113246006: −>chr1: 113245741: − | chr1: 113246006: −: MIRb > chr1: 113245741: −: ENST00000369636/ORF2 |
| 9032 | chr1: 113246006: −>chr1: 113245741: − | chr1: 113246006: −: MIRb > chr1: 113245741: −: ENST00000339083/ORF2 |
| 9033 | chr1: 113246006: −>chr1: 113245741: − | chr1: 113246006: −: MIRb > chr1: 113245741: −: ENST00000484054/ORF2 |
| 9034 | chrX: 67652709: −>chrX: 67600753: − | chrX: 67652709: −: ENST00000355520 > chrX: 67600753: −: MIRb/ORF1 |
| 9035 | chr4: 25916044: +>chr4: 25922319: + | chr4: 25916044: +: ENST00000506197 > chr4: 25922319: +: Tigger3b/ORF1 |
| 9036 | chr9: 33796800: +>chr9: 33797121: + | chr9: 33796800: +: ENST00000457896 > chr9: 33797121: +: MER5B/ORF1 |
| 9037 | chr9: 33796800: +>chr9: 33797121: + | chr9: 33796800: +: ENST00000342836 > chr9: 33797121: +: MER5B/ORF1 |
| 9038 | chr9: 33796800: +>chr9: 33797121: + | chr9: 33796800: +: ENST00000379405 > chr9: 33797121: +: MER5B/ORF1 |
| 9039 | chr9: 33796800: +>chr9: 33797121: + | chr9: 33796800: +: ENST00000361005 > chr9: 33797121: +: MER5B/ORF1 |
| 9040 | chr9: 33796800: +>chr9: 33797121: + | chr9: 33796800: +: ENST00000429677 > chr9: 33797121: +: MER5B/ORF1 |
| 9041 | chr4: 103600768: −>chr4: 103595227: − | chr4: 103600768: −: Zaphod3 > chr4: 103595227: −: ENST00000226578/ORF2 |
| 9042 | chr17: 59777799: −>chr17: 59770873: − | chr17: 59777799: −: L1MB7 > chr17: 59770873: −: ENST00000259008/ORF2 |
| 9043 | chr13: 102182187: +>chr13: 102220050: + | chr13: 102182187: +: THE1C > chr13: 102220050: +: ENST00000376180/ORF3 |
| 9044 | chr10: 101420239: +>chr10: 101421203: + | chr10: 101420239: +: L1MC4a > chr10: 101421203: +: ENST00000370489/ORF1 |
| 9045 | chr17: 60100941: −>chr17: 60088594: − | chr17: 60100941: −: LTR33A > chr17: 60088594: −: ENST00000397786/ORF3 |
| 9046 | chr1: 223998133: −>chr1: 223996866: − | chr1: 223998133: −: ENST00000343537 > chr1: 223996866: −: AluJb/ORF1 |
| 9047 | chr1: 154908672: −>chr1: 154904891: − | chr1: 154908672: −: AluSx4 > chr1: 154904891: −: ENST00000368467/ORF3 |
| 9048 | chr7: 140522194: −>chr7: 140508795: − | chr7: 140522194: −: L1ME1 > chr7: 140508795: −: ENST00000497784/ORF2 |
| 9049 | chr7: 140522194: −>chr7: 140508795: − | chr7: 140522194: −: L1ME1 > chr7: 140508795: −: ENST00000288602/ORF2 |
| 9050 | chr21: 34973474: −>chr21: 34971591: − | chr21: 34973474: −: AluSx1 > chr21: 34971591: −: ENST00000452420/ORF2 |
| 9051 | chr21: 34973474: −>chr21: 34971554: − | chr21: 34973474: −: AluSx1 > chr21: 34971554: −: ENST00000381554/ORF2 |
| 9052 | chr10: 65359043: +>chr10: 65361146: + | chr10: 65359043: +: ENST00000298249 > chr10: 65361146: +: HAL1/ORF1 |
| 9053 | chr10: 65359043: +>chr10: 65361146: + | chr10: 65359043: +: ENST00000373758 > chr10: 65361146: +: HAL1/ORF1 |
| 9054 | chr10: 128215274: −>chr10: 128202508: − | chr10: 128215274: −: L1MB7 > chr10: 128202508: −: ENST00000432642/ORF3 |
| 9055 | chr10: 128215274: −>chr10: 128202508: − | chr10: 128215274: −: L1MB7 > chr10: 128202508: −: ENST00000463082/ORF3 |
| 9056 | chr10: 128215274: −>chr10: 128202508: − | chr10: 128215274: −: L1MB7 > chr10: 128202508: −: ENST00000454341/ORF3 |
| 9057 | chr10: 128215274: −>chr10: 128202508: − | chr10: 128215274: −: L1MB7 > chr10: 128202508: −: ENST00000284694/ORF3 |
| 9058 | chr9: 33035301: +>chr9: 33036572: + | chr9: 33035301: +: AluSq2 > chr9: 33036572: +: ENST00000330899/ORF3 |
| 9059 | chr8: 17097235: −>chr8: 17094882: − | chr8: 17097235: −: AluY > chr8: 17094882: −: ENST00000524358/ORF3 |
| 9060 | chr8: 17097235: −>chr8: 17094882: − | chr8: 17097235: −: AluY > chr8: 17094882: −: ENST00000519918/ORF3 |
| 9061 | chr8: 17097235: −>chr8: 17094882: − | chr8: 17097235: −: AluY > chr8: 17094882: −: ENST00000361272/ORF3 |
| 9062 | chr8: 17097235: −>chr8: 17094882: − | chr8: 17097235: −: AluY > chr8: 17094882: −: ENST00000523917/ORF3 |
| 9063 | chr8: 53483830: −>chr8: 53455005: − | chr8: 53483830: −: MLT2A1 > chr8: 53455005: −: ENST00000358543/ORF2 |
| 9064 | chr1: 44680991: +>chr1: 44684081: + | chr1: 44680991: +: L2b > chr1: 44684081: +: ENST00000361745/ORF2 |
| 9065 | chr1: 44680991: +>chr1: 44684081: + | chr1: 44680991: +: L2b > chr1: 44684081: +: ENST00000372290/ORF2 |
| 9066 | chr1: 44680991: +>chr1: 44683983: + | chr1: 44680991: +: L2b > chr1: 44683983: +: ENST00000361745/ORF2 |
| 9067 | chr12: 45716800: +>chr12: 45725078: + | chr12: 45716800: +: L4 > chr12: 45725078: +: ENST00000425752/ORF3 |
| 9068 | chr5: 171684365: −>chr5: 171661362: − | chr5: 171684365: −: L1PA15 > chr5: 171661362: −: ENST00000393792/ORF3 |
| 9069 | chr2: 9527118: +>chr2: 9528423: + | chr2: 9527118: +: AluY > chr2: 9528423: +: ENST00000281419/ORF1 |
| 9070 | chr11: 73359132: +>chr11: 73360057: + | chr11: 73359132: +: MIRc > chr11: 73360057: +: ENST00000354190/ORF1 |
| 9071 | chr19: 10471638: −>chr19: 10468814: − | chr19: 10471638: −: AluJr > chr19: 10468814: −: ENST00000264818/ORF2 |
| 9072 | chr19: 10471638: −>chr19: 10469978: − | chr19: 10471638: −: AluJr > chr19: 10469978: −: ENST00000264818/ORF2 |
| 9073 | chr10: 89694519: +>chr10: 89711875: + | chr10: 89694519: +: AluSc > chr10: 89711875: +: ENST00000371953/ORF3 |
| 9074 | chr15: 42151606: −>chr15: 42151178: − | chr15: 42151606: −: AluSz > chr15: 42151178: −: ENST00000320955/ORF3 |
| 9075 | chr19: 4703015: −>chr19: 4702728: − | chr19: 4703015: −: MER20 > chr19: 4702728: −: ENST00000594671/ORF2 |
| 9076 | chr7: 55635973: −>chr7: 55588823: − | chr7: 55635973: −: AluY > chr7: 55588823: −: ENST00000285279/ORF3 |
| 9077 | chr16: 4406031: −>chr16: 4405373: − | chr16: 4406031: −: AluSp > chr16: 4405373: −: ENST00000572467/ORF3 |
| 9078 | chrX: 71492529: −>chrX: 71475904: − | chrX: 71492529: −: ENST00000316084 > chrX: 71475904: −: L2b/ORF1 |
| 9079 | chr8: 74573935: −>chr8: 74529686: − | chr8: 74573935: −: L1ME1 > chr8: 74529686: −: ENST00000518981/ORF1 |
| 9080 | chr8: 74573935: −>chr8: 74529686: − | chr8: 74573935: −: L1ME1 > chr8: 74529686: −: ENST00000355780/ORF1 |
| 9081 | chr8: 74573935: −>chr8: 74529686: − | chr8: 74573935: −: L1ME1 > chr8: 74529686: −: ENST00000521210/ORF1 |
| 9082 | chr8: 74573935: −>chr8: 74529686: − | chr8: 74573935: −: L1ME1 > chr8: 74529686: −: ENST00000521447/ORF1 |
| 9083 | chr8: 74573935: −>chr8: 74529686: − | chr8: 74573935: −: L1ME1 > chr8: 74529686: −: ENST00000522695/ORF1 |
| 9084 | chr9: 88264917: −>chr9: 88261333: − | chr9: 88264917: −: L1M6 > chr9: 88261333: −: ENST00000432218/ORF3 |
| 9085 | chr9: 88264917: −>chr9: 88261333: − | chr9: 88264917: −: L1M6 > chr9: 88261333: −: ENST00000376083/ORF3 |
| 9086 | chrX: 19559549: −>chrX: 19555898: − | chrX: 19559549: −: MamRep 137 > chrX: 19555898: −: ENST00000397821/ORF1 |
| 9087 | chrX: 134482809: +>chrX: 134483035: + | chrX: 134482809: +: MER33 > chrX: 134483035: +: ENST00000339249/ORF3 |
| 9088 | chr4: 83752626: −>chr4: 83750211: − | chr4: 83752626: −: MER5A1 > chr4: 83750211: −: ENST00000503937/ORF3 |
| 9089 | chr19: 6365650: +>chr19: 6366269: + | chr19: 6365650: +: AluJb > chr19: 6366269: +: ENST00000596605/ORF3 |
| 9090 | chr19: 6365650: +>chr19: 6366269: + | chr19: 6365650: +: AluJb > chr19: 6366269: +: ENST00000597326/ORF3 |
| 9091 | chr19: 6365650: +>chr19: 6366269: + | chr19: 6365650: +: AluJb > chr19: 6366269: +: ENST00000245816/ORF3 |
| 9092 | chr2: 172723242: −>chr2: 172712459: − | chr2: 172723242: −: SVA_D > chr2: 172712459: −: ENST00000422440/ORF2 |
| 9093 | chr2: 172723242: −>chr2: 172712459: − | chr2: 172723242: −: SVA_D > chr2: 172712459: −: ENST00000426896/ORF2 |
| 9094 | chr2: 172723334: −>chr2: 172712459: − | chr2: 172723334: −: SVA_D > chr2: 172712459: −: ENST00000422440/ORF2 |
| 9095 | chr17: 17815566: −>chr17: 17810845: − | chr17: 17815566: −: SVA_D > chr17: 17810845: −: ENST00000581396/ORF1 |
| 9096 | chr2: 172723242: −>chr2: 172712459: − | chr2: 172723242: −: SVA_D > chr2: 172712459: −: ENST00000475360/ORF2 |
| 9097 | chr12: 7120639: −>chr12: 7092700: − | chr12: 7120639: −: L2b > chr12: 7092700: −: ENST00000535479/ORF1 |
| 9098 | chr8: 113686332: −>chr8: 113678644: − | chr8: 113686332: −: LTR78B > chr8: 113678644: −: ENST00000343508/ORF1 |
| 9099 | chr5: 76108438: +>chr5: 76128515: + | chr5: 76108438: +: SVA_D > chr5: 76128515: +: ENST00000296677/ORF2 |
| 9100 | chr10: 95225471: −>chr10: 95216694: − | chr10: 95225471: −: AluSx > chr10: 95216694: −: ENST00000371488/ORF1 |
| 9101 | chr10: 95225471: −>chr10: 95216694: − | chr10: 95225471: −: AluSx > chr10: 95216694: −: ENST00000371502/ORF1 |
| 9102 | chr10: 95225471: −>chr10: 95216694: − | chr10: 95225471: −: AluSx > chr10: 95216694: −: ENST00000371489/ORF1 |
| 9103 | chr10: 95225471: −>chr10: 95216694: − | chr10: 95225471: −: AluSx > chr10: 95216694: −: ENST00000358334/ORF1 |
| 9104 | chr10: 95225471: −>chr10: 95216694: − | chr10: 95225471: −: AluSx > chr10: 95216694: −: ENST00000371501/ORF1 |
| 9105 | chr10: 95225471: −>chr10: 95216694: − | chr10: 95225471: −: AluSx > chr10: 95216694: −: ENST00000359263/ORF1 |
| 9106 | chr5: 242876: +>chr5: 251107: + | chr5: 242876: +: HERVK9-int > chr5: 251107: +: ENST00000264932/ORF2 |
| 9107 | chr7: 20686997: +>chr7: 20687158: + | chr7: 20686997: +: U2 > chr7: 20687158: +: ENST00000404938/ORF2 |
| 9108 | chr4: 25916293: +>chr4: 25929935: + | chr4: 25916293: +: MIRb > chr4: 25929935: +: ENST00000506197/ORF1 |
| 9109 | chr1: 178806756: +>chr1: 178846633: + | chr1: 178806756: +: L1PA2 > chr1: 178846633: +: ENST00000367635/ORF3 |
| 9110 | chr5: 133691774: −>chr5: 133657594: − | chr5: 133691774: −: MER1A > chr5: 133657594: −: ENST00000265334/ORF2 |
| 9111 | chr5: 133691774: −>chr5: 133686118: − | chr5: 133691774: −: MER1A > chr5: 133686118: −: ENST00000265334/ORF2 |
| 9112 | chr11: 86534635: +>chr11: 86561222: + | chr11: 86534635: +: ENST00000532234 > chr11: 86561222: +: HERV30-int/ORF1 |
| 9113 | chr10: 51747031: +>chr10: 51748511: + | chr10: 51747031: +: THEID > chr10: 51748511: +: ENST00000374056/ORF1 |
| 9114 | chr10: 47219702: −>chr10: 47215080: − | chr10: 47219702: −: ENST00000355232 > chr10: 47215080: −: THE1D/ORF1 |
| 9115 | chr10: 47214974: −>chr10: 47213479: − | chr10: 47214974: −: THE1D > chr10: 47213479: −: ENST00000452145/ORF1 |
| 9116 | chr10: 47232156: −>chr10: 46734639: − | chr10: 47232156: −: ENST00000413193 > chr10: 46734639: −: THE1D/ORF1 |
| 9117 | chr10: 48197195: +>chr10: 48214270: + | chr10: 48197195: +: ENST00000453919 > chr10: 48214270: +: THE1D/ORF1 |
| 9118 | chr10: 51747031: +>chr10: 51749068: + | chr10: 51747031: +: THE1D > chr10: 51749068: +: ENST00000412531/ORF1 |
| 9119 | chr14: 50671969: −>chr14: 50671127: − | chr14: 50671969: −: AluJb > chr14: 50671127: −: ENST00000216373/ORF3 |
| 9120 | chr12: 57081782: −>chr12: 57080459: − | chr12: 57081782: −: ENST00000262033 > chr12: 57080459: −: AluSp/ORF1 |
| 9121 | chr1: 160283437: −>chr1: 160282957: − | chr1: 160283437: −: AluY > chr1: 160282957: −: ENST00000368069/ORF1 |
| 9122 | chr2: 26332775: +>chr2: 26346251: + | chr2: 26332775: +: ENST00000264710 > chr2: 26346251: +: Tigger2/ORF1 |
| 9123 | chr2: 101633566: −>chr2: 101628002: − | chr2: 101633566: −: Tigger3b > chr2: 101628002: −: ENST00000376840/ORF3 |
| 9124 | chr2: 130939522: −>chr2: 130934210: − | chr2: 130939522: −: L2b > chr2: 130934210: −: ENST00000351288/ORF1 |
| 9125 | chr15: 99433697: +>chr15: 99434554: + | chr15: 99433697: +: MER41A > chr15: 99434554: +: ENST00000268035/ORF2 |
| 9126 | chr15: 99433697: +>chr15: 99434554: + | chr15: 99433697: +: MER41A > chr15: 99434554: +: ENST00000558762/ORF2 |
| 9127 | chr15: 99433697: +>chr15: 99434554: + | chr15: 99433697: +: MER41A > chr15: 99434554: +: ENST00000558355/ORF2 |
| 9128 | chr22: 46695582: +>chr22: 46704047: + | chr22: 46695582: +: L2 > chr22: 46704047: +: ENST00000454366/ORF1 |
| 9129 | chr11: 86534635: +>chr11: 86561222: + | chr11: 86534635: +: ENST00000532234 > chr11: 86561222: +: HERV30-int/ORF1 |
| 9130 | chr7: 99257739: −>chr7: 99250402: − | chr7: 99257739: −: LIPA4 > chr7: 99250402: −: ENST00000222982/ORF3 |
| 9131 | chr11: 113632161: −>chr11: 113631640: − | chr11: 113632161: −: AluJb > chr11: 113631640: −: ENST00000535142/ORF1 |
| 9132 | chr11: 113632161: −>chr11: 113631640: − | chr11: 113632161: −: AluJb > chr11: 113631640: −: ENST00000200135/ORF1 |
| 9133 | chr3: 123648191: −>chr3: 123634565: − | chr3: 123648191: −: AluJo > chr3: 123634565: −: ENST00000310351/ORF2 |
| 9134 | chr6: 117763597: −>chr6: 117739669: − | chr6: 117763597: −: THE1B > chr6: 117739669: −: ENST00000368507/ORF1 |
| 9135 | chr6: 117763560: −>chr6: 117739669: − | chr6: 117763560: −: THE1B > chr6: 117739669: −: ENST00000368507/ORF1 |
| 9136 | chr17: 18250810: −>chr17: 18248741: − | chr17: 18250810: −: ENST00000539052 > chr17: 18248741: −: AluSx1/ORF1 |
| 9137 | chr17: 18250810: −>chr17: 18248741: − | chr17: 18250810: −: ENST00000316694 > chr17: 18248741: −: AluSx1/ORF1 |
| 9138 | chr3: 112278355: −>chr3: 112277264: − | chr3: 112278355: −: L2a > chr3: 112277264: −: ENST00000496423/ORF2 |
| 9139 | chr3: 112278355: −>chr3: 112277264: − | chr3: 112278355: −: L2a > chr3: 112277264: −: ENST00000283290/ORF2 |
| 9140 | chr3: 112278355: −>chr3: 112277264: − | chr3: 112278355: −: L2a > chr3: 112277264: −: ENST00000402314/ORF2 |
| 9141 | chr11: 31429090: +>chr11: 31429657: + | chr11: 31429090: +: AluJb > chr11: 31429657: +: ENST00000527731/ORF1 |
| 9142 | chr7: 102793520: +>chr7: 102939015: + | chr7: 102793520: +: HERVE a-int > chr7: 102939015: +: ENST00000249269/ORF2 |
| 9143 | chr14: 52372666: +>chr14: 52417368: + | chr14: 52372666: +: THE1C > chr14: 52417368: +: ENST00000553432/ORF2 |
| 9144 | chr4: 25916293: +>chr4: 25929935: + | chr4: 25916293: +: MIRb > chr4: 25929935: +: ENST00000506197/ORF1 |
| 9145 | chr10: 123733905: −>chr10: 123733596: − | chr10: 123733905: −: MER5A > chr10: 123733596: −: ENST00000369023/ORF1 |
| 9146 | chr10: 123733911: −>chr10: 123733596: − | chr10: 123733911: −: MER5A > chr10: 123733596: −: ENST00000369023/ORF1 |
| 9147 | chr10: 123733944: −>chr10: 123733596: − | chr10: 123733944: −: MER5A > chr10: 123733596: −: ENST00000369023/ORF1 |
| 9148 | chr12: 123076000: +>chr12: 123077407: + | chr12: 123076000: +: ENST00000333479 > chr12: 123077407: +: LTR12C/ORF1 |
| 9149 | chr8: 15471132: +>chr8: 15480589: + | chr8: 15471132: +: THE1B > chr8: 15480589: +: ENST00000382020/ORF3 |
| 9150 | chr8: 15471132: +>chr8: 15480589: + | chr8: 15471132: +: THE1B > chr8: 15480589: +: ENST00000509380/ORF3 |
| 9151 | chr8: 15471132: +>chr8: 15480589: + | chr8: 15471132: +: THE1B > chr8: 15480589: +: ENST00000503731/ORF3 |
| 9152 | chr8: 15471132: +>chr8: 15480589: + | chr8: 15471132: +: THE1B > chr8: 15480589: +: ENST00000515859/ORF3 |
| 9153 | chr8: 15471132: +>chr8: 15480589: + | chr8: 15471132: +: THE1B > chr8: 15480589: +: ENST00000506802/ORF3 |
| 9154 | chr4: 88940723: +>chr4: 88952237: + | chr4: 88940723: +: ENST00000237596 > chr4: 88952237: +: MER47B/ORF1 |
| 9155 | chrX: 149945390: −>chrX: 149944766: − | chrX: 149945390: −: MER4A > chrX: 149944766: −: ENST00000370377/ORF2 |
| 9156 | chr12: 22831248: +>chr12: 22837417: + | chr12: 22831248: +: L2 > chr12: 22837417: +: ENST00000266517/ORF1 |
| 9157 | chr15: 73055759: −>chr15: 73052868: − | chr15: 73055759: −: AluSz > chr15: 73052868: −: ENST00000569534/ORF3 |
| 9158 | chr15: 73055759: −>chr15: 73052868: − | chr15: 73055759: −: AluSz > chr15: 73052868: −: ENST00000311669/ORF3 |
| 9159 | chr15: 73055759: −>chr15: 73052868: − | chr15: 73055759: −: AluSz > chr15: 73052868: −: ENST00000565814/ORF3 |
| 9160 | chr15: 73055759: −>chr15: 73052868: − | chr15: 73055759: −: AluSz > chr15: 73052868: −: ENST00000563907/ORF3 |
| 9161 | chr10: 123903221: +>chr10: 123906127: + | chr10: 123903221: +: ENST00000369005 > chr10: 123906127: +: MSTC/ORF1 |
| 9162 | chr5: 14490172: +>chr5: 14492676: + | chr5: 14490172: +: AluSx3 > chr5: 14492676: +: ENST00000512070/ORF3 |
| 9163 | chr5: 14490172: +>chr5: 14492676: + | chr5: 14490172: +: AluSx3 > chr5: 14492676: +: ENST00000344204/ORF3 |
| 9164 | chr1: 155368337: −>chr1: 155365344: − | chr1: 155368337: −: Tigger3b > chr1: 155365344; −: ENST00000368346/ORF2 |
| 9165 | chr9: 17365375: +>chr9: 17366615: + | chr9: 17365375: +: MSTA > chr9: 17366615: +: ENST00000380647/ORF2 |

### 4.3 Methods

### Total Proteomics:

[0542] For the discovery of fusions or JETs (junctions exon-TE) at the proteome level, publicly available data from lung primary tumors published in Stewart et al. in Cell 2019 (raw files downloaded from PRIDE database-accession code PXD010357) was used.

[0543] Briefly, total protein extracts were obtained from cell lines or tumours and were subsequently digested with trypsin. The resulting peptides were chemically labelled with isobaric tags using TMT, where different samples were analysed in the same experiment, together with an internal reference standard. Peptides were fractionated offline through HPLC and different fractions from each experiment were run on the mass spectrometer separately (Orbitrap Fusion or Orbitrap Fusion Lumos, from Thermo-Fisher). Further details regarding the experimental procedures and analysis are available in the corresponding publications.

[0544] Raw output files from mass spectrometry runs were interrogated using Proteome Discoverer 2.4 (Thermo-Fisher), with Sequest-HT as search engine. Customized databases were used to query the mass spectrometry peaks, both of them including Swissprot and TrEMBL canonical sequences, as well as the in silico translation of lung tumor-specific JET sequences predicted from different datasets (lung TCGA and CCLE). Protein cleavage was specified as Trypsin allowing for a maximum of 2 miss-cleavages. Peptide FDR was set to 1% while protein FDR was allowed to 100%, to focus our search on the investigation of peptides. The mass tolerance for peptides was 4.5 ppm and fragment tolerance 0.02 Da. Carbamidomethylation of Cysteines was set as fixed modification. For the quantification, signals from TMT reporters were obtained using MS2 or MS3 fragmentation, paired with the MS2 scans for peptide identification. Only junctions containing an identified peptide overlapping junction and involving a gene located into plasma membrane according to Uniprot annotation were kept.

### Surface Enrichment Proteomics

[0545] Lung adenocarcinoma cell line H1650 (ATCC) was grown in RPMI media, supplemented with fetal bovine serum and 1% penicillin/streptomycin at 37° C. in an atmosphere at 5% CO2. 10 million cells at around 85% confluency were used for the enrichment of their surface proteome using the Pierce Cell Surface Protein Biotinylation and Isolation kit (Thermo Scientific, catalog number A44390).

[0546] Media was removed from adherent cells, which were washed with PBS and biotinylated using the provided sulfo-NHS-SS-Biotin in the kit. After incubating for 10 minutes at room temperature, the labelling solution was removed and cells were washed twice with ice-cold TBS. Cells were subsequently scrapped in ice-cold TBS, pelleted down by centrifugation at 500 g for 3 minutes at 4° C. and lysed using the provided lysis buffer in the kit, supplemented with protease inhibitors. For the complete disruption of cells, they were incubated in the presence of buffer during 30 minutes on ice. The resulting extract was cleared by centrifugation at 15000 g for 5 minutes at 4° C.

[0547] In order to capture the labelled proteins, the extract was incubated with NeutrAvidin agarose beads on the provided columns in the kit, for 30 minutes at room temperature on an end-over-end rotator. After incubation, unbound material was discarded by centrifugation of column. Beads were cleaned using the supplied Wash Buffer and shortly centrifugating to discard flow-through. A total of 4 washes with Wash Buffer were carried out, followed by 3 more washes with 20 mM Tris-HCl (pH 8). Elution of biotinylated proteins was performed using 100 ul Elution buffer (10 mM Tris-HCl (pH 8) 10 mM DTT), allowing to incubate with beads for 45 minutes at room temperature in an end-over-end rotator. Enriched proteins were finally recovered by centrifugation of column for 2 minutes at 1000 g.

[0548] Eluted was used for following analysis. Proteins were alkylated using 5.5 mM CAA for 30 minutes at room temperature in the dark. After verification of pH (between 7-9), in-solution digestion of proteins was then carried out using Trypsin in a 1:100 ratio (protein:enzyme) over the night, at room temperature. Trypsinization was stopped by acidifing the sample with TFA.

[0549] Resulting peptides were desalted using in-house packed microcolumns of C18 material. Columns were washed with 70% ACN 0.1% TFA and equilibrated with 0.1% TFA. Sample was loaded and further washed with 0.1% TFA, then peptides were eluted with 40% ACN 0.1% TFA.

[0550] Cleaned peptides were then dried down completely prior to their LC-MS/MS analysis in Orbitrap Fusion (Thermo Scientific).

[0551] The following tables 14 and 15 respectively refer to the detailed identification of the proteins (or peptides as the term as used herein as synonyms) of SEQ ID NO 1 to 1423 translated from the fusion transcripts wherein the exon is the donor and the chimeric proteins of SEQ ID NO 1424 to 8202 translated from the fusion transcripts wherein the TE is the donor. This set of (transmembrane) neoantigenic peptides was obtained by selecting the fusion transcripts having an exonic sequence which is annotated in normal proteome databases (such as herein UNIPROT) as belonging to a transcript coding for a transmembrane protein. The breakpoint column gives the position of the breakpoint between the exon-derived aa sequence and the TE-derived aa sequence. The last column in each table refers to the various chimeric proteins (identified by their SEQ ID NO) that are derived from splice variants of the same JET (or fusion).

[0552] Tables 16-18 relates to metafusions. Metafusions are the combinations of 2 fusions.

[0553] For example in the tables below, metaFusion_id: chr1: 154709520:->chr1: 154705620:-| chr1: 154744451:->chr1: 154709564:-is made of the 2 chimeric id that are part of the metafusion. Column's numbers refer to the following items:

| Col. | | |
|---|---|---|
| number | Exon donor (table 16) | TE donor (table 17) |
| 1 | Fusion_id | Fusion_id |
| 2 | common_metafusion_id | common_metafusion_id |
| 3 | Donor_Chromosome_Exon | Donor_Chromosome_TE |
| 4 | Donor_start_Exon | Donor_start_TE |
| 5 | Donor_Breakpoint_Exon | Donor_Breakpoint_TE |
| 6 | Donor_tx_name_Exon | Donor_strand_TE |
| 7 | Donor_strand_Exon | Acceptor_Chromosome_Exon |
| 8 | Acceptor_Chromosome_TE | Acceptor_Breakpoint_Exon |
| 9 | Acceptor_Breakpoint_TE | Acceptor_end_Exon |
| 10 | Acceptor_end_TE | Acceptor_strand_Exon |
| 11 | Acceptor_strand_TE | Acceptor_tx_name_Exon |
| 12 | Tissue | Tissue |

[0554] Table 18 provides the metafusion_id, transcript, ORF and name for metafusion peptides (or proteins used herein as synonyms) of SEQ ID NO:9166 to 10163.

[0555] Tables 19 and 20 respectively refer to the detailed identification of the translated fusion peptides of SEQ ID NO 10164 to 12830 translated from the fusion transcripts wherein the exon is the donor and of the translated fusion peptides of SEQ ID NO 12331 to 21452 translated from the fusion transcripts wherein the TE is the donor. The column numbers refer to the following:

| col | | |
|---|---|---|
| number | exon donor (table 19) | TE donor (table 20) |
| 1 | Fusion_id | Fusion_id |
| 2 | Donor_Chromosome_Exon | Donor_Chromosome_TE |
| 3 | Donor_start_Exon | Donor_start_TE |
| 4 | Donor_Breakpoint_Exon | Donor_Breakpoint_TE |
| 5 | Donor_tx_name_Exon | Donor_strand_TE |
| 6 | Donor_strand_Exon | Acceptor_Chromosome_Exon |
| 7 | Acceptor_Chromosome_TE | Acceptor_Breakpoint_Exon |
| 8 | Acceptor_Breakpoint_TE | Acceptor_end_Exon |
| 9 | Acceptor_end_TE | Acceptor_strand_Exon |
| 10 | Acceptor_strand_TE | Acceptor_tx_name_Exon |
| 11 | Position | Position |
| 12 | Breakpoint_position_in_AA | Breakpoint_position_in_AA |
| 13 | Tissue | Tissue |

[0556] The column 11 (position) gives reference to the SEQ ID of the peptides translated from the corresponding transcripts (mentioned herein as tx in the column) and that are associated to each fusion id. SEQ ID can be obtained by adding 10163 to the numbers of column 11 for table 19 and 12330 to the numbers of column 11 for table 20. Column 12 give the position of the breakpoint for each of the translated peptides of column 11.

[0557] Tables 19bis and 20bis refers to the corresponding peptides obtained from exon or TE donor fusions from tables 19 and 20 and referred to in these tables. The tables provides the fusion id, ORF, names of the transcripts and of the TE involved in the fusion.

Lengthy table referenced here
US20250041412A1-20250206-T00001
Please refer to the end of the specification for access instructions.

Lengthy table referenced here
US20250041412A1-20250206-T00002
Please refer to the end of the specification for access instructions.

Lengthy table referenced here
US20250041412A1-20250206-T00003
Please refer to the end of the specification for access instructions.

Lengthy table referenced here
US20250041412A1-20250206-T00004
Please refer to the end of the specification for access instructions.

Lengthy table referenced here
US20250041412A1-20250206-T00005
Please refer to the end of the specification for access instructions.

Lengthy table referenced here
US20250041412A1-20250206-T00006
Please refer to the end of the specification for access instructions.

Lengthy table referenced here
US20250041412A1-20250206-T00007
Please refer to the end of the specification for access instructions.

Lengthy table referenced here
US20250041412A1-20250206-T00008
Please refer to the end of the specification for access instructions.

Lengthy table referenced here
US20250041412A1-20250206-T00009
Please refer to the end of the specification for access instructions.

### Description of the Sequences:

| Corresponding table and origin of the sequences | SEQ ID NOs |
|---|---|
| Table 14: pJETs from exon donor fusions | 1-1423 |
| Table 15: pJETs from TE donor fusions | 1424-8202 |
| Table 9: pJETS from proteomics | 8203-8259 |
| Table 10 pJETS from proteomics | 8260-8269 |
| Table 11 pJETS from proteomics | 8270-8285 |
| Table 12 pJETS from proteomics | 8286-8387 |
| Table 13 pJETS from proteomics | 8388-9165 |
| Table 18: translated pJETs from metafusions | 9166-10163 |
| Table 19: translated pJETs from exon donor fusions | 10164-12830 |
| Table 20: translated pJETs from TE donor fusions | 12831-21542 |
| Table LUAD: pJETs | 21543-21659 |
| pJETs from FIGS. 11-18 | 21660-21698 |

LENGTHY TABLES
The patent application contains a lengthy table section. A copy of the table is available in electronic form from the USPTO web site (https://seqdata.uspto.gov/?pageRequest=docDetail&DocID=US20250041412A1). An electronic copy of the table will also be available from the USPTO upon request and payment of the fee set forth in 37 CFR 1.19(b)(3).

The application's sequence listing, which the Patent Office published only in electronic form, follows.

SEQUENCE LISTING (21698 sequences)

SEQ ID NO: 1 - protein, 14534 aa, Artificial Sequence
  Synthetic polypeptide
MLKPSGLPGSSSPTRSLMTGSRSTKATPEMDSGLTGATLSPKTSTGAIVVTEHTLPFTSPDKTLASPTSSVVGRTTQSLGVMSSALPESTSRGMTHSEQRTSPSLSPQVNGTPSRNYPATSMVSGLSSPRTRTSSTEGNFTKEASTYTLTVETTSGPVTEKYTVPTETSTTEGDSTETPWDTRYIPVKITSPMKTFADSTASKENAPVSMTPAETTVTDSHTPGRTNPSFGTLYSSFLDLSPKGTPNSRGETSLELILSTTGYPFSSPEPGSAGHSRISTSAPLSSSASVLDNKISETSIFSGQSLTSPLSPGVPEARASTMPNSAIPFSMTLSNAETSAERVRSTISSLGTPSISTKQTAETILTFHAFAETMDIPSTHIAKTLASEWLGSPGTLGGTSTSALTTTSPSTTLVSEETNTHHSTSGKETEGTLNTSMTPLETSAPGEESEMTATLVPTLGFTTLDSKIRSPSQVSSSHPTRELRTTGSTSGRQSSSTAAHGSSDILRATTSSTSKASSWTSESTAQQFSEPQHTQWVETSPSMKTERPPASTSVAAPITTSVPSVVSGFTTLKTSSTKGIWLEETSADTLIGESTAGPTTHQFAVPTGISMTGGSSTRGSQGTTHLLTRATASSETSADLTLATNGVPVSVSPAVSKTAAGSSPPGGTKPSYTMVSSVIPETSSLQSSAFREGTSLGLTPLNTRHPFSSPEPDSAGHTKISTSIPLLSSASVLEDKVSATSTFSHHKATSSITTGTPEISTKTKPSSAVLSSMTLSNAATSPERVRNATSPLTHPSPSGEETAGSVLTLSTSAETTDSPNIHPTGTLTSESSESPSTLSLPSVSGVKTTFSSSTPSTHLFTSGEETEETSNPSVSQPETSVSRVRTTLASTSVPTPVFPTMDTWPTRSAQFSSSHLVSELRATSSTSVTNSTGSALPKISHLTGTATMSQTNRDTFNDSAAPQSTTWPETSPRFKTGLPSATTTVSTSATSLSATVMVSKFTSPATSSMEATSIREPSTTILTTETTNGPGSMAVASTNIPIGKGYITEGRLDTSHLPIGTTASSETSMDFTMAKESVSMSVSPSQSMDAAGSSTPGRTSQFVDTFSDDVYHLTSREITIPRDGTSSALTPQMTATHPPSPDPGSARSTWLGILSSSPSSPTPKVTMSSTFSTQRVTTSMIMDTVETSRWNMPNLPSTTSLTPSNIPTSGAIGKSTLVPLDTPSPATSLEASEGGLPTLSTYPESTNTPSIHLGAHASSESPSTIKLTMASVVKPGSYTPLTFPSIETHIHVSTARMAYSSGSSPEMTAPGETNTGSTWDPTTYITTTDPKDTSSAQVSTPHSVRTLRTTENHPKTESATPAAYSGSPKISSSPNLTSPATKAWTITDTTEHSTQLHYTKLAEKSSGFETQSAPGPVSVVIPTSPTIGSSTLELTSDVPGEPLVLAPSEQTTITLPMATWLSTSLTEEMASTDLDISSPSSPMSTFAIFPPMSTPSHELSKSEADTSAIRNTDSTTLDQHLGIRSLGRTGDLTTVPITPLTTTWTSVIEHSTQAQDTLSATMSPTHVTQSLKDQTSIPASASPSHLTEVYPELGTQGRSSSEATTFWKPSTDTLSREIETGPTNIQSTPPMDNTTTGSSSSGVTLGIAHLPIGTSSPAETSTNMALERRSSTATVSMAGTMGLLVTSAPGRSISQSLGRVSSVLSESTTEGVTDSSKGSSPRLNTQGNTALSSSLEPSYAEGSQMSTSIPLTSSPTTPDVEFIGGSTFWTKEVTTVMTSDISKSSARTESSSATLMSTALGSTENTGKEKLRTASMDLPSPTPSMEVTPWISLTLSNAPNTTDSLDLSHGVHTSSAGTLATDRSLNTGVTRASRLENGSDTSSKSLSMGNSTHTSMTYTEKSEVSSSIHPRPETSAPGAETTLTSTPGNRAISLTLPFSSIPVEEVISTGITSGPDINSAPMTHSPITPPTIVWTSTGTIEQSTQPLHAVSSEKVSVQTQSTPYVNSVAVSASPTHENSVSSGSSTSSPYSSASLESLDSTISRRNAITSWLWDLTTSLPTTTWPSTSLSEALSSGHSGVSNPSSTTTEFPLFSAASTSAAKQRNPETETHGPQNTAASTLNTDASSVTGLSETPVGASISSEVPLPMAITSRSDVSGLTSESTANPSLGTASSAGTKLTRTISLPTSESLVSFRMNKDPWTVSIPLGSHPTTNTETSIPVNSAGPPGLSTVASDVIDTPSDGAESIPTVSFSPSPDTEVTTISHFPEKTTHSFRTISSLTHELTSRVTPIPGDWMSSAMSTKPTGASPSITLGERRTITSAAPTTSPIVLTASFTETSTVSLDNETTVKTSDILDARKTNELPSDSSSSSDLINTSIASSTMDVTKTASISPTSISGMTASSSPSLFSSDRPQVPTSTTETNTATSPSVSSNTYSLDGGSNVGGTPSTLPPFTITHPVETSSALLAWSRPVRTFSTMVSTDTASGENPTSSNSVVTSVPAPGTWTSVGSTTDLPAMGFLKTSPAGEAHSLLASTIEPATAFTPHLSAAVVTGSSATSEASLLTTSESKAIHSSPQTPTTPTSGANWETSATPESLLVVTETSDTTLTSKILVTDTILFSTVSTPPSKFPSTGTLSGASFPTLLPDTPAIPLTATEPTSSLATSFDSTPLVTIASDSLGTVPETTLTMSETSNGDALVLKTVSNPDRSIPGITIQGVTESPLHPSSTSPSKIVAPRNTTYEGSITVALSTLPAGTTGSLVFSQSSENSETTALVDSSAGLERASVMPLTTGSQGMASSGGIRSGSTHSTGTKTFSSLPLTMNPGEVTAMSEITTNRLTATQSTAPKGIPVKPTSAESGLLTPVSASSSPSKAFASLTTAPPTWGIPQSTLTFEFSEVPSLDTKSASLPTPGQSLNTIPDSDASTASSSLSKSPEKNPRARMMTSTKAISASSFQSTGFTETPEGSASPSMAGHEPRVPTSGTGDPRYASESMSYPDPSKASSAMTSTSLASKLTTLFSTGQAARSGSSSSPISLSTEKETSFLSPTASTSRKTSLFLGPSMARQPNILVHLQTSALTLSPTSTLNMSQEEPPELTSSQTIAEEEGTTAETQTLTFTPSETPTSLLPVSSPTEPTARRKSSPETWASSISVPAKTSLVETTDGTLVTTIKMSSQAAQGNSTWPAPAEETGSSPAGTSPGSPEMSTTLKIMSSKEPSISPEIRSTVRNSPWKTPETTVPMETTVEPVTLQSTALGSGSTSISHLPTGTTSPTKSPTENMLATERVSLSPSPPEAWTNLYSGTPGGTRQSLATMSSVSLESPTARSITGTGQQSSPELVSKTTGMEFSMWHGSTGGTTGDTHVSLSTSSNILEDPVTSPNSVSSLTDKSKHKTETWVSTTAIPSTVLNNKIMAAEQQTSRSVDEAYSSTSSWSDQTSGSDITLGASPDVTNTLYITSTAQTTSLVSLPSGDQGITSLTNPSGGKTSSASSVTSPSIGLETLRANVSAVKSDIAPTAGHLSQTSSPAEVSILDVTTAPTPGISTTITTMGTNSISTTTPNPEVGMSTMDSTPATERRTTSTEHPSTWSSTAASDSWTVTDMTSNLKVARSPGTISTMHTTSFLASSTELDSMSTPHGRITVIGTSLVTPSSDASAVKTETSTSERTLSPSDTTASTPISTFSRVQRMSISVPDILSTSWTPSSTEAEDVPVSMVSTDHASTKTDPNTPLSTFLFDSLSTLDWDTGRSLSSATATTSAPQGATTPQELTLETMISPATSQLPFSIGHITSAVTPAAMARSSGVTFSRPDPTSKKAEQTSTQLPTTTSAHPGQVPRSAATTLDVIPHTAKTPDATFQRQGQTALTTEARATSDSWNEKEKSTPSAPWITEMMNSVSEDTIKEVTSSSSVLRTLNTLDINLESGTTSSPSWKSSPYERIAPSESTTDKEAIHPSTNTVETTGWVTSSEHASHSTIPAHSASSKLTSPVVTTSTREQAIVSMSTTTWPESTRARTEPNSFLTIELRDVSPYMDTSSTTQTSIISSPGSTAITKGPRTEITSSKRISSSFLAQSMRSSDSPSEAITRLSNFPAMTESGGMILAMQTSPPGATSLSAPTLDTSATASWTGTPLATTQRFTYSEKTTLFSKGPEDTSQPSPPSVEETSSSSSLVPIHATTSPSNILLTSQGHSPSSTPPVTSVFLSETSGLGKTTDMSRISLEPGTSLPPNLSSTAGEALSTYEASRDTKAIHHSADTAVTNMEATSSEYSPIPGHTKPSKATSPLVTSHIMGDITSSTSVFGSSETTEIETVSSVNQGLQERSTSQVASSATETSTVITHVSSGDATTHVTKTQATFSSGTSISSPHQFITSTNTFTDVSTNPSTSLIMTESSGVTITTQTGPTGAATQGPYLLDTSTMPYLTETPLAVTPDFMQSEKTTLISKGPKDVSWTSPPSVAETSYPSSLTPFLVTTIPPATSTLQGQHTSSPVSATSVLTSGLVKTTDMLNTSMEPVTNSPQNLNNPSNEILATLAATTDIETIHPSINKAVTNMGTASSAHVLHSTLPVSSEPSTATSPMVPASSMGDALASISIPGSETTDIEGEPTSSLTAGRKENSTLQEMNSTTESNIILSNVSVGAITEATKMEVPSFDATFIPTPAQSTKFPDIFSVASSRLSNSPPMTISTHMTTTQTGSSGATSKIPLALDTSTLETSAGTPSVVTEGFAHSKITTAMNNDVKDVSQTNPPFQDEASSPSSQAPVLVTTLPSSVAFTPQWHSTSSPVSMSSVLTSSLVKTAGKVDTSLETVTSSPQSMSNTLDDISVTSAATTDIETTHPSINTVVTNVGTTGSAFESHSTVSAYPEPSKVTSPNVTTSTMEDTTISRSIPKSSKTTRTETETTSSLTPKLRETSISQEITSSTETSTVPYKELTGATTEVSRTDVTSSSSTSFPGPDQSTVSLDISTETNTRLSTSPIMTESAEITITTQTGPHGATSQDTFTMDPSNTTPQAGIHSAMTHGFSQLDVTTLMSRIPQDVSWTSPPSVDKTSSPSSFLSSPAMTTPSLISSTLPEDKLSSPMTSLLTSGLVKITDILRTRLEPVTSSLPNFSSTSDKILATSKDSKDTKEIFPSINTEETNVKANNSGHESHSPALADSETPKATTQMVITTTVGDPAPSTSMPVHGSSETTNIKREPTYFLTPRLRETSTSQESSFPTDTSFLLSKVPTGTITEVSSTGVNSSSKISTPDHDKSTVPPDTFTGEIPRVFTSSIKTKSAEMTITTQASPPESASHSTLPLDTSTTLSQGGTHSTVTQGFPYSEVTTLMGMGPGNVSWMTTPPVEETSSVSSLMSSPAMTSPSPVSSTSPQSIPSSPLPVTALPTSVLVTTTDVLGTTSPESVTSSPPNLSSITHERPATYKDTAHTEAAMHHSTNTAVTNVGTSGSGHKSQSSVLADSETSKATPLMSTTSTLGDTSVSTSTPNISQTNQIQTEPTASLSPRLRESSTSEKTSSTTETNTAFSYVPTGAITQASRTEISSSRTSISDLDRPTIAPDISTGMITRLFTSPIMTKSAEMTVTTQTTTPGATSQGILPWDTSTTLFQGGTHSTVSQGFPHSEITTLRSRTPGDVSWMTTPPVEETSSGFSLMSPSMTSPSPVSSTSPESIPSSPLPVTALLTSVLVTTTNVLGTTSPEPVTSSPPNLSSPTQERLTTYKDTAHTEAMHASMHTNTAVANVGTSISGHESQSSVPADSHTSKATSPMGITFAMGDTSVSTSTPAFFETRIQTESTSSLIPGLRDTRTSEEINTVTETSTVLSEVPTTTTTEVSRTEVITSSRTTISGPDHSKMSPYISTETITRLSTFPFVTGSTEMAITNQTGPIGTISQATLTLDTSSTASWEGTHSPVTQRFPHSEETTTMSRSTKGVSWQSPPSVEETSSPSSPVPLPAITSHSSLYSAVSGSSPTSALPVTSLLTSGRRKTIDMLDTHSELVTSSLPSASSFSGEILTSEASTNTETIHFSENTAETNMGTTNSMHKLHSSVSIHSQPSGHTPPKVTGSMMEDAIVSTSTPGSPETKNVDRDSTSPLTPELKEDSTALVMNSTTESNTVFSSVSLDAATEVSRAEVTYYDPTFMPASAQSTKSPDISPEASSSHSNSPPLTISTHKTIATQTGPSGVTSLGQLTLDTSTIATSAGTPSARTQDFVDSETTSVMNNDLNDVLKTSPFSAEEANSLSSQAPLLVTTSPSPVTSTLQEHSTSSLVSVTSVPTPTLAKITDMDTNLEPVTRSPQNLRNTLATSEATTDTHTMHPSINTAVANVGTTSSPNEFYFTVSPDSDPYKATSAVVITSTSGDSIVSTSMPRSSAMKKIESETTFSLIFRLRETSTSQKIGSSSDTSTVFDKAFTAATTEVSRTELTSSSRTSIQGTEKPTMSPDTSTRSVTMLSTFAGLTKSEERTIATQTGPHRATSQGTLTWDTSITTSQAGTHSAMTHGFSQLDLSTLTSRVPEYISGTSPPSVEKTSSSSSLLSLPAITSPSPVPTTLPESRPSSPVHLTSLPTSGLVKTTDMLASVASLPPNLGSTSHKIPTTSEDIKDTEKMYPSTNIAVTNVGTTTSEKESYSSVPAYSEPPKVTSPMVTSFNIRDTIVSTSMPGSSEITRIEMESTFSLAHGLKGTSTSQDPIVSTEKSAVLHKLTTGATETSRTEVASSRRTSIPGPDHSTESPDISTEVIPSLPISLGITESSNMTIITRTGPPLGSTSQGTFTLDTPTTSSRAGTHSMATQEFPHSEMTTVMNKDPEILSWTIPPSIEKTSFSSSLMPSPAMTSPPVSSTLPKTIHTTPSPMTSLLTPSLVMTTDTLGTSPEPTTSSPPNLSSTSHEILTTDEDTTAIEAMHPSTSTAATNVETTSSGHGSQSSVLADSEKTKATAPMDTTSTMGHTTVSTSMSVSSETTKIKRESTYSLTPGLRETSISQNASFSTDTSIVLSEVPTGTTAEVSRTEVTSSGRTSIPGPSQSTVLPEISTRTMTRLFASPTMTESAEMTIPTQTGPSGSTSQDTLTLDTSTTKSQAKTHSTLTQRFPHSEMTTLMSRGPGDMSWQSSPSLENPSSLPSLLSLPATTSPPPISSTLPVTISSSPLPVTSLLTSSPVTTTDMLHTSPELVTSSPPKLSHTSDERLTTGKDTTNTEAVHPSTNTAASNVEIPSSGHESPSSALADSETSKATSPMFITSTQEDTTVAISTPHFLETSRIQKESISSLSPKLRETGSSVETSSAIETSAVLSEVSIGATTEISRTEVTSSSRTSISGSAESTMLPEISTTRKIIKFPTSPILAESSEMTIKTQTSPPGSTSESTFTLDTSTTPSLVITHSTMTQRLPHSEITTLVSRGAGDVPRPSSLPVEETSPPSSQLSLSAMISPSPVSSTLPASSHSSSASVTSLLTPGQVKTTEVLDASAEPETSSPPSLSSTSVEILATSEVTTDTEKIHPFSNTAVTKVGTSSSGHESPSSVLPDSETTKATSAMGTISIMGDTSVSTLTPALSNTRKIQSEPASSLTTRLRETSTSEETSLATEANTVLSKVSTGATTEVSRTEAISFSRTSMSGPEQSTMSQDISIGTIPRISASSVLTESAKMTITTQTGPSESTLESTLNLNTATTPSWVETHSIVIQGFPHPEMTTSMGRGPGGVSWPSPPFVKETSPPSSPLSLPAVTSPHPVSTTFLAHIPPSPLPVTSLLTSGPATTTDILGTSTEPGTSSSSSLSTTSHERLTTYKDTAHTEAVHPSTNTGGTNVATTSSGYKSQSSVLADSSPMCTTSTMGDTSVLTSTPAFLETRRIQTELASSLTPGLRESSGSEGTSSGTKMSTVLSKVPTGATTEISKEDVTSIPGPAQSTISPDISTRTVSWFSTSPVMTESAEITMNTHTSPLGATTQGTSTLDTSSTTSLTMTHSTISQGFSHSQMSTLMRRGPEDVSWMSPPLLEKTRPSFSLMSSPATTSPSPVSSTLPESISSSPLPVTSLLTSGLAKTTDMLHKSSEPVTNSPANLSSTSVEILATSEVTTDTEKTHPSSNRTVTDVGTSSSGHESTSFVLADSQTSKVTSPMVITSTMEDTSVSTSTPGFFETSRIQTEPTSSLTLGLRKTSSSEGTSLATEMSTVLSGVPTGATAEVSRTEVTSSSRTSISGFAQLTVSPETSTETITRLPTSSIMTESAEMMIKTQTDPPGSTPESTHTVDISTTPNWVETHSTVTQRFSHSEMTTLVSRSPGDMLWPSQSSVEETSSASSLLSLPATTSPSPVSSTLVEDFPSASLPVTSLLNPGLVITTDRMGISREPGTSSTSNLSSTSHERLTTLEDTVDTEDMQPSTHTAVTNVRTSISGHESQSSVLSDSETPKATSPMGTTYTMGETSVSISTSDFFETSRIQIEPTSSLTSGLRETSSSERISSATEGSTVLSEVPSGATTEVSRTEVISSRGTSMSGPDQFTISPDISTEAITRLSTSPIMTESAESAITIETGSPGATSEGTLTLDTSTTTFWSGTHSTASPGFSHSEMTTLMSRTPGDVPWPSLPSVEEASSVSSSLSSPAMTSTSFFSTLPESISSSPHPVTALLTLGPVKTTDMLRTSSEPETSSPPNLSSTSAEILATSEVTKDREKIHPSSNTPVVNVGTVIYKHLSPSSVLADLVTTKPTSPMATTSTLGNTSVSTSTPAFPETMMTQPTSSLTSGLREISTSQETSSATERSASLSGMPTGATTKVSRTEALSLGRTSTPGPAQSTISPEISTETITRISTPLTTTGSAEMTITPKTGHSGASSQGTFTLDTSSRASWPGTHSAATHRSPHSGMTTPMSRGPEDVSWPSRPSVEKTSPPSSLVSLSAVTSPSPLYSTPSESSHSSPLRVTSLFTPVMMKTTDMLDTSLEPVTTSPPSMNITSDESLATSKATMETEAIQLSENTAVTQMGTISARQEFYSSYPGLPEPSKVTSPVVTSSTIKDIVSTTIPASSEITRIEMESTSTLTPTPRETSTSQEIHSATKPSTVPYKALTSATIEDSMTQVMSSSRGPSPDQSTMSQDISTEVITRLSTSPIKTESTEMTITTQTGSPGATSRGTLTLDTSTTFMSGTHSTASQGFSHSQMTALMSRTPGDVPWLSHPSVEEASSASFSLSSPVMTSSSPVSSTLPDSIHSSSLPVTSLLTSGLVKTTELLGTSSEPETSSPPNLSSTSAEILAITEVTTDTEKLEMTNVVTSGYTHESPSSVLADSVTTKATSSMGITYPTGDTNVLTSTPAFSDTSRIQTKSKLSLTPGLMETSISEETSSATEKSTVLSSVPTGATTEVSRTEAISSSRTSIPGPAQSTMSSDTSMETITRISTPLTRKESTDMAITPKTGPSGATSQGTFTLDSSSTASWPGTHSATTQRFPQSVVTTPMSRGPEDVSWPSPLSVEKNSPPSSLVSSSSVTSPSPLYSTPSGSSHSSPVPVTSLFTSIMMKATDMLDASLEPETTSAPNMNITSDESLAASKATTETEAIHVFENTAASHVETTSATEELYSSSPGFSEPTKVISPVVTSSSIRDNMVSTTMPGSSGITRIEIESMSSLTPGLRETRTSQDITSSTETSTVLYKMPSGATPEVSRTEVMPSSRTSIPGPAQSTMSLDISDEVVTRLSTSPIMTESAEITITTQTGYSLATSQVTLPLGTSMTFLSGTHSTMSQGLSHSEMTNLMSRGPESLSWTSPRFVETTRSSSSLTSLPLTTSLSPVSSTLLDSSPSSPLPVTSLILPGLVKTTEVLDTSSEPKTSSSPNLSSTSVEIPATSEIMTDTEKIHPSSNTAVAKVRTSSSVHESHSSVLADSETTITIPSMGITSAVDDTTVFTSNPAFSETRRIPTEPTFSLTPGFRETSTSEETTSITETSAVLYGVPTSATTEVSMTEIMSSNRIHIPDSDQSTMSPDIITEVITRLSSSSMMSESTQMTITTQKSSPGATAQSTLTLATTTAPLARTHSTVPPRFLHSEMTTLMSRSPENPSWKSSLFVEKTSSSSSLLSLPVTTSPSVSSTLPQSIPSSSFSVTSLLTPGMVKTTDTSTEPGTSLSPNLSGTSVEILAASEVTTDTEKIHPSSSMAVTNVGTTSSGHELYSSVSIHSEPSKATYPVGTPSSMAETSISTSMPANFETTGFEAEPFSHLTSGFRKTNMSLDTSSVTPTNTPSSPGSTHLLQSSKTDFTSSAKTSSPDWPPASQYTEIPVDIITPFNASPSITESTGITSFPESRFTMSVTESTHHLSTDLLPSAETISTGTVMPSLSEAMTSFATTGVPRAISGSGSPFSRTESGPGDATLSTIAESLPSSTPVPFSSSTFTTTDSSTIPALHEITSSSATPYRVDTSLGTESSTTEGRLVMVSTLDTSSQPGRTSSSPILDTRMTESVELGTVTSAYQVPSLSTRLTRTDGIMEHITKIPNEAAHRGTIRPVKGPQTSTSPASPKGLHTGGTKRMETTTTALKTTTTALKTTSRATLTTSVYTPTLGTLTPLNASMQMASTIPTEMMITTPYVFPDVPETTSSLATSLGAETSTALPRTTPSVFNRESETTASLVSRSGAERSPVIQTLDVSSSEPDTTASWVIHPAETIPTVSKTTPNFFHSELDTVSSTATSHGADVSSAIPTNISPSELDALTPLVTISGTDTSTTFPTLTKSPHETETRTTWLTHPAETSSTIPRTIPNFSHHESDATPSIATSPGAETSSAIPIMTVSPGAEDLVTSQVTSSGTDRNMTIPTLTLSPGEPKTIASLVTHPEAQTSSAIPTSTISPAVSRLVTSMVTSLAAKTSTTNRALTNSPGEPATTVSLVTHPAQTSPTVPWTTSIFFHSKSDTTPSMTTSHGAESSSAVPTPTVSTEVPGVVTPLVTSSRAVISTTIPILTLSPGEPETTPSMATSHGEEASSAIPTPTVSPGVPGVVTSLVTSSRAVTSTTIPILTFSLGEPETTPSMATSHGTEAGSAVPTVLPEVPGMVTSLVASSRAVTSTTLPTLTLSPGEPETTPSMATSHGAEASSTVPTVSPEVPGVVTSLVTSSSGVNSTSIPTLILSPGELETTPSMATSHGAEASSAVPTPTVSPGVSGVVTPLVTSSRAVTSTTIPILTLSSSEPETTPSMATSHGVEASSAVLTVSPEVPGMVTSLVTSSRAVTSTTIPTLTISSDEPETTTSLVTHSEAKMISAIPTLAVSPTVQGLVTSLVTSSGSETSAFSNLTVASSQPETIDSWVAHPGTEASSVVPTLTVSTGEPFTNISLVTHPAESSSTLPRTTSRFSHSELDTMPSTVTSPEAESSSAISTTISPGIPGVLTSLVTSSGRDISATFPTVPESPHESEATASWVTHPAVTSTTVPRTTPNYSHSEPDTTPSIATSPGAEATSDFPTITVSPDVPDMVTSQVTSSGTDTSITIPTLTLSSGEPETTTSFITYSETHTSSAIPTLPVSPGASKMLTSLVISSGTDSTTTFPTLTETPYEPETTAIQLIHPAETNTMVPRTTPKFSHSKSDTTLPVAITSPGPEASSAVSTTTISPDMSDLVTSLVPSSGTDTSTTFPTLSETPYEPETTATWLTHPAETSTTVSGTIPNFSHRGSDTAPSMVTSPGVDTRSGVPTTTIPPSIPGVVTSQVTSSATDTSTAIPTLTPSPGEPETTASSATHPGTQTGFTVPIRTVPSSEPDTMASWVTHPPQTSTPVSRTTSSFSHSSPDATPVMATSPRTEASSAVLTTISPGAPEMVTSQITSSGAATSTTVPTLTHSPGMPETTALLSTHPRTETSKTFPASTVFPQVSETTASLTIRPGAETSTALPTQTTSSLFTLLVTGTSRVDLSPTASPGVSAKTAPLSTHPGTETSTMIPTSTLSLGLLETTGLLATSSSAETSTSTLTLTVSPAVSGLSSASITTDKPQTVTSWNTETSPSVTSVGPPEFSRTVTGTTMTLIPSEMPTPPKTSHGEGVSPTTILRTTMVEATNLATTGSSPTVAKTTTTFNTLAGSLFTPLTTPGMSTLASESVTSRTSYNHRSWISTTSSYNRRYWTPATSTPVTSTFSPGISTSSIPSSTAATVPFMVPFTLNFTITNLQYEEDMRHPGSRKFNATERELQGLLKPLFRNSSLEYLYSGCRLASLRPEKDSSATAVDAICTHRPDPEDLGLDRERLYWELSNLTNGIQELGPYTLDRNSLYVNGFTHRSSMPTTSTPGTSTVDVGTSGTPSSSPSPTTAGPLLMPFTLNFTITNLQYEEDMRRTGSRKFNTMESVLQGLLKPLFKNTSVGPLYSGCRLTLLRPEKDGAATGVDAICTHRLDPKSPGLNREQLYWELSKLTNDIEELGPYTLDRNSLYVNGFTHQSSVSTTSTPGTSTVDLRTSGTPSSLSSPTIMAAGPLLVPFTLNFTITNLQYGEDMGHPGSRKFNTTERVLQGLLGPIFKNTSVGPLYSGCRLTSLRSEKDGAATGVDAICIHHLDPKSPGLNRERLYWELSQLTNGIKELGPYTLDRNSLYVNGFTHRTSVPTSSTPGTSTVDLGTSGTPFSLPSPATAGPLLVLFTLNFTITNLKYEEDMHRPGSRKFNTTERVLQTLLGPMFKNTSVGLLYSGCRLTLLRSEKDGAATGVDAICTHRLDPKSPGVDREQLYWELSQLTNGIKELGPYTLDRNSLYVNGFTHWIPVPTSSTPGTSTVDLGSGTPSSLPSPTTAGPLLVPFTLNFTITNLKYEEDMHCPGSRKFNTTERVLQSLLGPMFKNTSVGPLYSGCRLTLLRSEKDGAATGVDAICTHRLDPKSPGVDREQLYWELSQLTNGIKELGPYTLDRNSLYVNGFTHQTSAPNTSTPGTSTVDLGTSGTPSSLPSPTSAGPLLVPFTLNFTITNLQYEEDMHHPGSRKFNTTERVLQGLLGPMFKNTSVGLLYSGCRLTLLRPEKNGAATGMDAICSHRLDPKSPGLNREQLYWELSQLTHGIKELGPYTLDRNSLYVNGFTHRSSVAPTSTPGTSTVDLGTSGTPSSLPSPTTAVPLLVPFTLNFTITNLQYGEDMRHPGSRKFNTTERVLQGLLGPLFKNSSVGPLYSGCRLISLRSEKDGAATGVDAICTHHLNPQSPGLDREQLYWQLSQMTNGIKELGPYTLDRNSLYVNGFTHRSSGLTTSTPWTSTVDLGTSGTPSPVPSPTTTGPLLVPFTLNFTITNLQYEENMGHPGSRKFNITESVLQGLLKPLFKSTSVGPLYSGCRLTLLRPEKDGVATRVDAICTHRPDPKIPGLDRQQLYWELSQLTHSITELGPYTLDRDSLYVNGFTQRSSVPTTSTPGTFTVQPETSETPSSLPGPTATGPVLLPFTLNFTITNLQYEEDMRRPGSRKFNTTERVLQGLLMPLFKNTSVSSLYSGCRLTLLRPEKDGAATRVDAVCTHRPDPKSPGLDRERLYWKLSQLTHGITELGPYTLDRHSLYVNGFTHQSSMTTTRTPDTSTMHLATSRTPASLSGPMTASPLLVLFTINFTITNLRYEENMHHPGSRKFNTTERVLQGLLRPVFKNTSVGPLYSGCRLTLLRPKKDGAATKVDAICTYRPDPKSPGLDREQLYWELSQLTHSITELGPYTLDRDSLYVNGFTQRSSVPTTSIPGTPTVDLGTSGTPVSKPGPSAASPLLVLFTLNFTITNLRYEENMQHPGSRKFNTTERVLQGLLRSLFKSTSVGPLYSGCRLTLLRPEKDGTATGVDAICTHHPDPKSPRLDREQLYWELSQLTHNITELGPYALDNDSLFVNGFTHRSSVSTTSTPGTPTVYLGASKTPASIFGPSAASHLLILFTLNFTITNLRYEENMWPGSRKFNTTERVLQGLLRPLFKNTSVGPLYSGCRLTLLRPEKDGEATGVDAICTHRPDPTGPGLDREQLYLELSQLTHSITELGPYTLDRDSLYVNGFTHRSSVPTTSTGVVSEEPFTLNFTINNLRYMADMGQPGSLKFNITDNVMQHLLSPLFQRSSLGARYTGCRVIALRSVKNGAETRVDLLCTYLQPLSGPGLPIKQVFHELSQQTHGITRLGPYSLDKDSLYLNGYNEPGPDEPPTTPKPATTFLPPLSEATTAMGYHLKTLTLNFTISNLQYSPDMGKGSATFNSTEGVLQHLLRPLFQKSSMGPFYLGCQLISLRPEKDGAATGVDTTCTYHPDPVGPGLDIQQLYWELSQLTHGVTQLGFYVLDRDSLFINGYAPQNLSIRGEYQINFHIVNWNLSNPDPTSSEYITLLRDIQDKVTTLYKGSQLHDTFRFCLVTNLTMDSVLVTVKALFSSNLDPSLVEQVFLDKTLNASFHWLGSTYQLVDIHVTEMESSVYQPTSSSSTQHFYLNFTITNLPYSQDKAQPGTTNYQRNKRNIEDALNQLFRNSSIKSYFSDCQVSTFRSVPNRHHTGVDSLCNFSPLARRVDRVAIYEEFLRMTRNGTQLQNFTLDRSSVLVDGYSPNRNEPLTGNSDLPFWAVILIGLAGLLGVITCLICGVLAPQAEEWQNDTAERREGASECRKEFNWGQSERRLATGQPNSRGRSSSHSIPLLAPHPSH

SEQ ID NO: 2 - protein, 6168 aa, Artificial Sequence
  Synthetic polypeptide
MSVFLGPGMPSASLLVNLLSALLILFVFGETEIRFTGQTEFVVNETSTTVIRLIIERIGEPANVTAIVSLYGEDAGDFFDTYAAAFIPAGETNRTVYIAVCDDDLPEPDETFIFHLTLQKPSANVKLGWPRTVTVTILSNDNAFGIISFNMLPSIAVSEPKGRNESMPLTLIREKGTYGMVMVTFEVEGGPNPPDEDLSPVKGNITFPPGRATVIYNLTVLDDEVPENDEIFLIQLKSVEGGAEINTSRNSIEIIIKKNDSPVRFLQSIYLVPEEDHILIIPVVRGKDNNGNLIGSDEYEVSISYAVTTGNSTAHAQQNLDFIDLQPNTTVVFPPFIHESHLKFQIVDDTIPEIAESFHIMLLKDTLQGDAVLISPSVVQVTIKPNDKPYGVLSFNSVLFERTVIIDEDRISRYEEITVVRNGGTHGNVSANWVLTRNSTDPSPVTADIRPSSGVLHFAQGQMLATIPLTVVDDDLPEEAEAYLLQILPHTIRGGAEVSEPAELLFYIQDSDDVYGLITFFPMENQKIESSPGERYLSLSFTRLGGTKGDVRLLYSVLYIPAGAVDPLQAKEGILNISRRNDLIFPEQKTQVTTKLPIRNDAFLQNGAHFLVQLETVELLNIIPLIPPISPRFGEICNISLLVTPAIANGEIGFLSNLPIILHEPEDFAAEVVYIPLHRDGTDGQATVYWSLKPSGFNSKAVTPDDIGPFNGSVLFLSGQSDTTINITIKGDDIPEMNETVTLSLDRVNVENQVLKSGYTSRDLIILENDDPGGVFEFSPASRGPYVIKEGESVELHIIRSRGSLVKQFLHYRVEPRDSNEFYGNTGVLEFKPGEREIVITLLARLDGIPELDEHYWVVLSSHGERESKLGSATIVNITILKNDDPHGIIEFVSDGLIVMINESKGDAIYSAVYDVVRNRGNFGDVSVSWVVSPDFTQDVFPVQGTVVFGDQEFSKNITIYSLPDEIPEEMEEFTVILLNGTGGAKVGNRTTATLRIRRNDDPIYFAEPRVVRVQEGETANFTVLRNGSVDVTCMVQYATKDGKATARERDFIPVEKGETLIFEVGSRQQSISIFVNEDGIPETDEPFYIILLNSTGDTVVYQYGVATVIIEANDDPNGIFSLEPIDKAVEEGKTNAFWILRHRGYFGSVSVSWQLFQNDSALQPGQEFYETSGTVNFMDGEEAKPIILHAFPDKIPEFNEFYFLKLVNISGGSPGPGGQLAETNLQVTVMVPFNDDPFGVFILDPECLEREVAEDVLSEDDMSYITNFTILRQQGVFGDVQLGWEILSSEFPAGLPPMIDFLLVGIFPTTVHLQQHMRRHHSGTDALYFTGLEGAFGTVNPKYHPSRNNTIANFTFSAWVMPNANTNGFIIAKDDGNGSIYYGVKIQTNESHVTLSLHYKTLGSNATYIAKTTVMKYLEESVWLHLLIILEDGIIEFYLDGNAMPRGIKSLKGEAITDGPGILRIGAGINGNDRFTGLMQDVRSYERKLTLEEIYELHAMPAKSDLHPISGYLEFRQGETNKSFIISARDDNDEEGEELFILKLVSVYGGARISEENTTARLTIQKSDNANGLFGFTGACIPEIAEEGSTISCVVERTRGALDYVHVFYTISQIETDGINYLVDDFANASGTITFLPWQRSEVLNIYVLDDDIPELNEYFRVTLVSAIPGDGKLGSTPTSGASIDPEKETTDITIKASDHPYGLLQFSTGLPPQPKDAMTLPASSVPHITVEEEDGEIRLLVIRAQGLLGRVTAEFRTVSLTAFSPEDYQNVAGTLEFQPGERYKYIFINITDNSIPELEKSFKVELLNLEGGVAELFRVDGSGSGDGDMEFFLPTIHKRASLGVASQILVTIAASDHAHGVFEFSPESLFVSGTEPEDGYSTVTLNVIRHHGTLSPVTLHWNIDSDPDGDLAFTSGNITFEIGQTSANITVEILPDEDPELDKAFSVSVLSVSSGSLGAHINATLTVLASDDPYGIFIFSEKNRPVKVEEATQNITLSIIRLKGLMGKVLVSYATLDDMEKPPYFPPNLARATQGRDYIPASGFALFGANQSEATIAISILDDDEPERSESVFIELLNSTLVAKVQSRSIPNSPRLGPKVETIAQLIIIANDDAFGTLQLSAPIVRVAENHVGPIINVTRTGGAFADVSVKFKAVPITAIAGEDYSIASSDVVLLEGETSKAVPIYVINDIYPELEESFLVQLMNETTGGARLGALTEAVIIIEASDDPYGLFGFQITKLIVEEPEFNSVKVNLPIIRNSGTLGNVTVQWVATINGQLATGDLRVVSGNVTFAPGETIQTLLLEVLADDVPEIEEVIQVQLTDASGGGTIGLDRIANIIIPANDDPYGTVAFAQMVYRVQEPLERSSCANITVRRSGGHFGRLLLFYSTSDIDVVALAMEEGQDLLSYYESPIQGVPDPLWRTWMNVSAVGEPLYTCATLCLKEQACSAFSFFSASEGPQCFWMTSWISPAVNNSDFWTYRKNMTRVASLFSGQAVAGSDYEPVTRQWAIMQEGDEFANLTVSILPDDFPEMDESFLISLLEVHLMNISASLKNQPTIGQPNISTVVIALNGDAFGVFVIYNISPNTSEDGLFVEVQEQPQTLVELMIHRTGGSLGQVAVEWRVVGGTATEGLDFIGAGEILTFAEGETKKTVILTILDDSEPEDDESIIVSLVYTEGGSRILPSSDTVRVNILANDNVAGIVSFQTASRSVIGHEGEILQFHVIRTFPGRGNVTVNWKIIGQNLELNFANFSGQLFFPEGSLNTTLFVHLLDDNIPEEKEVYQVILYDVRTQGVPPAGIALLDAQGYAAVLTVEASDEPHGVLNFALSSRFVLLQEANITIQLFINREFGSLGAINVTYTTVPGMLSLKNQTVGNLAEPEVDFVPIIGFLILEEGETAAAINITILEDDVPELEEYFLVNLTYVGLTMAASTSFPPRLDSEGLTAQVIIDANDGARGVIEWQQSRFEVNETHGSLTLVAQRSREPLGHVSLFVYAQNLEAQVGLDYIFTPMILHFADGERYKNVNIMILDDDIPEGDEKFQLILTNPSPGLELGKNTIALIIVLANDDGPGVLSFNNSEHFFLREPTALYVQESVAVLYIVREPAQGLFGTVTVQFIVTEVNSSNESKDLTPSKGYIVLEEGVRFKALQISAILDTEPEMDEYFVCTLFNPTGGARLGVHVQTLITVLQNQAPLGLFSISAVENRATSIDIEEANRTVYLNVSRTNGIDLAVSVQWETVSETAFGMRGMDVVFSVFQSFLDESASGWCFFTLENLIYGIMLRKSSVTVYRWQGIFIPVEDLNIENPKTCEAFNIGFSPYFVITHEERNEEKPSLNSVFTFTSGFKLFLVQTIIILESSQVRYFTSDSQDYLIIASQRDDSELTQVFRWNGGSFVLHQKLPVRGVLTVALFNKGGSVFLAISQANARLNSLLFRWSGSGFINFQEVPVSGTTEVEALSSANDIYLIFAENVFLGDQNSIDIFIWEMGQSSFRYFQSVDFAAVNRIHSFTPASGIAHILLIGQDMSALYCWNSERNQFSFVLEVPSAYDVASVTVKSLNSSKNLIALVGAHSHIYELAYISSHSDFIPSSGELIFEPGEREATIAVNILDDTVPEKEESFKVQLKNPKGGAEIGINDSVTITILSNDDAYGIVAFAQNSLYKQVEEMEQDSLVTLNVERLKGTYGRITIAWEADGSISDIFPTSGVILFTEGQVLSTITLTILADNIPELSEVVIVTLTRITTEGVEDSYKGATIDQDRSKSVITTLPNDSPFGLVGWRAASVFIRVAEPKENTTTLQLQIARDKGLLGDIAIHLRAQPNFLLHVDNQATENEDYVLQETIIIMKENIKEAHAEVSILPDDLPELEEGFIVTITEVNLVNSDFSTGQPSVRRPGMEIAEIMIEENDDPRGIFMFHVTRGAGEVITAYEVPPPLNVLQVPVVRLAGSFGAVNVYWKASPDSAGLEDFKPSHGILEFADKQVTAMIEITIIDDAEFELTETFNISLISVAGGGRLGDDVVVTVVIPQNDSPFGVFGFEEKTVMIDESLSSDDPDSYVTLTVVRSPGGKGTVRLEWTIDEKAKHNLSPLNGTLHFDETESQKTIVLHTLQDTVLEEDRRFTIQLISIDEVEISPVKGSASIIIRGDKRASGEVGIAPSSRHILIGEPSAKYNGTAIISLVRGPGILGEVTVFWRIFPPSVGEFAETSGKLTMRDEQSAVIVVIQALNDDIPEEKSFYEFQLTAVSEGGVLSESSSTANITVVASDSPYGRFAFSHEQLRVSEAQRVNITIIRSSGDFGHVRLWYKTMSGTAEAGLDFVPAAGELLFEAGEMRKSLHVEILDDDYPEGPEEFSLTITKVELQGRGYDFTIQENGLQIDQPPEIGNISIVRIIIMKNDNAEGIIEFDPKYTAFEVEEDVGLIMIPVVRLHGTYGYVTADFISQSSSASPGGVDYILHGSTVTFQHGQNLSFINISIIDDNESEFEEPIEILLTGATGGAVLGRHLVSRIIIAKSDSPFGVIRFLNQSKISIANPNSTMILSLVLERTGGLLGEIQVNWETVGPNSQEALLPQNRDIADPVSGLFYFGEGEGGVRTIILTIYPHEEIEVEETFIIKLHLVKGEAKLDSRAKDVTLTIQEFGDPNGVVQFAPETLSKKTYSEPLALEGPLLITFFVRRVKGTFGEIMVYWELSSEFDITEDFLSTSGFFTIADGESEASFDVHLLPDEVPEIEEDYVIQLVSVEGGAELDLEKSITWFSVYANDDPHGVFALYSDRQSILIGQNLIRSIQINITRLAGTFGDVAVGLRISSDHKEQPIVTENAERQLVVKDGATYKVDVVPIKNQVFLSLGSNFTLQLVTVMLVGGRFYGMPTILQEAKSAVLPVSEKAANSQVGFESTAFQLMNITAGTSHVMISRRGTYGALSVAWTTGYAPGLEIPEFIVVGNMTPTLGSLSFSHGEQRKGVFLWTFPSPGWPEAFVLHLSGVQSSAPGGAQLRSGFIVAEIEPMGVFQFSTSSRNIIVSEDTQMIRLHVQRLFGFHSDLIKVSYQTTAGSAKPLEDFEPVQNGELFFQKFQTEVDFEITIINDQLSEIEEFFYINLTSVEIRGLQKFDVNWSPRLNLDFSVAVITILDNDDLAGMDISFPETTVAVAVDTTLIPVETESTTYLSTSKTTTILQPTNVVAIVTEATGVSAIPEKLVTLHGTPAVSEKPDVATVTANVSIHGTFSLGPSIVYIEEEMKNGTFNTAEVLIRRTGGFTGNVSITVKTFGERCAQMEPNALPFRGIYGISNLTWAVEEEDFEEQTLTLIFLDGERERKVSVQILDDDEPEGQEFFYVFLTNPQGGAQIVEEKDDTGFAAFAMVIITGSDLHNGIIGFSEESQSGLELREGAVMRRLHLIVTRQPNRAFEDVKVFWRVTLNKTVVVLQKDGVNLVEELQSVSGTTTCTMGQTKCFISIELKPEKVPQVEVYFFVELYEATAGAAINNSARFAQIKILESDESQSLVYFSVGSRLAVAHKKATLISLQVARDSGTGLMMSVNFSTQELRSAETIGRTIISPAISGKDFVITEGTLVFEPGQRSTVLDVILTPETGSLNSFPKRFQIVLFDPKGGARIDKVYGTANITLVSDADSQAIWGLADQLHQPVNDDILNRVLHTISMKVATENTDEQLSAMMHLIEKITTEGKIQAFSVASRTLFYEILCSLINPKRKDTRGFSHFAEVTENFAFSLLTNVTCGSPGEKSKTILDSCPYLSILALHWYPQQINGHKFEGKEGDYIRIPERLLDVQDAEIMAGKSTCKLVQFTEYSSQQWFISGNNLPTLKNKVLSLSVKGQSSQLLTNDNEVLYRIYAAEPRIIPQTSLCLLWNQAAASWLSDSQFCKVVEETADYVECACSHMSVYAVYARTDNLSSYNEAFFTSGFICISGLCLAVLSHIFCARYSMFAAKLLTHMMAASLGTQILFLASAYASPQLAEESCSAMAAVTHYLYLCQFSWMLIQSVNFWYVLVMNDEHTERRYLLFFLLSWGLPAFVVILLIVILKGIYHQSMSQIYGLIHGDLCFIPNVYAALFTAALVPLTCLVVVFVVFIHAYQVKPQWKAYDDVFRGRTNAAEIPLILYLFALISVTWLWGGLHMAYRHFWMLVLFVIFNSLQAQRWKGLALSQMRLWSWTFGLMLE

SEQ ID NO: 3 - protein, 6152 aa, Artificial Sequence
  Synthetic polypeptide
MSVFLGPGMPSASLLVNLLSALLILFVFGETEIRFTGQTEFVVNETSTTVIRLIIERIGEPANVTAIVSLYGEDAGDFFDTYAAAFIPAGETNRTVYIAVCDDDLPEPDETFIFHLTLQKPSANVKLGWPRTVTVTILSNDNAFGIISFNMLPSIAVSEPKGRNESMPLTLIREKGTYGMVMVTFEVEGGPNPPDEDLSPVKGNITFPPGRATVIYNLTVLDDEVPENDEIFLIQLKSVEGGAEINTSRNSIEIIIKKNDSPVRFLQSIYLVPEEDHILIIPVVRGKDNNGNLIGSDEYEVSISYAVTTGNSTAHAQQNLDFIDLQPNTTVVFPPFIHESHLKFQIVDDTIPEIAESFHIMLLKDTLQGDAVLISPSVVQVTIKPNDKPYGVLSFNSVLFERTVIIDEDRISRYEEITVVRNGGTHGNVSANWVLTRNSTDPSPVTADIRPSSGVLHFAQGQMLATIPLTVVDDDLPEEAEAYLLQILPHTIRGGAEVSEPAELLFYIQDSDDVYGLITFFPMENQKIESSPGERYLSLSFTRLGGTKGDVRLLYSVLYIPAGAVDPLQAKEGILNISRRNDLIFPEQKTQVTTKLPIRNDAFLQNGAHFLVQLETVELLNIIPLIPPISPRFGEICNISLLVTPAIANGEIGFLSNLPIILHEPEDFAAEVVYIPLHRDGTDGQATVYWSLKPSGFNSKAVTPDDIGPFNGSVLFLSGQSDTTINITIKGDDIPEMNETVTLSLDRVNVENQVLKSGYTSRDLIILENDDPGGVFEFSPASRGPYVIKEGESVELHIIRSRGSLVKQFLHYRVEPRDSNEFYGNTGVLEFKPGEREIVITLLARLDGIPELDEHYWVVLSSHGERESKLGSATIVNITILKNDDPHGIIEFVSDGLIVMINESKGDAIYSAVYDVVRNRGNFGDVSVSWVVSPDFTQDVFPVQGTVVFGDQEFSKNITIYSLPDEIPEEMEEFTVILLNGTGGAKVGNRTTATLRIRRNDDPIYFAEPRVVRVQEGETANFTVLRNGSVDVTCMVQYATKDGKATARERDFIPVEKGETLIFEVGSRQQSISIFVNEDGIPETDEPFYIILLNSTGDTVVYQYGVATVIIEANDDPNGIFSLEPIDKAVEEGKTNAFWILRHRGYFGSVSVSWQLFQNDSALQPGQEFYETSGTVNFMDGEEAKPIILHAFPDKIPEFNEFYFLKLVNISGGSPGPGGQLAETNLQVTVMVPFNDDPFGVFILDPECLEREVAEDVLSEDDMSYITNFTILRQQGVFGDVQLGWEILSSEFPAGLPPMIDFLLVGIFPTTVHLQQHMRRHHSGTDALYFTGLEGAFGTVNPKYHPSRNNTIANFTFSAWVMPNANTNGFIIAKDDGNGSIYYGVKIQTNESHVTLSLHYKTLGSNATYIAKTTVMKYLEESVWLHLLIILEDGIIEFYLDGNAMPRGIKSLKGEAITDGPGILRIGAGINGNDRFTGLMQDVRSYERKLTLEEIYELHAMPAKSDLHPISGYLEFRQGETNKSFIISARDDNDEEGEELFILKLVSVYGGARISEENTTARLTIQKSDNANGLFGFTGACIPEIAEEGSTISCVVERTRGALDYVHVFYTISQIETDGINYLVDDFANASGTITFLPWQRSEVLNIYVLDDDIPELNEYFRVTLVSAIPGDGKLGSTPTSGASIDPEKETTDITIKASDHPYGLLQFSTGLPPQPKDAMTLPASSVPHITVEEEDGEIRLLVIRAQGLLGRVTAEFRTVSLTAFSPEDYQNVAGTLEFQPGERYKYIFINITDNSIPELEKSFKVELLNLEGGVAELFRVDGSGSGDGDMEFFLPTIHKRASLGVASQILVTIAASDHAHGVFEFSPESLFVSGTEPEDGYSTVTLNVIRHHGTLSPVTLHWNIDSDPDGDLAFTSGNITFEIGQTSANITVEILPDEDPELDKAFSVSVLSVSSGSLGAHINATLTVLASDDPYGIFIFSEKNRPVKVEEATQNITLSIIRLKGLMGKVLVSYATLDDMEKPPYFPPNLARATQGRDYIPASGFALFGANQSEATIAISILDDDEPERSESVFIELLNSTLVAKVQSRSIPNSPRLGPKVETIAQLIIIANDDAFGTLQLSAPIVRVAENHVGPIINVTRTGGAFADVSVKFKAVPITAIAGEDYSIASSDVVLLEGETSKAVPIYVINDIYPELEESFLVQLMNETTGGARLGALTEAVIIIEASDDPYGLFGFQITKLIVEEPEFNSVKVNLPIIRNSGTLGNVTVQWVATINGQLATGDLRVVSGNVTFAPGETIQTLLLEVLADDVPEIEEVIQVQLTDASGGGTIGLDRIANIIIPANDDPYGTVAFAQMVYRVQEPLERSSCANITVRRSGGHFGRLLLFYSTSDIDVVALAMEEGQDLLSYYESPIQGVPDPLWRTWMNVSAVGEPLYTCATLCLKEQACSAFSFFSASEGPQCFWMTSWISPAVNNSDFWTYRKNMTRVASLFSGQAVAGSDYEPVTRQWAIMQEGDEFANLTVSILPDDFPEMDESFLISLLEVHLMNISASLKNQPTIGQPNISTVVIALNGDAFGVFVIYNISPNTSEDGLFVEVQEQPQTLVELMIHRTGGSLGQVAVEWRVVGGTATEGLDFIGAGEILTFAEGETKKTVILTILDDSEPEDDESIIVSLVYTEGGSRILPSSDTVRVNILANDNVAGIVSFQTASRSVIGHEGEILQFHVIRTFPGRGNVTVNWKIIGQNLELNFANFSGQLFFPEGSLNTTLFVHLLDDNIPEEKEVYQVILYDVRTQGVPPAGIALLDAQGYAAVLTVEASDEPHGVLNFALSSRFVLLQEANITIQLFINREFGSLGAINVTYTTVPGMLSLKNQTVGNLAEPEVDFVPIIGFLILEEGETAAAINITILEDDVPELEEYFLVNLTYVGLTMAASTSFPPRLDSEGLTAQVIIDANDGARGVIEWQQSRFEVNETHGSLTLVAQRSREPLGHVSLFVYAQNLEAQVGLDYIFTPMILHFADGERYKNVNIMILDDDIPEGDEKFQLILTNPSPGLELGKNTIALIIVLANDDGPGVLSFNNSEHFFLREPTALYVQESVAVLYIVREPAQGLFGTVTVQFIVTEVNSSNESKDLTPSKGYIVLEEGVRFKALQISAILDTEPEMDEYFVCTLFNPTGGARLGVHVQTLITVLQNQAPLGLFSISAVENRATSIDIEEANRTVYLNVSRTNGIDLAVSVQWETVSETAFGMRGMDVVFSVFQSFLDESASGWCFFTLENLIYGIMLRKSSVTVYRWQGIFIPVEDLNIENPKTCEAFNIGFSPYFVITHEERNEEKPSLNSVFTFTSGFKLFLVQTIIILESSQVRYFTSDSQDYLIIASQRDDSELTQVFRWNGGSFVLHQKLPVRGVLTVALFNKGGSVFLAISQANARLNSLLFRWSGSGFINFQEVPVSGTTEVEALSSANDIYLIFAENVFLGDQNSIDIFIWEMGQSSFRYFQSVDFAAVNRIHSFTPASGIAHILLIGQDMSALYCWNSERNQFSFVLEVPSAYDVASVTVKSLNSSKNLIALVGAHSHIYELAYISSHSDFIPSSGELIFEPGEREATIAVNILDDTVPEKEESFKVQLKNPKGGAEIGINDSVTITILSNDDAYGIVAFAQNSLYKQVEEMEQDSLVTLNVERLKGTYGRITIAWEADGSISDIFPTSGVILFTEGQVLSTITLTILADNIPELSEVVIVTLTRITTEGVEDSYKGATIDQDRSKSVITTLPNDSPFGLVGWRAASVFIRVAEPKENTTTLQLQIARDKGLLGDIAIHLRAQPNFLLHVDNQATENEDYVLQETIIIMKENIKEAHAEVSILPDDLPELEEGFIVTITEVNLVNSDFSTGQPSVRRPGMEIAEIMIEENDDPRGIFMFHVTRGAGEVITAYEVPPPLNVLQVPVVRLAGSFGAVNVYWKASPDSAGLEDFKPSHGILEFADKQVTAMIEITIIDDAEFELTETFNISLISVAGGGRLGDDVVVTVVIPQNDSPFGVFGFEEKTVMIDESLSSDDPDSYVTLTVVRSPGGKGTVRLEWTIDEKAKHNLSPLNGTLHFDETESQKTIVLHTLQDTVLEEDRRFTIQLISIDEVEISPVKGSASIIIRGDKRASGEVGIAPSSRHILIGEPSAKYNGTAIISLVRGPGILGEVTVFWRIFPPSVGEFAETSGKLTMRDEQSAVIVVIQALNDDIPEEKSFYEFQLTAVSEGGVLSESSSTANITVVASDSPYGRFAFSHEQLRVSEAQRVNITIIRSSGDFGHVRLWYKTMSGTAEAGLDFVPAAGELLFEAGEMRKSLHVEILDDDYPEGPEEFSLTITKVELQGRGYDFTIQENGLQIDQPPEIGNISIVRIIIMKNDNAEGIIEFDPKYTAFEVEEDVGLIMIPVVRLHGTYGYVTADFISQSSSASPGGVDYILHGSTVTFQHGQNLSFINISIIDDNESEFEEPIEILLTGATGGAVLGRHLVSRIIIAKSDSPFGVIRFLNQSKISIANPNSTMILSLVLERTGGLLGEIQVNWETVGPNSQEALLPQNRDIADPVSGLFYFGEGEGGVRTIILTIYPHEEIEVEETFIIKLHLVKGEAKLDSRAKDVTLTIQEFGDPNGVVQFAPETLSKKTYSEPLALEGPLLITFFVRRVKGTFGEIMVYWELSSEFDITEDFLSTSGFFTIADGESEASFDVHLLPDEVPEIEEDYVIQLVSVEGGAELDLEKSITWFSVYANDDPHGVFALYSDRQSILIGQNLIRSIQINITRLAGTFGDVAVGLRISSDHKEQPIVTENAERQLVVKDGATYKVDVVPIKNQVFLSLGSNFTLQLVTVMLVGGRFYGMPTILQEAKSAVLPVSEKAANSQVGFESTAFQLMNITAGTSHVMISRRGTYGALSVAWTTGYAPGLEIPEFIVVGNMTPTLGSLSFSHGEQRKGVFLWTFPSPGWPEAFVLHLSGVQSSAPGGAQLRSGFIVAEIEPMGVFQFSTSSRNIIVSEDTQMIRLHVQRLFGFHSDLIKVSYQTTAGSAKPLEDFEPVQNGELFFQKFQTEVDFEITIINDQLSEIEEFFYINLTSVEIRGLQKFDVNWSPRLNLDFSVAVITILDNDDLAGMDISFPETTVAVAVDTTLIPVETESTTYLSTSKTTTILQPTNVVAIVTEATGVSAIPEKLVTLHGTPAVSEKPDVATVTANVSIHGTFSLGPSIVYIEEEMKNGTFNTAEVLIRRTGGFTGNVSITVKTFGERCAQMEPNALPFRGIYGISNLTWAVEEEDFEEQTLTLIFLDGERERKVSVQILDDDEPEGQEFFYVFLTNPQGGAQIVEEKDDTGFAAFAMVIITGSDLHNGIIGFSEESQSGLELREGAVMRRLHLIVTRQPNRAFEDVKVFWRVTLNKTVVVLQKDGVNLVEELQSVSGTTTCTMGQTKCFISIELKPEKVPQVEVYFFVELYEATAGAAINNSARFAQIKILESDESQSLVYFSVGSRLAVAHKKATLISLQVARDSGTGLMMSVNFSTQELRSAETIGRTIISPAISGKDFVITEGTLVFEPGQRSTVLDVILTPETGSLNSFPKRFQIVLFDPKGGARIDKVYGTANITLVSDADSQAIWGLADQLHQPVNDDILNRVLHTISMKVATENTDEQLSAMMHLIEKITTEGKIQAFSVASRTLFYEILCSLINPKRKDTRGFSHFAEVTENFAFSLLTNVTCGSPGEKSKTILDSCPYLSILALHWYPQQINGHKFEGKEGDYIRIPERLLDVQDAEIMAGKSTCKLVQFTEYSSQQWFISGNNLPTLKNKVLSLSVKGQSSQLLTNDNEVLYRIYAAEPRIIPQTSLCLLWNQAAASWLSDSQFCKVVEETADYVECACSHMSVYAVYARTDNLSSYNEAFFTSGFICISGLCLAVLSHIFCARYSMFAAKLLTHMMAASLGTQILFLASAYASPQLAEESCSAMAAVTHYLYLCQFSWMLIQSVNFWYVLVMNDEHTERRYLLFFLLSWGLPAFVVILLIVILKGIYHQSMSQIYGLIHGDLCFIPNVYAALFTAALVPLTCLVVVFVVFIHAYQVKPQWKAYDDVFRGRTNAAEIPLILYLFALISVTWLWGGLHMAYRHFWMLVLFVIFNSLQANYVISLK

SEQ ID NO: 4 - protein, 4505 aa, Artificial Sequence
  Synthetic polypeptide
MLTPPLLLLLPLLSALVAAAIDAPKTCSPKQFACRDQITCISKGWRCDGERDCPDGSDEAPEICPQSKAQRCQPNEHNCLGTELCVPMSRLCNGVQDCMDGSDEGPHCRELQGNCSRLGCQHHCVPTLDGPTCYCNSSFQLQADGKTCKDFDECSVYGTCSQLCTNTDGSFICGCVEGYLLQPDNRSCKAKNEPVDRPPVLLIANSQNILATYLSGAQVSTITPTSTRQTTAMDFSYANETVCWVHVGDSAAQTQLKCARMPGLKGFVDEHTINISLSLHHVEQMAIDWLTGNFYFVDDIDDRIFVCNRNGDTCVTLLDLELYNPKGIALDPAMGKVFFTDYGQIPKVERCDMDGQNRTKLVDSKIVFPHGITLDLVSRLVYWADAYLDYIEVVDYEGKGRQTIIQGILIEHLYGLTVFENYLYATNSDNANAQQKTSVIRVNRFNSTEYQVVTRVDKGGALHIYHQRRQPRVRSHACENDQYGKPGGCSDICLLANSHKARTCRCRSGFSLGSDGKSCKKPEHELFLVYGKGRPGIIRGMDMGAKVPDEHMIPIENLMNPRALDFHAETGFIYFADTTSYLIGRQKIDGTERETILKDGIHNVEGVAVDWMGDNLYWTDDGPKKTISVARLEKAAQTRKTLIEGKMTHPRAIVVDPLNGWMYWTDWEEDPKDSRRGRLERAWMDGSHRDIFVTSKTVLWPNGLSLDIPAGRLYWVDAFYDRIETILLNGTDRKIVYEGPELNHAFGLCHHGNYLFWTEYRSGSVYRLERGVGGAPPTVTLLRSERPPIFEIRMYDAQQQQVGTNKCRVNNGGCSSLCLATPGSRQCACAEDQVLDADGVTCLANPSYVPPPQCQPGEFACANSRCIQERWKCDGDNDCLDNSDEAPALCHQHTCPSDRFKCENNRCIPNRWLCDGDNDCGNSEDESNATCSARTCPPNQFSCASGRCIPISWTCDLDDDCGDRSDESASCAYPTCFPLTQFTCNNGRCININWRCDNDNDCGDNSDEAGCSHSCSSTQFKCNSGRCIPEHWTCDGDNDCGDYSDETHANCTNQATRPPGGCHTDEFQCRLDGLCIPLRWRCDGDTDCMDSSDEKSCEGVTHVCDPSVKFGCKDSARCISKAWVCDGDNDCEDNSDEENCESLACRPPSHPCANNTSVCLPPDKLCDGNDDCGDGSDEGELCDQCSLNNGGCSHNCSVAPGEGIVCSCPLGMELGPDNHTCQIQSYCAKHLKCSQKCDQNKFSVKCSCYEGWVLEPDGESCRSLDPFKPFIIFSNRHEIRRIDLHKGDYSVLVPGLRNTIALDFHLSQSALYWTDVVEDKIYRGKLLDNGALTSFEVVIQYGLATPEGLAVDWIAGNIYWVESNLDQIEVAKLDGTLRTTLLAGDIEHPRAIALDPRDGILFWTDWDASLPRIEAASMSGAGRRTVHRETGSGGWPNGLTVDYLEKRILWIDARSDAIYSARYDGSGHMEVLRGHEFLSHPFAVTLYGGEVYWTDWRTNTLAKANKWTGHNVTVVQRTNTQPFDLQVYHPSRQPMAPNPCEANGGQGPCSHLCLINYNRTVSCACPHLMKLHKDNTTCYEFKKFLLYARQMEIRGVDLDAPYYNYIISFTVPDIDNVTVLDYDAREQRVYWSDVRTQAIKRAFINGTGVETVVSADLPNAHGLAVDWVSRNLFWTSYDTNKKQINVARLDGSFKNAVVQGLEQPHGLVVHPLRGKLYWTDGDNISMANMDGSNRTLLFSGQKGPVGLAIDFPESKLYWISSGNHTINRCNLDGSGLEVIDAMRSQLGKATALAIMGDKLWWADQVSEKMGTCSKADGSGSVVLRNSTTLVMHMKVYDESIQLDHKGTNPCSVNNGDCSQLCLPTSETTRSCMCTAGYSLRSGQQACEGVGSFLLYSVHEGIRGIPLDPNDKSDALVPVSGTSLAVGIDFHAENDTIYWVDMGLSTISRAKRDQTWREDVVTNGIGRVEGIAVDWIAGNIYWTDQGFDVIEVARLNGSFRYVVISQGLDKPRAITVHPEKGYLFWTEWGQYPRIERSRLDGTERVVLVNVSISWPNGISVDYQDGKLYWCDARTDKIERIDLETGENREVVLSSNNMDMFSVSVFEDFIYWSDRTHANGSIKRGSKDNATDSVPLRTGIGVQLKDIKVFNRDRQKGTNVCAVANGGCQQLCLYRGRGQRACACAHGMLAEDGASCREYAGYLLYSERTILKSIHLSDERNLNAPVQPFEDPEHMKNVIALAFDYRAGTSPGTPNRIFFSDIHFGNIQQINDDGSRRITIVENVGSVEGLAYHRGWDTLYWTSYTTSTITRHTVDQTRPGAFERETVITMSGDDHPRAFVLDECQNLMFWTNWNEQHPSIMRAALSGANVLTLIEKDIRTPNGLAIDHRAEKLYFSDATLDKIERCEYDGSHRYVILKSEPVHPFGLAVYGEHIFWTDWVRRAVQRANKHVGSNMKLLRVDIPQQPMGIIAVANDTNSCELSPCRINNGGCQDLCLLTHQGHVNCSCRGGRILQDDLTCRAVNSSCRAQDEFECANGECINFSLTCDGVPHCKDKSDEKPSYCNSRRCKKTFRQCSNGRCVSNMLWCNGADDCGDGSDEIPCNKTACGVGEFRCRDGTCIGNSSRCNQFVDCEDASDEMNCSATDCSSYFRLGVKGVLFQPCERTSLCYAPSWVCDGANDCGDYSDERDCPGVKRPRCPLNYFACPSGRCIPMSWTCDKEDDCEHGEDETHCNKFCSEAQFECQNHRCISKQWLCDGSDDCGDGSDEAAHCEGKTCGPSSFSCPGTHVCVPERWLCDGDKDCADGADESIAAGCLYNSTCDDREFMCQNRQCIPKHFVCDHDRDCADGSDESPECEYPTCGPSEFRCANGRCLSSRQWECDGENDCHDQSDEAPKNPHCTSQEHKCNASSQFLCSSGRCVAEALLCNGQDDCGDSSDERGCHINECLSRKLSGCSQDCEDLKIGFKCRCRPGFRLKDDGRTCADVDECSTTFPCSQRCINTHGSYKCLCVEGYAPRGGDPHSCKAVTDEEPFLIFANRYYLRKLNLDGSNYTLLKQGLNNAVALDFDYREQMIYWTDVTTQGSMIRRMHLNGSNVQVLHRTGLSNPDGLAVDWVGGNLYWCDKGRDTIEVSKLNGAYRTVLVSSGLREPRALVVDVQNGYLYWTDWGDHSLIGRIGMDGSSRSVIVDTKITWPNGLTLDYVTERIYWADAREDYIEFASLDGSNRHVVLSQDIPHIFALTLFEDYVYWTDWETKSINRAHKTTGTNKTLLISTLHRPMDLHVFHALRQPDVPNHPCKVNNGGCSNLCLLSPGGGHKCACPTNFYLGSDGRTCVSNCTASQFVCKNDKCIPFWWKCDTEDDCGDHSDEPPDCPEFKCRPGQFQCSTGICTNPAFICDGDNDCQDNSDEANCDIHVCLPSQFKCTNTNRCIPGIFRCNGQDNCGDGEDERDCPEVTCAPNQFQCSITKRCIPRVWVCDRDNDCVDGSDEPANCTQMTCGVDEFRCKDSGRCIPARWKCDGEDDCGDGSDEPKEECDERTCEPYQFRCKNNRCVPGRWQCDYDNDCGDNSDEESCTPRPCSESEFSCANGRCIAGRWKCDGDHDCADGSDEKDCTPRCDMDQFQCKSGHCIPLRWRCDADADCMDGSDEEACGTGVRTCPLDEFQCNNTLCKPLAWKCDGEDDCGDNSDENPEECARFVCPPNRPFRCKNDRVCLWIGRQCDGTDNCGDGTDEEDCEPPTAHTTHCKDKKEFLCRNQRCLSSSLRCNMFDDCGDGSDEEDCSIDPKLTSCATNASICGDEARCVRTEKAAYCACRSGFHTVPGQPGCQDINECLRFGTCSQLCNNTKGGHLCSCARNFMKTHNTCKAEGSEYQVLYIADDNEIRSLFPGHPHSAYEQAFQGDESVRIDAMDVHVKAGRVYWTNWHTGTISYRSLPPAAPPTTSNRHRRQIDRGVTHLNISGLKMPRGIAIDWVAGNVYWTDSGRDVIEVAQMKGENRKTLISGMIDEPHAIVVDPLRGTMYWSDWGNHPKIETAAMDGTLRETLVQDNIQWPTGLAVDYHNERLYWADAKLSVIGSIRLNGTDPIVAADSKRGLSHPFSIDVFEDYIYGVTYINNRVFKIHKFGHSPLVNLTGGLSHASDVVLYHQHKQPEVTNPCDRKKCEWLCLLSPSGPVCTCPNGKRLDNGTCVPVPSPTPPPDAPRPGTCNLQCFNGGSCFLNARRQPKCRCQPRYTGDKCELDQCWEHCRNGGTCAASPSGMPTCRCPTGFTGPKCTQQVCAGYCANNSTCTVNQGNQPQCRCLPGFLGDRCQYRQCSGYCENFGTCQMAADGSRQCRCTAYFEGSRCEVNKCSRCLEGACVVNKQSGDVTCNCTDGRVAPSCLTCVGHCSNGGSCTMNSKMMPECQCPPHMTGPRCEEHVFSQQQPGHIASILIPLLLLLLLVLVAGVVFWYKRRVQGAKGFQHQRMTNGAMNVEIGNPTYKMYEGGEPDDVGGLLDADFALDPDKRRLRASR

SEQ ID NO: 5 - protein, 3996 aa, Artificial Sequence
  Synthetic polypeptide
MASSPELPTEDEQGSWGIDDLHISLQAEQEDTQKKAFTCWINSQLARHTSPSVISDLFTDIKKGHVLLDLLEVLSGQQLPRDKGSNTFQCRINIEHALTFLRNRSIKLINIHVTDIIDGNPSIILGLIWTIILHFHIEKLAQTLSCNYNQPSLDDVSVVDSSPASSPPAKKCSKVQARWQMSARKALLLWAQEQCATYESVNVTDFKSSWRNGMAFLAIIHALRPDLIDMKSVKHRSNKDNLREAFRIAEQELKIPRLLEPEDVDVVDPDEKSIMTYVAQFLQYSKDAPGTGEEAQGKVKDAMGWLTLQKEKLQKLLKDSENDTYFKKYNSLLSFMESFNEEKKSFLDVLSIKRDLDELDKDHLQLREAWDGLDHQINAWKIKLNYALPPPLHQTEAWLQEVEELMDEDLSASQDHSQAVTLIQEKMTLFKSLMDRFEHHSNILLTFENKDENHLPLVPPNKLEEMKRRINNILEKKFILLLEFHYYKCLVLGLVDEVKSKLDIWNIKYGSRESVELLLEDWHKFIEEKEFLARLDTSFQKCGEIYKNLAGECQNINKQYMMVKSDVCMYRKNIYNVKSTLQKVLACWATYVENLRLLRACFEETKKEEIKEVPFETLAQWNLEHATLNEAGNFLVEVSNDVVGSSISKELRRLNKRWRKLVSKTQLEMNLPLMIKKQDQPTFDNSGNILSKEEKATVEFSTDMSVELPENYNQNIKAGEKHEKENEEFTGQLKVAKDVEKLIGQVEIWEAEAKSVLDQDDVDTSMEESLKHLIAKGSMFDELMARSEDMLQMDIQNISSQESFQHVLTTGLQAKIQEAKEKVQINVVKLIAALKNLTDVSPDLDIRLKMEESQKELESYMMRAQQLLGQRESPGELISKHKEALIISNTKSLAKYLKAVEELKNNVTEDIKMSLEEKSRDVCAKWESLHHELSLYVQQLKIDIEKGKLSDNILKLEKQINKEKKLIRRGRTKGLIKEHEACFSEEGCLYQLNHHMEVLRELCEELPSQKSQQEVKRLLKDYEQKIERLLKCASEIHMTLQPTAGGTSKNEGTITTSENRGGDPHSEAPFAKSDNQPSTEKAMEPTMKFSLASVLRPLQEESIMEKDYSASINSLLERYDTYRDILEHHLQNNKFRITSDFSSEEDRSSSCLQAKLTDLQVIKNETDARWKEFEIISLKLENHVNDIKKPFVIKERDTLKERERELQMTLNTRMESLETALRLVLPVEKASLLLCGSDLPLHKMAIQGFHLIDADRIYQHLRNIQDSIAKQIEICNRLEEPGNFVLKELHPFDLHAMQNIILKYKTQFEGMNHRVQRSEDTLKALEDFLASLRTAKLSAEPVTDLSASDTQVAQENTLTVKNKEGEIHLMKDKAKHLDKCLKMLDMSFKDAERGDDTSCENLLDAFSIKLSETHGYGVQEEFTEENKLLEACIFKNNELLKNIQDVQSQISKIGLKDPTVPAVKHRKKSLIRLDKVLDEYEEEKRHLQEMANSLPHFKDGREKTVNQQCQNTVVLWENTKALVTECLEQCGRVLELLKQYQNFKSILTTLIQKEESVISLQASYMGKENLKKRIAEIEIVKEEFNEHLEVVDKINQVCKNLQFYLNKMKTFEEPPFEKEANIIVDRWLDINEKTEDYYENLGRALALWDKLFNLKNVIDEWTEKALQKMELHQLTEEDRERLKEELQVHEQKTSEFSRRVAEIQFLLQSSEIPLELQVMESSILNKMEHVQKCLTGESNCHALSGSTAELREDLDQAKTQIGMTESLLKALSPSDSLEIFTKLEEIQQQILQQKHSMILLENQIGCLTPELSELKKQYESVSDLFNTKKSVLQDHFSKLLNDQCKNFNDWFSNIKVNLKECFESSETKKSVEQKLQKLSDFLTLEGRNSKIKQVDSVLKHVKKHLPKAHVKELISWLVGQEFELEKMESICQARAKELEDSLQQLLRLQDDHRNLRKWLTNQEEKWKGMEEPGEKTELFCQALARKREQFESVAQLNNSLKEYGFTEEEEIIMEATCLMDRYQTLLRQLSEIEEEDKLLPTEDQSFNDLAHDVIHWIKEIKESLMVLNSSEGKMPLEERIQKIKEIILLKPEGDARIETIMKQAESSEAPLVQKTLTDISNQWDNTLHLASTYLSHQEKLLLEGEKYLQSKEDLRLMLIELKKKQEAGFALQHGLQEKKAQLKIYKKFLKKAQDLTSLLKELKSQGNYLLECTKNPSFSEEPWLEIKHLHESLLQQLQDSVQNLDGHVREHDSYQVCVTDLNTTLDNFSKEFVSFSDKPVDQIAVEEKLQKLQELENRLSLQDGTLKKILALAKSVKQNTSSVGQKIIKDDIKSLQCKQKDLENRLASAKQEMECCLNSILKSKRSTEKKGKFTLPGREKQATSDVQESTQESAAVEKLEEDWEINKNFVENVMAVSKNCHHSMYIFESIVKNFISDEMQDSAVEMAMSKQLSLNAQESMKNTEDERKVNELQNQPLELDTMLRNEQLEEIEKLYTQLEAKKAAIKPLEQTECLNKTETGALVLHNIGYSAQHLDNLLQALITLKKNKESQYCVLRDFQEYLAAVESSMKALLTDKESLKVGPLDSVTYLDKIKKFIASIEKEKDSLGNLKIKWENLSNHVTDMDKKLLESQIKQLEHGWEQVEQQIQKKYSQQVVEYDEFTTLMNKVQDTEISLQQQQQHLQLRLKSPEERAGNQSMIALTTDLQATKHGFSVLKGQAELQMKRIWGEKEKKNLEDGINNLKKQWETLEPLHLEAENQIKKCDIRNKMKETILWAKNLLGELNPSIPLLPDDILSQIRKCKVTHDGILARQQSVESLAEEVKDKVPSLTTYEGSDLNNTLEDLRNQYQMLVLKSTQRSQQLEFKLEERSNFFAIIRKFQLMVQESETLIIPRVETAATEAELKHHHVTLEASQKELQEIDSGISTHLQELTNIYEELNVFERLFLEDQLKNLKIRTNRIQRFIQNTCNEVEHKIKFCRQFHEKTSALQEEADSIQRNELLLNQEVNKGVKEEIYNLKDRLTAIKCCILQVLKLKKVFDYIGLNWDFSQLDQLQTQVFEKEKELEEKIKQLDTFEEEHGKYQALLSKMRAIDLQIKKMTEVVLKAPDSSPESRRLNAQILSQRIEKAKCLCDEIIKKLNENKTFDDSFKEKEILQIKLNAEENDKLYKVLQNMVLELSPKELDEKNCQDKLETSLHVLNQIKSQLQQPLLINLEIKHIQNEKDNCEAFQEQVWAEMCSIKAVTAIEKQREENSSEASDVETKLREFEDLQMQLNTSIDLRTNVLNDAYENLTRYKEAVTRAVESITSLEAIIIPYRVDVGNPEESLEMPLRKQEELESTVAHIQDLTEKLGMISSPEAKLQLQYTLQELVSKNSAMKEAFKAQETEAERYLENYKCYRKMEEDIYTNLSKMETVLGQSMSSLPLSYREALERLEQSKALVSNLISTKEELMKLRQILRLLRLRCTENDGICLLKIVSALWEKWLSLLEAAKEWEMWCEELKQEWKFVSEEIEREAIILDNLQEELPEISKTKEAATTEELSELLDCLCQYGENVEKQQLLLTLLLQRIRSIQNVPESSGAVETVPAFQEITSMKERCNKLLQKVQKNKELVQTEIQERHSFTKEIIALKNFFQQTTTSFQNMAFQDHPEKSEQFEELQSILKKGKLTFENIMEKLRIKYSEMYTIVPAEIESQVEECRKALEDIDEKISNEVLKSSPSYAMRRKIEEINNGLHNVEKMLQQKSKNIEKAQEIQKKMWDELDLWHSKLNELDSEVQDIVEQDPGQAQEWMDNLMIPFQQYQQVSQRAECRTSQLNKATVKMEEYSDLLKSTEAWIENTSHLLANPADYDSLRTLSHHASTVQMALEDSEQKHNLLHSIFMDLEDLSIIFETDELTQSIQELSNQVTALQQKIMESLPQIQRMADERWLTPVIPALWEAEAGGSPAVRSWRPAWPTWRNSVSTKNIKINWAWWHVPVIPAIQEAEAGESLEPGRRRLQ

SEQ ID NO: 6 - protein, 3966 aa, Artificial Sequence
  Synthetic polypeptide
MDRGPAAVACTLLLALVACLAPASGQECDSAHFRCGSGHCIPADWRCDGTKDCSDDADEIGCAVVTCQQGYFKCQSEGQCIPNSWVCDQDQDCDDGSDERQDCSQSTCSSHQITCSNGQCIPSEYRCDHVRDCPDGADENDCQYPTCEQLTCDNGACYNTSQKCDWKVDCRDSSDEINCTEICLHNEFSCGNGECIPRAYVCDHDNDCQDGSDEHACNYPTCGGYQFTCPSGRCIYQNWVCDGEDDCKDNGDEDGCESGPHDVHKCSPREWSCPESGRCISIYKVCDGILDCPGREDENNTSTGKYCSMTLCSALNCQYQCHETPYGGACFCPPGYIINHNDSRTCVEFDDCQIWGICDQKCESRPGRHLCHCEEGYILERGQYCKANDSFGEASIIFSNGRDLLIGDIHGRSFRILVESQNRGVAVGVAFHYHLQRVFWTDTVQNKVFSVDINGLNIQEVLNVSVETPENLAVDWVNNKIYLVETKVNRIDMVNLDGSYRVTLITENLGHPRGIAVDPTVGYLFFSDWESLSGEPKLERAFMDGSNRKDLVKTKLGWPAGVTLDMISKRVYWVDSRFDYIETVTYDGIQRKTVVHGGSLIPHPFGVSLFEGQVFFTDWTKMAVLKANKFTETNPQVYYQASLRPYGVTVYHSLRQPYATNPCKDNNGGCEQVCVLSHRTDNDGLGFRCKCTFGFQLDTDERHCIAVQNFLIFSSQVAIRGIPFTLSTQEDVMVPVSGNPSFFVGIDFDAQDSTIFFSDMSKHMIFKQKIDGTGREILAANRVENVESLAFDWISKNLYWTDSHYKSISVMRLADKTRRTVVQYLNNPRSVVVHPFAGYLFFTDWFRPAKIMRAWSDGSHLLPVINTTLGWPNGLAIDWAASRLYWVDAYFDKIEHSTFDGLDRRRLGHIEQMTHPFGLAIFGEHLFFTDWRLGAIIRVRKADGGEMTVIRSGIAYILHLKSYDVNIQTGSNACNQPTHPNGDCSHFCFPVPNFQRVCGCPYGMRLASNHLTCEGDPTNEPPTEQCGLFSFPCKNGRCVPNYYLCDGVDDCHDNSDEQLCGTLNNTCSSSAFTCGHGECIPAHWRCDKRNDCVDGSDEHNCPTHAPASCLDTQYTCDNHQCISKNWVCDTDNDCGDGSDEKNCNSTETCQPSQFNCPNHRCIDLSFVCDGDKDCVDGSDEVGCVLNCTASQFKCASGDKCIGVTNRCDGVFDCSDNSDEAGCPTRPPGMCHSDEFQCQEDGICIPNFWECDGHPDCLYGSDEHNACVPKTCPSSYFHCDNGNCIHRAWLCDRDNDCGDMSDEKDCPTQPFRCPSWQWQCLGHNICVNLSVVCDGIFDCPNGTDESPLCNGNSCSDFNGGCTHECVQEPFGAKCLCPLGFLLANDSKTCEDIDECDILGSCSQHCYNMRGSFRCSCDTGYMLESDGRTCKVTASESLLLLVASQNKIIADSVTSQVHNIYSLVENGSYIVAVDFDSISGRIFWSDATQGKTWSAFQNGTDRRVVFDSSIILTETIAIDWVGRNLYWTDYALETIEVSKIDGSHRTVLISKNLTNPRGLALDPRMNEHLLFWSDWGHHPRIERASMDGSMRTVIVQDKIFWPCGLTIDYPNRLLYFMDSYLDYMDFCDYNGHHRRQVIASDLIIRHPYALTLFEDSVYWTDRATRRVMRANKWHGGNQSVVMYNIQWPLGIVAVHPSKQPNSVNPCAFSRCSHLCLLSSQGPHFYSCVCPSGWSLSPDLLNCLRDDQPFLITVRQHIIFGISLNPEVKSNDAMVPIAGIQNGLDVEFDDAEQYIYWVENPGEIHRVKTDGTNRTVFASISMVGPSMNLALDWISRNLYSTNPRTQSIEVLTLHGDIRYRKTLIANDGTALGVGFPIGITVDPARGKLYWSDQGTDSGVPAKIASANMDGTSVKTLFTGNLEHLECVTLDIEEQKLYWAVTGRGVIERGNVDGTDRMILVHQLSHPWGIAVHDSFLYYTDEQYEVIERVDKATGANKIVLRDNVPNLRGLQVYHRRNAAESSNGCSNNMNACQQICLPVPGGLFSCACATGFKLNPDNRSCSPYNSFIVVSMLSAIRGFSLELSDHSETMVPVAGQGRNALHVDVDVSSGFIYWCDFSSSVASDNAIRRIKPDGSSLMNIVTHGIGENGVRGIAVDWVAGNLYFTNAFVSETLIEVLRINTTYRRVLLKVTVDMPRHIVVDPKNRYLFWADYGQRPKIERSFLDCTNRTVLVSEGIVTPRGLAVDRSDGYVYWVDDSLDIIARIRINGENSEVIRYGSRYPTPYGITVFENSIIWVDRNLKKIFQASKEPENTEPPTVIRDNINWLRDVTIFDKQVQPRSPAEVNNNPCLENNGGCSHLCFALPGLHTPKCDCAFGTLQSDGKNCAISTENFLIFALSNSLRSLHLDPENHSPPFQTINVERTVMSLDYDSVSDRIYFTQNLASGVGQISYATLSSGIHTPTVIASGIGTADGIAFDWITRRIYYSDYLNQMINSMAEDGSNRTVIARVPKPRAIVLDPCQGYLYWADWDTHAKIERATLGGNFRVPIVNSSLVMPSGLTLDYEEDLLYWVDASLQRIERSTLTGVDREVIVNAAVHAFGLTLYGQYIYWTDLYTQRIYRANKYDGSGQIAMTTNLLSQPRGINTVVKNQKQQCNNPCEQFNGGCSHICAPGPNGAECQCPHEGNWYLANNRKHCIVDNGERCGASSFTCSNGRCISEEWKCDNDNDCGDGSDEMESVCALHTCSPTAFTCANGRCVQYSYRCDYYNDCGDGSDEAGCLFRDCNATTEFMCNNRRCIPREFICNGVDNCHDNNTSDEKNCPDRTCQSGYTKCHNSNICIPRVYLCDGDNDCGDNSDENPTYCTTHTCSSSEFQCASGRCIPQHWYCDQETDCFDASDEPASCGHSERTCLADEFKCDGGRCIPSEWICDGDNDCGDMSDEDKRHQCQNQNCSDSEFLCVNDRPPDRRCIPQSWVCDGDVDCTDGYDENQNCTRRTCSENEFTCGYGLCIPKIFRCDRHNDCGDYSDERGCLYQTCQQNQFTCQNGRCISKTFVCDEDNDCGDGSDELMHLCHTPEPTCPPHEFKCDNGRCIEMMKLCNHLDDCLDNSDEKGCGINECHDPSISGCDHNCTDTLTSFYCSCRPGYKLMSDKRTCVDIDECTEMPFVCSQKCENVIGSYICKCAPGYLREPDGKTCRQNSNIEPYLIFSNRYYLRNLTIDGYFYSLILEGLDNVVALDFDRVEKRLYWIDTQRQVIERMFLNKTNKETIINHRLPAAESLAVDWVSRKLYWLDARLDGLFVSDLNGGHRRMLAQHCVDANNTFCFDNPRGLALHPQYGYLYWADWGHRAYIGRVGMDGTNKSVIISTKLEWPNGITIDYTNDLLYWADAHLGYIEYSDLEGHHRHTVYDGALPHPFAITIFEDTIYWTDWNTRTVEKGNKYDGSNRQTLVNTTHRPFDIHVYHPYRQPIVSNPCGTNNGGCSHLCLIKPGGKGFTCECPDDFRTLQLSGSTYCMPMCSSTQFLCANNEKCIPIWWKCDGQKDCSDGSDELALCPQRFCRLGQFQCSDGNCTSPQTLCNAHQNCPDGSDEDRLLCENHHCDSNEWQCANKRCIPESWQCDTFNDCEDNSDEDSSHCASRTCRPGQFRCANGRCIPQAWKCDVDNDCGDHSDEPIEECMSSAHLCDNFTEFSCKTNYRCIPKWAVCNGVDDCRDNSDEQGCEERTCHPVGDFRCKNHHCIPLRWQCDGQNDCGDNSDEENCAPRECTESEFRCVNQQCIPSRWICDHYNDCGDNSDERDCEMRTCHPEYFQCTSGHCVHSELKCDGSADCLDASDEADCPTRFPDGAYCQATMFECKNHVCIPPYWKCDGDDDCGDGSDEELHLCLDVPCNSPNRFRCDNNRCIYSHEVCNGVDDCGDGTDETEEHCRKPTPKPCTEYEYKCGNGHCIPHDNVCDDADDCGDWSDELGCRKRR

SEQ ID NO: 7 - protein, 3963 aa, Artificial Sequence
  Synthetic polypeptide
MASSPELPTEDEQGSWGIDDLHISLQAEQEDTQKKAFTCWINSQLARHTSPSVISDLFTDIKKGHVLLDLLEVLSGQQLPRDKGSNTFQCRINIEHALTFLRNRSIKLINIHVTDIIDGNPSIILGLIWTIILHFHIEKLAQTLSCNYNQPSLDDVSVVDSSPASSPPAKKCSKVQARWQMSARKALLLWAQEQCATYESVNVTDFKSSWRNGMAFLAIIHALRPDLIDMKSVKHRSNKDNLREAFRIAEQELKIPRLLEPEDVDVVDPDEKSIMTYVAQFLQYSKDAPGTGEEAQGKVKDAMGWLTLQKEKLQKLLKDSENDTYFKKYNSLLSFMESFNEEKKSFLDVLSIKRDLDELDKDHLQLREAWDGLDHQINAWKIKLNYALPPPLHQTEAWLQEVEELMDEDLSASQDHSQAVTLIQEKMTLFKSLMDRFEHHSNILLTFENKDENHLPLVPPNKLEEMKRRINNILEKKFILLLEFHYYKCLVLGLVDEVKSKLDIWNIKYGSRESVELLLEDWHKFIEEKEFLARLDTSFQKCGEIYKNLAGECQNINKQYMMVKSDVCMYRKNIYNVKSTLQKVLACWATYVENLRLLRACFEETKKEEIKEVPFETLAQWNLEHATLNEAGNFLVEVSNDVVGSSISKELRRLNKRWRKLVSKTQLEMNLPLMIKKQDQPTFDNSGNILSKEEKATVEFSTDMSVELPENYNQNIKAGEKHEKENEEFTGQLKVAKDVEKLIGQVEIWEAEAKSVLDQDDVDTSMEESLKHLIAKGSMFDELMARSEDMLQMDIQNISSQESFQHVLTTGLQAKIQEAKEKVQINVVKLIAALKNLTDVSPDLDIRLKMEESQKELESYMMRAQQLLGQRESPGELISKHKEALIISNTKSLAKYLKAVEELKNNVTEDIKMSLEEKSRDVCAKWESLHHELSLYVQQLKIDIEKGKLSDNILKLEKQINKEKKLIRRGRTKGLIKEHEACFSEEGCLYQLNHHMEVLRELCEELPSQKSQQEVKRLLKDYEQKIERLLKCASEIHMTLQPTAGGTSKNEGTITTSENRGGDPHSEAPFAKSDNQPSTEKAMEPTMKFSLASVLRPLQEESIMEKDYSASINSLLERYDTYRDILEHHLQNNKFRITSDFSSEEDRSSSCLQAKLTDLQVIKNETDARWKEFEIISLKLENHVNDIKKPFVIKERDTLKERERELQMTLNTRMESLETALRLVLPVEKASLLLCGSDLPLHKMAIQGFHLIDADRIYQHLRNIQDSIAKQIEICNRLEEPGNFVLKELHPFDLHAMQNIILKYKTQFEGMNHRVQRSEDTLKALEDFLASLRTAKLSAEPVTDLSASDTQVAQENTLTVKNKEGEIHLMKDKAKHLDKCLKMLDMSFKDAERGDDTSCENLLDAFSIKLSETHGYGVQEEFTEENKLLEACIFKNNELLKNIQDVQSQISKIGLKDPTVPAVKHRKKSLIRLDKVLDEYEEEKRHLQEMANSLPHFKDGREKTVNQQCQNTVVLWENTKALVTECLEQCGRVLELLKQYQNFKSILTTLIQKEESVISLQASYMGKENLKKRIAEIEIVKEEFNEHLEVVDKINQVCKNLQFYLNKMKTFEEPPFEKEANIIVDRWLDINEKTEDYYENLGRALALWDKLFNLKNVIDEWTEKALQKMELHQLTEEDRERLKEELQVHEQKTSEFSRRVAEIQFLLQSSEIPLELQVMESSILNKMEHVQKCLTGESNCHALSGSTAELREDLDQAKTQIGMTESLLKALSPSDSLEIFTKLEEIQQQILQQKHSMILLENQIGCLTPELSELKKQYESVSDLFNTKKSVLQDHFSKLLNDQCKNFNDWFSNIKVNLKECFESSETKKSVEQKLQKLSDFLTLEGRNSKIKQVDSVLKHVKKHLPKAHVKELISWLVGQEFELEKMESICQARAKELEDSLQQLLRLQDDHRNLRKWLTNQEEKWKGMEEPGEKTELFCQALARKREQFESVAQLNNSLKEYGFTEEEEIIMEATCLMDRYQTLLRQLSEIEEEDKLLPTEDQSFNDLAHDVIHWIKEIKESLMVLNSSEGKMPLEERIQKIKEIILLKPEGDARIETIMKQAESSEAPLVQKTLTDISNQWDNTLHLASTYLSHQEKLLLEGEKYLQSKEDLRLMLIELKKKQEAGFALQHGLQEKKAQLKIYKKFLKKAQDLTSLLKELKSQGNYLLECTKNPSFSEEPWLEIKHLHESLLQQLQDSVQNLDGHVREHDSYQVCVTDLNTTLDNFSKEFVSFSDKPVDQIAVEEKLQKLQELENRLSLQDGTLKKILALAKSVKQNTSSVGQKIIKDDIKSLQCKQKDLENRLASAKQEMECCLNSILKSKRSTEKKGKFTLPGREKQATSDVQESTQESAAVEKLEEDWEINKDSAVEMAMSKQLSLNAQESMKNTEDERKVNELQNQPLELDTMLRNEQLEEIEKLYTQLEAKKAAIKPLEQTECLNKTETGALVLHNIGYSAQHLDNLLQALITLKKNKESQYCVLRDFQEYLAAVESSMKALLTDKESLKVGPLDSVTYLDKIKKFIASIEKEKDSLGNLKIKWENLSNHVTDMDKKLLESQIKQLEHGWEQVEQQIQKKYSQQVVEYDEFTTLMNKVQDTEISLQQQQQHLQLRLKSPEERAGNQSMIALTTDLQATKHGFSVLKGQAELQMKRIWGEKEKKNLEDGINNLKKQWETLEPLHLEAENQIKKCDIRNKMKETILWAKNLLGELNPSIPLLPDDILSQIRKCKVTHDGILARQQSVESLAEEVKDKVPSLTTYEGSDLNNTLEDLRNQYQMLVLKSTQRSQQLEFKLEERSNFFAIIRKFQLMVQESETLIIPRVETAATEAELKHHHVTLEASQKELQEIDSGISTHLQELTNIYEELNVFERLFLEDQLKNLKIRTNRIQRFIQNTCNEVEHKIKFCRQFHEKTSALQEEADSIQRNELLLNQEVNKGVKEEIYNLKDRLTAIKCCILQVLKLKKVFDYIGLNWDFSQLDQLQTQVFEKEKELEEKIKQLDTFEEEHGKYQALLSKMRAIDLQIKKMTEVVLKAPDSSPESRRLNAQILSQRIEKAKCLCDEIIKKLNENKTFDDSFKEKEILQIKLNAEENDKLYKVLQNMVLELSPKELDEKNCQDKLETSLHVLNQIKSQLQQPLLINLEIKHIQNEKDNCEAFQEQVWAEMCSIKAVTAIEKQREENSSEASDVETKLREFEDLQMQLNTSIDLRTNVLNDAYENLTRYKEAVTRAVESITSLEAIIIPYRVDVGNPEESLEMPLRKQEELESTVAHIQDLTEKLGMISSPEAKLQLQYTLQELVSKNSAMKEAFKAQETEAERYLENYKCYRKMEEDIYTNLSKMETVLGQSMSSLPLSYREALERLEQSKALVSNLISTKEELMKLRQILRLLRLRCTENDGICLLKIVSALWEKWLSLLEAAKEWEMWCEELKQEWKFVSEEIEREAIILDNLQEELPEISKTKEAATTEELSELLDCLCQYGENVEKQQLLLTLLLQRIRSIQNVPESSGAVETVPAFQEITSMKERCNKLLQKVQKNKELVQTEIQERHSFTKEIIALKNFFQQTTTSFQNMAFQDHPEKSEQFEELQSILKKGKLTFENIMEKLRIKYSEMYTIVPAEIESQVEECRKALEDIDEKISNEVLKSSPSYAMRRKIEEINNGLHNVEKMLQQKSKNIEKAQEIQKKMWDELDLWHSKLNELDSEVQDIVEQDPGQAQEWMDNLMIPFQQYQQVSQRAECRTSQLNKATVKMEEYSDLLKSTEAWIENTSHLLANPADYDSLRTLSHHASTVQMALEDSEQKHNLLHSIFMDLEDLSIIFETDELTQSIQELSNQVTALQQKIMESLPQIQRMADERWLTPVIPALWEAEAGGSPAVRSWRPAWPTWRNSVSTKNIKINWAWWHVPVIPAIQEAEAGESLEPGRRRLQ

SEQ ID NO: 8 - protein, 3963 aa, Artificial Sequence; identical to SEQ ID NO: 7
  Synthetic polypeptide

SEQ ID NO: 9 - protein, 3416 aa, Artificial Sequence
  Synthetic polypeptide
MTAWLISLMSIEVLLLAVRHLSLHIEPEEGSLAGGTWITVIFDGLELGVLYPNNGSQLEIHLVNVNMVVPALRSVPCDVFPVFLDLPVVTCRTRSVLSEAHEGLYFLEAYFGGQLVSSPNPGPRDSCTFKFSKAQTPIVHQVYPPSGVPGKLIHVYGWIITGRLETFDFDAEYIDSPVILEAQGDKWVTPCSLINRQMGSCYPIQEDHGLGTLQCHVEGDYIGSQNVSFSVFNKGKSMVHKKAWLISAKQDLFLYQTHSEILSVFPETGSLGGRTNITITGDFFDNSAQVTIAGIPCDIRHVSPRKIECTTRAPGKDVRLTTPQPGNRGLLFEVGDAVEGLELTEATPGYRWQIVPNASSPFGFWSQEGQPFRARLSGFFVAPETNNYTFWIQADSQASLHFSWSEEPRTKVKVASISVGTADWFDSWEQNRDEGTWQQKTPKLELLGGAMYYLEAEHHGIAPSRGMRIGVQIHNTWLNPDVVTTYLREKHQIRVRAQRLPEVQVLNVSGRGNFFLTWDNVSSQPIPANATAHLIQTTIEELLAVKCKLEPLWSNILLRLGFERGPEVSNSDGDLTSGTEPFCGRFSLRQPRHLVLTPPAAQKGYRLDQYTHLCLAYKGHMNKILKMIVSFTIGFQNMVKNTTCDWSLTRTSPESWQFDCTDLWETCVRCFGDLQPPPANSPVLVHQINLLPLAQETGLFYVDEIIIADTNVTVSQADSGTARPGGNLVESVSVVGSPPVYSVTSWLAGCGTELPLITARSVPTEGTEEGSGLVLVTTQRRQRTSPPLGGHFRIQLPNTVISDVPVQISAHHLHQLLQNNADDFTSRYLNASDFTVKEDLYTCYEHVWTLSWSTQIGDLPNFIRVSDENLTGVNPAAATRVVYDGGVFLGPIFGDMLATANQHTQVVVRVNDVPAHCPGSCSFQYLQGSTPCVHSVWYSIDGDINLMIYITGTGFSGDSQFLQVTVNKTSCKVIFSNQTNVVCQTDLLPVGMHRILMLVRPSGLAISATGEDLFLNVKPRLDMVEPSRAADIGGLWATIRGSSLEGVSLILFGSYSCAINVATSNSSRIQCKVPPRGKDGRIVNVTVIRGDYSAVLPRAFTYVSSLNPVIVTLSRNISNIAGGETLVIGVARLMNYTDLDVEVHVQDALAPVHTQSAWGLEVALPPLPAGLHRISVSINGVSIHSQGVDLHIQYLTEVFSIEPCCGSLLGGTILSISGIGFSRDPALVWVLVGNRSCDIVNLTEASIWCETLPAPQIPDAGAPTVPAAVEVWAGNRFFARGPSPSLVGKGFTFMYEAAATPVVTAMQGEITNSSLSLHVGGSNLSNSVILLGNLNCDVETQSFQGNVSLSGCSIPLHSLEAGIYPLQVRQKQMGFANMSVVLQQFAVMPRIMAIFPSQGSACGGTILTVRGLLLNSRRRSVRVDLSGPFTCVILSLGDHTILCQVSLEGDPLPGASFSLNVTVLVNGLTSECQGNCTLFIREEASPVMDALSTNTSGSLTTVLIRGQRLATTADEPMVFVDDQLPCNVTFFNASHVVCQTRDLAPGPHYLSVFYTRNGYACSGNVSRHFYIMPQVFHYFPKNFSLHGGSLLTIEGTGLRGQNTTSVYIDQQTCLTVNIGAELIRCIVPTGNGSVALEIEVDGLWYHIGVIGYNKAFTPELISISQSDDILTFAVAQISGAANIDIFIGMSPCVGVSGNHTVLQCVVPSLPAGEYHVRGYDCIRGWASSALVFTSRVIITAVTENFGCLGGRLVHVFGAGFSPGNVSAAVCGAPCRVLANATVSAFSCLVLPLDVSLAFLCGLKREEDSCEAARHTYVQCDLTVAMATEQLLESWPYLYICEESSQCLFVPDHWAESMFPSFSGLFISPKLERDEVLIYNSSCNITMETEAEMECETPNQPITVKITEIRKRWGQNTQGNFSLQFCRRWSRTHSWFPERLPQDGDNVTVENGQLLLLDTNTSILNLLHIKGGKLIFMAPGPIELRAHAILVSDGGELRIGSEDKPFQGRAQITLYGSSYSTPFFPYGVKFLAVRNGTLSLHGSLPEVIVTCLRATAHALDTVLALEDAVDWNPGDEVVIISGTGVKGAKPMEEIVTVETVQDTDLYLKSPLRYSHNFTENWVAGEHHILKATVALLSRSITIQGNLTNEREKLLVSCQEANAPEGNLQHCLYSMSEKMLGSRDMGARVIVQSFPEEPSQVQLKGVQFQVLGQAFHKHLSSLTLVGAMRESFIQGCTVRNSFSRGLSMCGTLGLKVDSNVFYNILGHALLVGTCTEMRYISWEAIHGRKDDWSGHGNIIRNNVIIQVSGAEGLSNPEMLTPSGIYICSPTNVIEGNRVCGAGYGYFFHLMTNQTSQAPLLSFTQNIAHSCTRYGLFVYPKFQPPWDNVTGTTLFQSFTVWESAGGAQIFRSSNLRLKNFKVYSCRDFGIDVLESDANTSVTDSLLLGHFAHKGSLCMSSGIKTPKRWELMVSNTTFVNFDLINCVAIRTCSDCSQGQGGFTVKTSQLKFTNSSNLVAFPFPHAAILEDLDGSLSGKNRSHILASMETLSASCLVNSSFGRVVHGSACGGGVLFHRMSIGLANTPEVSYDLTMTDSRNKTTTVNYVRDTLSNPRGWMALLLDQETYSLQSENLWINRSLQYSATFDNFAPGNYLLLVHTDLPPYPDILLRCGSRVGLSFPFLPSPGQNQGCDWFFNSQLRQLTYLVSGEGQVQVILRVKEGMPPTISASTSAPESALKWSLPETWQGVEEGWGGYNNTIPGPGDDVLILPNRTVLVDTDLPFFKGLYVMGTLDFPVDRSNVLSVACMVIAGGELKVGTLENPLEKEQKLLILLRASEGVFCDRMNGIHIDPGTIGVYGKVHLYSAYPKNSWTHLGADIASGNERIIVEDAVDWRPHDKIVLSSSSYEPHEAEVLTVKEVKGHHVRIYERLKHRHIGSVHVTEDGRHIRLAAEVGLLTRNIQIQPDVSCRGRLFVGSFRKSSREEFSGVLQLLNVEIQNFGSPLYSSVEFSNVSAGSWIISSTLHQSCGGGIHAAASHGVLLNDNIVFGTAGHGIDLEGQAYTVTNNLVVLMTQPAWSTIWVAGIKVNQVKDINLHGNVVAGSERLGFHIRGHKCSSCELLWSDNVAHSSLHGLHLYKESGLDNCTRISGFLAFKNFDYGAMLHVENSVEIENITLVDNTIGLLAVVYVFSAPQNSVKKVQIVLRNSVIVATSSSFDCIQDKVKPHSANLTSTDRAPSNPRGGRIGILWPVFTSEPNQWPQEPWHKVRNDHSISGIMKLQDVTFSSFVKSCYSDDLDVCILPNAENSGIMHPITAERTRMLKIKDKNKFYFPSLQPRKDLGKVVCPELDCASPRKYLFKDLDGRALGLPPPVSVFPKTEAEWTASFFNAGPRLKYHQMLMTSNLYPQPRLDPEIWSSIAN

SEQ ID NO: 10 - protein, 3416 aa, Artificial Sequence; identical to SEQ ID NO: 9
  Synthetic polypeptide

SEQ ID NO: 11 - protein, 1986 aa, Artificial Sequence
  Synthetic polypeptide
MGPGARGRRRRRRPMSPPPPPPPVRALPLLLLLAGPGAAAPPCLDGSPCANGGRCTQLPSREAACLCPPGWVGERCQLEDPCHSGPCAGRGVCQSSVVAGTARFSCRCPRGFRGPDCSLPDPCLSSPCAHGARCSVGPDGRFLCSCPPGYQGRSCRSDVDECRVGEPCRHGGTCLNTPGSFRCQCPAGYTGPLCENPAVPCAPSPCRNGGTCRQSGDLTYDCACLPGFEGQNCEVNVDDCPGHRCLNGGTCVDGVNTYNCQCPPEWTGQFCTEDVDECQLQPNACHNGGTCFNTLGGHSCVCVNGWTGESCSQNIDDCATAVCFHGATCHDRVASFYCACPMGKTGLLCHLDDACVSNPCHEDAICDTNPVNGRAICTCPPGFTGGACDQDVDECSIGANPCEHLGRCVNTQGSFLCQCGRGYTGPRCETDVNECLSGPCRNQATCLDRIGQFTCICMAGFTGTYCEVDIDECQSSPCVNGGVCKDRVNGFSCTCPSGFSGSTCQLDVDECASTPCRNGAKCVDQPDGYECRCAEGFEGTLCDRNVDDCSPDPCHHGRCVDGIASFSCACAPGYTGTRCESQVDECRSQPCRHGGKCLDLVDKYLCRCPSGTTGVNCEVNIDDCASNPCTFGVCRDGINRYDCVCQPGFTGPLCNVEINECASSPCGEGGSCVDGENGFRCLCPPGSLPPLCLPPSHPCAHEPCSHGICYDAPGGFRCVCEPGWSGPRCSQSLARDACESQPCRAGGTCSSDGMGFHCTCPPGVQGRQCELLSPCTPNPCEHGGRCESAPGQLPVCSCPQGWQGPRCQQDVDECAGPAPCGPHGICTNLAGSFSCTCHGGYTGPSCDQDINDCDPNPCLNGGSCQDGVGSFSCSCLPGFAGPRCARDVDECLSNPCGPGTCTDHVASFTCTCPPGYGGFHCEQDLPDCSPSSCFNGGTCVDGVNSFSCLCRPGYTGAHCQHEADPCLSRPCLHGGVCSAAHPGFRCTCLESFTGPQCQTLVDWCSRQPCQNGGRCVQTGAYCLCPPGWSGRLCDIRSLPCREAAAQIGVRLEQLCQAGGQCVDEDSSHYCVCPEGRTGSHCEQEVDPCLAQPCQHGGTCRGYMGGYMCECLPGYNGDNCEDDVDECASQPCQHGGSCIDLVARYLCSCPPGTLGVLCEINEDDCGPGPPLDSGPRCLHNGTCVDLVGGFRCTCPPGYTGLRCEADINECRSGACHAAHTRDCLQDPGGGFRCLCHAGFSGPRCQTVLSPCESQPCQHGGQCRPSPGPGGGLTFTCHCAQPFWGPRCERVARSCRELQCPVGVPCQQTPRGPRCACPPGLSGPSCRSFPGSPPGASNASCAAAPCLHGGSCRPAPLAPFFRCACAQGWTGPRCEAPAAAPEVSEEPRCPRAACQAKRGDQRCDRECNSPGCGWDGGDCSLSVGDPWRQCEALQCWRLFNNSRCDPACSSPACLYDNFDCHAGGRERTCNPVYEKYCADHFADGRCDQGCNTEECGWDGLDCASEVPALLARGVLVLTVLLPPEELLRSSADFLQRLSAILRTSLRFRLDAHGQAMVFPYHRPSPGSEPRARRELAPEVIGSVVMLEIDNRLCLQSPENDHCFPDAQSAADYLGALSAVERLDFPYPLRDVRGEPLEPPEPSVPLLPLLVAGAVLLLVILVLGVMVARRKREHSTLWFPEGFSLHKDVASGHKGRREPVGQDALGMKNMAKGESLMGEVATDWMDTECPEAKRLKVEEPGMGAEEAVDCRQWTQHHLVAADIRVAPAMALTPPQGDADADGMDVNVRGPDGFTPLMLASFCGGALEPMPTEEDEADDTSASIISDLICQGAQLGARTDRTGETALHLAARYARADAAKRLLDAGADTNAQDHSGRTPLHTAVTADAQGVFQILIRNRSTDLDARMADGSTALILAARLAVEGMVEELIASHADVNAVDELGKSALHWAAAVNNVEATLALLKNGANKDMQDSKLGVVVHTCSPSCSGG

SEQ ID NO: 12 - protein, 1963 aa, Artificial Sequence
  Synthetic polypeptide
MASEDNRVPSPPPTGDDGGGGGREETPTEGGALSLKPGLPIRGIRMKFAVLTGLVEVGEVSNRDIVETVFNLLVGGQFDLEMNFIIQEGESINCMVDLLEKCDITCQAEVWSMFTAILKKSIRNLQVCTEVGLVEKVLGKIEKVDNMIADLLVDMLGVLASYNLTVRELKLFFSKLQGDKGRWPPHAGKLLSVLKHMPQKYGPDAFFNFPGKSAAAIALPPIAKWPYQNGFTFHTWLRMDPVNNINVDKDKPYLYCFRTSKGLGYSAHFVGGCLIVTSIKSKGKGFQHCVKFDFKPQKWYMVTIVHIYNRWKNSELRCYVNGELASYGEITWFVNTSDTFDKCFLGSSETADANRVFCGQMTAVYLFSEALNAAQIFAIYQLGLGYKGTFKFKAESDLFLAEHHKLLLYDGKLSSAIAFTYNPRATDAQLCLESSPKDNPSIFVHSPHALMLQDVKAVLTHSIQSAMHSIGGVQVLFPLFAQLDYRQYLSDEIDLTICSTLLAFIMELLKNSIAMQEQMLACKGFLVIGYSLEKSSKSHVSRAVLELCLAFSKYLSNLQNGMPLLKQLCDHVLLNPAIWIHTPAKVQLMLYTYLSTEFIGTVNIYNTIRRVGTVLLIMHTLKYYYWAVNPQDRSGITPKGLDGPRPNQKEMLSLRAFLLMFIKQLVMKDSGVKEDELQAILNYLLTMHEDDNLMDVLQLLVALMSEHPNSMIPAFDQRNGLRVIYKLLASKSEGIRVQALKAMGYFLKHLAPKRKAEVMLGHGLFSLLAERLMLQTNLITMTTYNVLFEILIEQIGTQVIHKQHPDPDSSVKIQNPQILKVIATLLRNSPQCPESMEVRRAFLSDMIKLFNNSRENRRSLLQCSVWQEWMLSLCYFNPKNSDEQKITEMVYAIFRILLYHAVKYEWGGWRVWVDTLSITHSKVTFEIHKENLANIFREQQGKVDEEIGLCSSTSVQAASGIRRDINVSVGSQQPDTKDSPVCPHFTTNGNENSSIEKTSSLESASNIELQTTNTSYEEMKAEQENQELPDEGTLEETLTNETRNADDLEVSSDIIEAVAISSNSFITTGKDSMTVSEVTASISSPSEEDASEMPEFLDKSIVEEEEDDDYVELKVEGSPTEEANLPTELQDNSLSPAASEAGEKLDMFGNDDKLIFQEGKPVTEKQTDTETQDSKDSGIQTMTASGSSAMSPETTVSQIAVESDLGQMLEEGKKATNLTRETKLINDCHGSVSEASSEQKIAKLDVSNVATDTERLELKASPNVEAPQPHRHVLEISRQHEQPGQGIAPDAVNGQRRDSRSTVFRIPEFNWSQMHQRLLTDLLFSIETDIQMWRSHSTKTVMDFVNSSDNVIFVHNTIHLISQVMDNMVMACGGILPLLSAATSATHELENIEPTQGLSIEASVTFLQRLISLVDVLIFASSLGFTEIEAEKSMSSGGILRQCLRLVCAVAVRNCLECQQHSQLKTRGDKALKPMHSLIPLGKSAAKSPVDIVTGGISPVRDLDRLLQDMDINRLRAVVFRDIEDSKQAQFLALAVVYFISVLMVSKYRDILEPQNERHSQSCTETGSENENVSLSEITPAAFSTLTTASVEESESTSSARRRDSGIGEETATGLGSHVEVTPHTAPPGVSAGPDAISEVLSTLSLEVNKSPETKNDRGNDLDTKATPSVSVSKNVNVKDILRSLVNIPADGVTVDPALLPPACLGALGDLSVEQPVQFRSFDRSVIVAAKKSAVSPSTFNTSIPTNAVSVVSSVDSAQASDMGGESPGSRSSNAKLPSVPTVDSVSQDPVSNMSITERLEHALEKAAPLLREIFVDFAPFLSRTLLGSHGQELLIEGTSLVCMKSSSSVVELVMLLCSQRSLVGGYRQRNGGQGNVKMEQRDPVFFGHKPRNADSHQKLEEARNRVSPGVSRRRMALLILLFWLSKTDFRLLAFRIMRKQIYSTLSHQVCGNLLQQLQETNI

SEQ ID NO: 13 - protein, 1963 aa, Artificial Sequence; identical to SEQ ID NO: 12
  Synthetic polypeptide

SEQ ID NO: 14 - protein, 1963 aa, Artificial Sequence; identical to SEQ ID NO: 12
  Synthetic polypeptide

SEQ ID NO: 15 - protein, 1963 aa, Artificial Sequence; identical to SEQ ID NO: 12
  Synthetic polypeptide

SEQ ID NO: 16 - protein, 1829 aa, Artificial Sequence
  Synthetic polypeptide
MQLCIFCCCCILFYFDLYDFGRGYDFTIQENGLQIDQPPEIGNISIVRIIIMKNDNAEGIIEFDPKYTAFEVEEDVGLIMIPVVRLHGTYGYVTADFISQSSSASPGGVDYILHGSTVTFQHGQNLSFINISIIDDNESEFEEPIEILLTGATGGAVLGRHLVSRIIIAKSDSPFGVIRFLNQSKISIANPNSTMILSLVLERTGGLLGEIQVNWETVGPNSQEALLPQNRDIADPVSGLFYFGEGEGGVRTIILTIYPHEEIEVEETFIIKLHLVKGEAKLDSRAKDVTLTIQEFGDPNGVVQFAPETLSKKTYSEPLALEGPLLITFFVRRVKGTFGEIMVYWELSSEFDITEDFLSTSGFFTIADGESEASFDVHLLPDEVPEIEEDYVIQLVSVEGGAELDLEKSITWFSVYANDDPHGVFALYSDRQSILIGQNLIRSIQINITRLAGTFGDVAVGLRISSDHKEQPIVTENAERQLVVKDGATYKVDVVPIKNQVFLSLGSNFTLQLVTVMLVGGRFYGMPTILQEAKSAVLPVSEKAANSQVGFESTAFQLMNITAGTSHVMISRRGTYGALSVAWTTGYAPGLEIPEFIVVGNMTPTLGSLSFSHGEQRKGVFLWTFPSPGWPEAFVLHLSGVQSSAPGGAQLRSGFIVAEIEPMGVFQFSTSSRNIIVSEDTQMIRLHVQRLFGFHSDLIKVSYQTTAGSAKPLEDFEPVQNGELFFQKFQTEVDFEITIINDQLSEIEEFFYINLTSVEIRGLQKFDVNWSPRLNLDFSVAVITILDNDDLAGMDISFPETTVAVAVDTTLIPVETESTTYLSTSKTTTILQPTNVVAIVTEATGVSAIPEKLVTLHGTPAVSEKPDVATVTANVSIHGTFSLGPSIVYIEEEMKNGTFNTAEVLIRRTGGFTGNVSITVKTFGERCAQMEPNALPFRGIYGISNLTWAVEEEDFEEQTLTLIFLDGERERKVSVQILDDDEPEGQEFFYVFLTNPQGGAQIVEEKDDTGFAAFAMVIITGSDLHNGIIGFSEESQSGLELREGAVMRRLHLIVTRQPNRAFEDVKVFWRVTLNKTVVVLQKDGVNLVEELQSVSGTTTCTMGQTKCFISIELKPEKVPQVEVYFFVELYEATAGAAINNSARFAQIKILESDESQSLVYFSVGSRLAVAHKKATLISLQVARDSGTGLMMSVNFSTQELRSAETIGRTIISPAISGKDFVITEGTLVFEPGQRSTVLDVILTPETGSLNSFPKRFQIVLFDPKGGARIDKVYGTANITLVSDADSQAIWGLADQLHQPVNDDILNRVLHTISMKVATENTDEQLSAMMHLIEKITTEGKIQAFSVASRTLFYEILCSLINPKRKDTRGFSHFAEVTENFAFSLLTNVTCGSPGEKSKTILDSCPYLSILALHWYPQQINGHKFEGKEGDYIRIPERLLDVQDAEIMAGKSTCKLVQFTEYSSQQWFISGNNLPTLKNKVLSLSVKGQSSQLLTNDNEVLYRIYAAEPRIIPQTSLCLLWNQAAASWLSDSQFCKVVEETADYVECACSHMSVYAVYARTDNLSSYNEAFFTSGFICISGLCLAVLSHIFCARYSMFAAKLLTHMMAASLGTQILFLASAYASPQLAEESCSAMAAVTHYLYLCQFSWMLIQSVNFWYVLVMNDEHTERRYLLFFLLSWGLPAFVVILLIVILKGIYHQSMSQIYGLIHGDLCFIPNVYAALFTAALVPLTCLVVVFVVFIHAYQVKPQWKAYDDVFRGRTNAAEIPLILYLFALISVTWLWGGLHMAYRHFWMLVLFVIFNSLQAQRWKGLALSQMRLWSWTFGLMLE

SEQ ID NO: 17 - protein, 1813 aa, Artificial Sequence
  Synthetic polypeptide
MQLCIFCCCCILFYFDLYDFGRGYDFTIQENGLQIDQPPEIGNISIVRIIIMKNDNAEGIIEFDPKYTAFEVEEDVGLIMIPVVRLHGTYGYVTADFISQSSSASPGGVDYILHGSTVTFQHGQNLSFINISIIDDNESEFEEPIEILLTGATGGAVLGRHLVSRIIIAKSDSPFGVIRFLNQSKISIANPNSTMILSLVLERTGGLLGEIQVNWETVGPNSQEALLPQNRDIADPVSGLFYFGEGEGGVRTIILTIYPHEEIEVEETFIIKLHLVKGEAKLDSRAKDVTLTIQEFGDPNGVVQFAPETLSKKTYSEPLALEGPLLITFFVRRVKGTFGEIMVYWELSSEFDITEDFLSTSGFFTIADGESEASFDVHLLPDEVPEIEEDYVIQLVSVEGGAELDLEKSITWFSVYANDDPHGVFALYSDRQSILIGQNLIRSIQINITRLAGTFGDVAVGLRISSDHKEQPIVTENAERQLVVKDGATYKVDVVPIKNQVFLSLGSNFTLQLVTVMLVGGRFYGMPTILQEAKSAVLPVSEKAANSQVGFESTAFQLMNITAGTSHVMISRRGTYGALSVAWTTGYAPGLEIPEFIVVGNMTPTLGSLSFSHGEQRKGVFLWTFPSPGWPEAFVLHLSGVQSSAPGGAQLRSGFIVAEIEPMGVFQFSTSSRNIIVSEDTQMIRLHVQRLFGFHSDLIKVSYQTTAGSAKPLEDFEPVQNGELFFQKFQTEVDFEITIINDQLSEIEEFFYINLTSVEIRGLQKFDVNWSPRLNLDFSVAVITILDNDDLAGMDISFPETTVAVAVDTTLIPVETESTTYLSTSKTTTILQPTNVVAIVTEATGVSAIPEKLVTLHGTPAVSEKPDVATVTANVSIHGTFSLGPSIVYIEEEMKNGTFNTAEVLIRRTGGFTGNVSITVKTFGERCAQMEPNALPFRGIYGISNLTWAVEEEDFEEQTLTLIFLDGERERKVSVQILDDDEPEGQEFFYVFLTNPQGGAQIVEEKDDTGFAAFAMVIITGSDLHNGIIGFSEESQSGLELREGAVMRRLHLIVTRQPNRAFEDVKVFWRVTLNKTVVVLQKDGVNLVEELQSVSGTTTCTMGQTKCFISIELKPEKVPQVEVYFFVELYEATAGAAINNSARFAQIKILESDESQSLVYFSVGSRLAVAHKKATLISLQVARDSGTGLMMSVNFSTQELRSAETIGRTIISPAISGKDFVITEGTLVFEPGQRSTVLDVILTPETGSLNSFPKRFQIVLFDPKGGARIDKVYGTANITLVSDADSQAIWGLADQLHQPVNDDILNRVLHTISMKVATENTDEQLSAMMHLIEKITTEGKIQAFSVASRTLFYEILCSLINPKRKDTRGFSHFAEVTENFAFSLLTNVTCGSPGEKSKTILDSCPYLSILALHWYPQQINGHKFEGKEGDYIRIPERLLDVQDAEIMAGKSTCKLVQFTEYSSQQWFISGNNLPTLKNKVLSLSVKGQSSQLLTNDNEVLYRIYAAEPRIIPQTSLCLLWNQAAASWLSDSQFCKVVEETADYVECACSHMSVYAVYARTDNLSSYNEAFFTSGFICISGLCLAVLSHIFCARYSMFAAKLLTHMMAASLGTQILFLASAYASPQLAEESCSAMAAVTHYLYLCQFSWMLIQSVNFWYVLVMNDEHTERRYLLFFLLSWGLPAFVVILLIVILKGIYHQSMSQIYGLIHGDLCFIPNVYAALFTAALVPLTCLVVVFVVFIHAYQVKPQWKAYDDVFRGRTNAAEIPLILYLFALISVTWLWGGLHMAYRHFWMLVLFVIFNSLQANYVISLK

SEQ ID NO: 18 - protein, 1808 aa, Artificial Sequence
  Synthetic polypeptide
MKNIYCLIPKLVNFATLGCLWISVVQCTVLNSCLKSCVTNLGQQLDLGTPHNLSEPCIQGCHFWNSVDQKNCALKCRESCEVGCSSAEGAYEEEVLENADLPTAPFASSIGSHNMTLRWKSANFSGVKYIIQWKYAQLLGSWTYTKTVSRPSYVVKPLHPFTEYIFRVVWIFTAQLQLYSPPSPSYRTHPHGVPETAPLIRNIESSSPDTVEVSWDPPQFPGGPILGYNLRLISKNQKLDAGTQRTSFQFYSTLPNTIYRFSIAAVNEVGEGPEAESSITTSSSAVQQEEQWLFLSRKTSLRKRSLKHLVDEAHCLRLDAIYHNITGISVDVHQQIVYFSEGTLIWAKKAANMSDVSDLRIFYRGSGLISSISIDWLYQRMYFIMDELVCVCDLENCSNIEEITPPSISAPQKIVADSYNGYVFYLLRDGIYRADLPVPSGRCAEAVRIVESCTLKDFAIKPQAKRIIYFNDTAQVFMSTFLDGSASHLILPRIPFADVKSFACENNDFLVTDGKVIFQQDALSFNEFIVGCDLSHIEEFGFGNLVIFGSSSQLHPLPGRPQELSVLFGSHQALVQWKPPALAIGANVILISDIIELFELGPSAWQNWTYEVKVSTQDPPEVTHIFLNISGTMLNVPELQSAMKYKVSVRASSPKRPGPWSEPSVGTTLVPASEPPFIMAVKEDGLWSKPLNSFGPGEFLSSDIGNVSDMDWYNNSLYYSDTKGDVFVWLLNGTDISENYHLPSIAGAGALAFEWLGHFLYWAGKTYVIQRQSVLTGHTDIVTHVKLLVNDMVVDSVGGYLYWTTLYSVESTRLNGESSLVLQTQPWFSGKKVIALTLDLSDGLLYWLVQDSQCIHLYTAVLRGQSTGDTTITEFAAWSTSEISQNALMYYSGRLFWINGFRIITTQEIGQKTSVSVLEPARFNQFTIIQTSLKPLPGNFSFTPKVIPDSVQESSFRIEGNASSFQILWNGPPAVDWGVVFYSVEFSAHSKFLASEQHSLPVFTVEGLEPYALFNLSVTPYTYWGKGPKTSLSLRAPETVPSAPENPRIFILPSGKCCNKNEVVVEFRWNKPKHENGVLTKFEIFYNISNQSITNKTCEDWIAVNVTPSVMSFQLEGMSPRCFIAFQVRAFTSKGPGPYADVVKSTTSEINPFPHLITLLGNKIVFLDMDQNQVVWTFSAERVISAVCYTADNEMGYYAEGDSLFLLHLHNRSSSELFQDSLVFDITVITIDWISRHLYFALKESQNGMQVFDVDLEHKVKYPREVKIHNRNSTIISFSVYPLLSRLYWTEVSNFGYQMFYYSIISHTLHRILQPTATNQQNKRNQCSCNVTEFELSGAMAIDTSNLEKPLIYFAKAQEIWAMDLEGCQCWRVITVPAMLAGKTLVSLTVDGDLIYWIITAKDSTQIYQAKKGNGAIVSQVKALRSRHILAYSSVMQPFPDKAFLSLASDTVEPTILNATNTSLTIRLPLAKTNLTWYGITSPTPTYLVYYAEVNDRKNSSDLKYRILEFQDSIALIEDLQPFSTYMIQIAVKNYYSDPLEHLPPGKEIWGKTKNGVPEAVQLINTTVRSDTSLIISWRESHKPNGPKESVRYQLAISHLALIPETPLRQSEFPNGRLTLLVTRLSGGNIYVLKVLACHSEEMWCTESHPVTVEMFNTPEKPYSLVPENTSLQFNWKAPLNVNLIRFWVELQKWKYNEFYHVKTSCSQGPAYVCNITNLQPYTSYNVRVVVVYKTGENSTSLPESFKTKAGVPNKPGIPKLLEGSKNSIQWEKAEDNGCRITYYILEISCCGLSELKQRYVKPQYSML

SEQ ID NO: 19 - protein, 1802 aa, Artificial Sequence
  Synthetic polypeptide
MKNIYCLIPKLVNFATLGCLWISVVQCTVLNSCLKSCVTNLGQQLDLGTPHNLSEPCIQGCHFWNSVDQKNCALKCNDTYATVCERESCEVGCSSAEGAYEEEVLENADLPTAPFASSIGSHNMTLRWKSANFSGVKYIIQWKYAQLLGSWTYTKTVSRPSYVVKPLHPFTEYIFRVVWIFTAQLQLYSPPSPSYRTHPHGVPETAPLIRNIESSSPDTVEVSWDPPQFPGGPILGYNLRLISKNQKLDAGTQRTSFQFYSTLPNTIYRFSIAAVNEVGEGPEAESSITTSSSAVQQEEQWLFLSRKTSLRKRSLKHLVDEAHCLRLDAIYHNITGISVDVHQQIVYFSEGTLIWAKKAANMSDVSDLRIFYRGSGLISSISIDWLYQRMYFIMDELVCVCDLENCSNIEEITPPSISAPQKIVADSYNGYVFYLLRDGIYRADLPVPSGRCAEAVRIVESCTLKDFAIKPQAKRIIYFNDTAQVFMSTFLDGSASHLILPRIPFADVKSFACENNDFLVTDGKVIFQQDALSFNEFIVGCDLSHIEEFGFGNLVIFGSSSQLHPLPGRPQELSVLFGSHQALVQWKPPALAIGASPSAWQNWTYEVKVSTQDPPEVTHIFLNISGTMLNVPELQSAMKYKVSVRASSPKRPGPWSEPSVGTTLVPASEPPFIMAVKEDGLWSKPLNSFGPGEFLSSDIGNVSDMDWYNNSLYYSDTKGDVFVWLLNGTDISENYHLPSIAGAGALAFEWLGHFLYWAGKTYVIQRQSVLTGHTDIVTHVKLLVNDMVVDSVGGYLYWTTLYSVESTRLNGESSLVLQTQPWFSGKKVIALTLDLSDGLLYWLVQDSQCIHLYTAVLRGQSTGDTTITEFAAWSTSEISQNALMYYSGRLFWINGFRIITTQEIGQKTSVSVLEPARFNQFTIIQTSLKPLPGNFSFTPKVIPDSVQESSFRIEGNASSFQILWNGPPAVDWGVVFYSVEFSAHSKFLASEQHSLPVFTVEGLEPYALFNLSVTPYTYWGKGPKTSLSLRAPETVPSAPENPRIFILPSGKCCNKNEVVVEFRWNKPKHENGVLTKFEIFYNISNQSITNKTCEDWIAVNVTPSVMSFQLEGMSPRCFIAFQVRAFTSKGPGPYADVVKSTTSEINPFPHLITLLGNKIVFLDMDQNQVVWTFSAERVISAVCYTADNEMGYYAEGDSLFLLHLHNRSSSELFQDSLVFDITVITIDWISRHLYFALKESQNGMQVFDVDLEHKVKYPREVKIHNRNSTIISFSVYPLLSRLYWTEVSNFGYQMFYYSIISHTLHRILQPTATNQQNKRNQCSCNVTEFELSGAMAIDTSNLEKPLIYFAKAQEIWAMDLEGCQCWRVITVPAMLGKTLVSLTVDGDLIYWIITAKDSTQIYQAKKGNGAIVSQVKALRSRHILAYSSVMQPFPDKAFLSLASDTVEPTILNATNTSLTIRLPLAKTNLTWYGITSPTPTYLVYYAEVNDRKNSSDLKYRILEFQDSIALIEDLQPFSTYMIQIAVKNYYSDPLEHLPPGKEIWGKTKNGVPEAVQLINTTVRSDTSLIISWRESHKPNGPKESVRYQLAISHLALIPETPLRQSEFPNGRLTLLVTRLSGGNIYVLKVLACHSEEMWCTESHPVTVEMFNTPEKPYSLVPENTSLQFNWKAPLNVNLIRFWVELQKWKYNEFYHVKTSCSQGPAYVCNITNLQPYTSYNVRVVVVYKTGENSTSLPESFKTKAGVPNKPGIPKLLEGSKNSIQWEKAEDNGCRITYYILEISCCGLSELKQRYVKPQYSML

SEQ ID NO: 20 - protein, 1616 aa, Artificial Sequence
  Synthetic polypeptide
MTIALLGFAIFLLHCATCEKPLEGILSSSAWHFTHSHYNATIYENSSPKTYVESFEKMGIYLAEPQWAVRYRIISGDVANVFKTEEYVVGNFCFLRIRTKSSNTALLNREVRDSYTLIIQATEKTLELEALTRVVVHILDQNDLKPLFSPPSYRVTISEDMPLKSPICKVTATDADLGQNAEFYYAFNTRSEMFAIHPTSGVVTVAGKLNVTWRGKHELQVLAVDRMRKISEGNGFGSLAALVVHVEPALRKPPAIASVVVTPPDSNDGTTYATVLVDANSSGAEVESVEVVGGDPGKHFKAIKSYARSNEFSLVSVKDINWMEYLHGFNLSLQARSGSGPYFYSQIRGFHLPPSKLSSLKFEKAVYRVQLSEFSPPGSRVVMVRVTPAFPNLQYVLKPSSENVGFKLNARTGLITTTKLMDFHDRAHYQLHIRTSPGQASTVVVIDIVDCNNHAPLFNRSSYDGTLDENIPPGTSVLAVTATDRDHGENGYVTYSIAGPKALPFSIDPYLGIISTSKPMDYELMKRIYTFRVRASDWGSPFRREKEVSIFLQLRNLNDNQPMFEEVNCTGSIRQDWPVGKSIMTMSAIDVDELQNLKYEIVSGNELEYFDLNHFSGVISLKRPFINLTAGQPTSYSLKITASDGKNYASPTTLNITVVKDPHFEVPVTCDKTGVLTQFTKTILHFIGLQNQESSDEEFTSLSTYQINHYTPQFEDHFPQSIDVLESVPINTPLARLAATDPDAGFNGKLVYVIADGNEEGCFDIELETGLLTVAAPLDYEATNFYILNVTVYDLGTPQKSSWKLLTVNVKDWNDNAPRFPPGGYQLTISEDTEVGTTIAELTTKDADSEDNGRVRYTLLSPTEKFSLHPLTGELVVTGHLDRESEPRYILKVEARDQPSKGHQLFSVTDLIITLEDVNDNSPQCITEHNRLKVPEDLPPGTVLTFLDASDPDLGPAGEVRYVLMDGAHGTFRVDLMTGALILERELDFERRAGYNLSLWASDGGRPLARRTLCHVEVIVLDVNENLHPPHFASFVHQGQVQENSPSGTQVIVVAAQDDDSGLDGELQYFLRAGTGLAAFSINQDTGMIQTLAPLDREFASYYWLTVLAVDRGSVPLSSVTEVYIEVTDANDNPPQMSQAVFYPSIQEDAPVGTSVLQLDAWDPDSSSKGKLTFNITSGNYMGFFMIHPVTGLLSTAQQLDRENKDEHILEVTVLDNGEPSLKSTSRVVVGILDVNDNPPIFSHKLFNVRLPERLSPVSPGPVYRLVASDLDEGLNGRVTYSIEDSDEEAFSIDLVTGVVSSSSTFTAGEYNILTIKATDSGQPPLSASVRLHIEWIPWPRPSSIPLAFDETYYSFTVMETDPVNHMVGVISVEGRPGLFWFNISGGDKDMDFDIEKTTGSIVIARPLDTRRRSNYNLTVEVTDGSRTIATQVHIFMIANINHHRPQFLETRYEVRVPQDTVPGVELLRVQAIDQDKGKSLIYTIHGSQDPGSASLFQLDPSSGVLVTVGKLDLGSGPSQHTLTVMVRDQEIPIKRNFVWVTIHVEDGNLHPPRFTQLHYEASVPDTIAPGTELLQVRAMDADRGVNAEVHYSLLKDAVAHACNPSTLGGRGGRIT

SEQ ID NO: 21 - protein, 1615 aa, Artificial Sequence
  Synthetic polypeptide
MTIALLGFAIFLLHCATCEKPLEGILSSSAWHFTHSHYNATIYENSSPKTYVESFEKMGIYLAEPQWAVRYRIISGDVANVFKTEEYVVGNFCFLRIRTKSSNTALLNREVRDSYTLIIQATEKTLELEALTRVVVHILDQNDLKPLFSPPSYRVTISEDMPLKSPICKVTATDADLGQNAEFYYAFNTRSEMFAIHPTSGVVTVAGKLNVTWRGKHELQVLAVDRMRKISEGNGFGSLAALVVHVEPALRKPPAIASVVVTPPDSNDGTTYATVLVDANSSGAEVESVEVVGGDPGKHFKAIKSYARSNEFSLVSVKDINWMEYLHGFNLSLQARSGSGPYFYSQIRGFHLPPSKLSSLKFEKAVYRVQLSEFSPPGSRVVMVRVTPAFPNLQYVLKPSSENVGFKLNARTGLITTTKLMDFHDRAHYQLHIRTSPGQASTVVVIDIVDCNNHAPLFNRSSYDGTLDENIPPGTSVLAVTATDRDHGENGYVTYSIAGPKALPFSIDPYLGIISTSKPMDYELMKRIYTFRVRASDWGSPFRREKEVSIFLQLRNLNDNQPMFEEVNCTGSIRQDWPVGKSIMTMSAIDVDELQNLKYEIVSGNELEYFDLNHFSGVISLKRPFINLTAGQPTSYSLKITASDGKNYASPTTLNITVVKDPHFEVPVTCDKTGVLTQFTKTILHFIGLQNQESSDEEFTSLSTYQINHYTPQFEDHFPQSIDVLESVPINTPLARLAATDPDAGFNGKLVYVIADGNEEGCFDIELETGLLTVAAPLDYEATNFYILNVTVYDLGTPQKSSWKLLTVNVKDWNDNAPRFPPGGYQLTISEDTEVGTTIAELTTKDADSEDNGRVRYTLLSPTEKFSLHPLTGELVVTGHLDRESEPRYILKVEARDQPSKGHQLFSVTDLIITLEDVNDNSPQCITEHNRLKVPEDLPPGTVLTFLDASDPDLGPAGEVRYVLMDGAHGTFRVDLMTGALILERELDFERRAGYNLSLWASDGGRPLARRTLCHVEVIVLDVNENLHPPHFASFVHQGQVQENSPSGTQVIVVAAQDDDSGLDGELQYFLRAGTGLAAFSINQDTGMIQTLAPLDREFASYYWLTVLAVDRGSVPLSSVTEVYIEVTDANDNPPQMSQAVFYPSIQEDAPVGTSVLQLDAWDPDSSSKGKLTFNITSGNYMGFFMIHPVTGLLSTAQQLDRENKDEHILEVTVLDNGEPSLKSTSRVVVGILDVNDNPPIFSHKLFNVRLPERLSPVSPGPVYRLVASDLDEGLNGRVTYSIEDSDEEAFSIDLVTGVVSSSSTFTAGEYNILTIKATDSGQPPLSASVRLHIEWIPWPRPSSIPLAFDETYYSFTVMETDPVNHMVGVISVEGRPGLFWFNISGGDKDMDFDIEKTTGSIVIARPLDTRRRSNYNLTVEVTDGSRTIATQVHIFMIANINHHRPQFLETRYEVRVPQDTVPGVELLRVQAIDQDKGKSLIYTIHGSQDPGSASLFQLDPSSGVLVTVGKLDLGSGPSQHTLTVMVRDQEIPIKRNFVWVTIHVEDGNLHPPRFTQLHYEASVPDTIAPGTELLQVRAMDADRGVNAEVHYSLLKATREAEGGESLEPGRQRLQ

SEQ ID NO: 22 - protein, 1604 aa, Artificial Sequence
  Synthetic polypeptide
MTIALLGFAIFLLHCATCEKPLEGILSSSAWHFTHSHYNATIYENSSPKTYVESFEKMGIYLAEPQWAVRYRIISGDVANVFKTEEYVVGNFCFLRIRTKSSNTALLNREVRDSYTLIIQATEKTLELEALTRVVVHILDQNDLKPLFSPPSYRVTISEDMPLKSPICKVTATDADLGQNAEFYYAFNTRSEMFAIHPTSGVVTVAGKLNVTWRGKHELQVLAVDRMRKISEGNGFGSLAALVVHVEPALRKPPAIASVVVTPPDSNDGTTYATVLVDANSSGAEVESVEVVGGDPGKHFKAIKSYARSNEFSLVSVKDINWMEYLHGFNLSLQARSGSGPYFYSQIRGFHLPPSKLSSLKFEKAVYRVQLSEFSPPGSRVVMVRVTPAFPNLQYVLKPSSENVGFKLNARTGLITTTKLMDFHDRAHYQLHIRTSPGQASTVVVIDIVDCNNHAPLFNRSSYDGTLDENIPPGTSVLAVTATDRDHGENGYVTYSIAGPKALPFSIDPYLGIISTSKPMDYELMKRIYTFRVRASDWGSPFRREKEVSIFLQLRNLNDNQPMFEEVNCTGSIRQDWPVGKSIMTMSAIDVDELQNLKYEIVSGNELEYFDLNHFSGVISLKRPFINLTAGQPTSYSLKITASDGKNYASPTTLNITVVKDPHFEVPVTCDKTGVLTQFTKTILHFIGLQNQESSDEEFTSLSTYQINHYTPQFEDHFPQSIDVLESVPINTPLARLAATDPDAGFNGKLVYVIADGNEEGCFDIELETGLLTVAAPLDYEATNFYILNVTVYDLGTPQKSSWKLLTVNVKDWNDNAPRFPPGGYQLTISEDTEVGTTIAELTTKDADSEDNGRVRYTLLSPTEKFSLHPLTGELVVTGHLDRESEPRYILKVEARDQPSKGHQLFSVTDLIITLEDVNDNSPQCITEHNRLKVPEDLPPGTVLTFLDASDPDLGPAGEVRYVLMDGAHGTFRVDLMTGALILERELDFERRAGYNLSLWASDGGRPLARRTLCHVEVIVLDVNENLHPPHFASFVHQGQVQENSPSGTQVIVVAAQDDDSGLDGELQYFLRAGTGLAAFSINQDTGMIQTLAPLDREFASYYWLTVLAVDRGSVPLSSVTEVYIEVTDANDNPPQMSQAVFYPSIQEDAPVGTSVLQLDAWDPDSSSKGKLTFNITSGNYMGFFMIHPVTGLLSTAQQLDRENKDEHILEVTVLDNGEPSLKSTSRVVVGILDVNDNPPIFSHKLFNVRLPERLSPVSPGPVYRLVASDLDEGLNGRVTYSIEDSDEEAFSIDLVTGVVSSSSTFTAGEYNILTIKATDSGQPPLSASVRLHIEWIPWPRPSSIPLAFDETYYSFTVMETDPVNHMVGVISVEGRPGLFWFNISGGDKDMDFDIEKTTGSIVIARPLDTRRRSNYNLTVEVTDGSRTIATQVHIFMIANINHHRPQFLETRYEVRVPQDTVPGVELLRVQAIDQDKGKSLIYTIHGSQDPGSASLFQLDPSSGVLVTVGKLDLGSGPSQHTLTVMVRDQEIPIKRNFVWVTIHVEDGNLHPPRFTQLHYEASVPDTIAPGTELLQVRAMDADRGVNAEVHYSLLKAWHGDMHL

SEQ ID NO: 23 - protein, 1340 aa, Artificial Sequence
  Synthetic polypeptide
MGVLKVWLGLALALAEFAVLPHHSEGACVYQDSLLADATIWKPDSCQSCRCHGDIVICKPAVCRNPQCAFEKGEVLQIAANQCCPECVLRTPGSCHHEKKIHEHGTEWASSPCSVCSCNHGEVRCTPQPCPPLSCGHQELAFIPEGSCCPVCVGLGKPCSYEGHVFQDGEDWRLSRCAKCLCRNGVAQCFTAQCQPLFCNQDETVVRVPGKCCPQCSARSCSAAGQVYEHGEQWSENACTTCICDRGEVRCHKQACLPLRCGKGQSRARRHGQCCEECVSPAGSCSYDGVVRYQDEMWKGSACEFCMCDHGQVTCQTGECAKVECARDEELIHLDGKCCPECISRNGYCVYEETGEFMSSNASEVKRIPEGEKWEDGPCKVCECRGAQVTCYEPSCPPCPVGTLALEVKGQCCPDCTSVHCHPDCLTCSQSPDHCDLCQDPTKLLQNGWCVHSCGLGFYQAGSLCLACQPQCSTCTSGLECSSCQPPLLMRHGQCVPTCGDGFYQDRHSCAVCHESCAGCWGPTEKHCLACRDPLHVLRDGGCESSCGKGFYNRQGTCSACDQSCDSCGPSSPRCLTCTEKTVLHDGKCMSECPGGYYADATGRCKVCHNSCASCSGPTPSHCTACSPPKALRQGHCLPRCGEGFYSDHGVCKACHSSCLACMGPAPSHCTGCKKPEEGLQVEQLSDVGIPSGECLAQCRAHFYLESTGICEACHQSCFRCAGKSPHNCTDCGPSHVLLDGQCLSQCPDGYFHQEGSCTECHPTCRQCHGPLESDCISCYPHISLTNGNCRTSCREEQFLNLVGYCADCHHLCQHCAADLHNTGSICLRCQNAHYLLLGDHCVPDCPSGYYAERGACKKCHSSCRTCQGRGPFSCSSCDTNLVLSHTGTCSTTCFPGHYLDDNHVCQPCNTHCGSCDSQASCTSCRDPNKVLLFGECQYESCAPQYYLDFSTNTCKECDWSCSACSGPLKTDCLQCMDGYVLQDGACVEQCLSSFYQDSGLCKNCDSYCLQCQGPHECTRCKGPFLLLEAQCVQECGKGYFADHAKHKCTACPQGCLQCSHRDRCHLCDHGFFLKSGLCVYNCVPGFSVHTSNETCSGKIHTPSLHVNGSLILPIGSIKPLDFSLLNVQDQEGRVEDLLFHVVSTPTNGQLVLSRNGKEVQLDKAGRFSWKDVNEKKVRFVHSKEKLRKGYLFLKISDQQFFSEPQLINIQAFSTQAPYVLRNEVLHISRGERATITTQMLDIRDDDNPQDVVIEIIDPPLHGQLLQTLQSPATPIYQFQLDELSRGLLHYAHDGSDSTSDVAVLQANDGHSFHNILFQVKTVPQLGAMACTYSLHYSEG

SEQ ID NO: 24 - protein, 1340 aa, Artificial Sequence; identical to SEQ ID NO: 23
  Synthetic polypeptide

SEQ ID NO: 25 - protein, 1337 aa, Artificial Sequence
  Synthetic polypeptide
MALRGFCSADGSDPLWDWNVTWNTSNPDFTKCFQNTVLVWVPCFYLWACFPFYFLYLSRHDRGYIQMTPLNKTKTALGFLLWIVCWADLFYSFWERSRGIFLAPVFLVSPTLLGITMLLATFLIQLERRKGVQSSGIMLTFWLVALVCALAILRSKIMTALKEDAQVDLFRDITFYVYFSLLLIQLVLSCFSDRSPLFSETIHDPNPCPESSASFLSRITFWWITGLIVRGYRQPLEGSDLWSLNKEDTSEQVVPVLVKNWKKECAKTRKQPVKVVYSSKDPAQPKESSKVDANEEVEALIVKSPQKEWNPSLFKVLYKTFGPYFLMSFFFKAIHDLMMFSGPQILKLLIKFVNDTKAPDWQGYFYTVLLFVTACLQTLVLHQYFHICFVSGMRIKTAVIGAVYRKALVITNSARKSSTVGEIVNLMSVDAQRFMDLATYINMIWSAPLQVILALYLLWLNLGPSVLAGVAVMVLMVPVNAVMAMKTKTYQVAHMKSKDNRIKLMNEILNGIKVLKLYAWELAFKDKVLAIRQEELKVLKKSAYLSAVGTFTWVCTPFLVALCTFAVYVTIDENNILDAQTAFVSLALFNILRFPLNILPMVISSIVQASVSLKRLRIFLSHEELEPDSIERRPVKDGGGTNSITVRNATFTWARSDPPTLNGITFSIPEGALVAVVGQVGCGKSSLLSALLAEMDKVEGHVAIKGSVAYVPQQAWIQNDSLRENILFGCQLEEPYYRSVIQACALLPDLEILPSGDRTEIGEKGVNLSGGQKQRVSLARAVYSNADIYLFDDPLSAVDAHVGKHIFENVIGPKGMLKNKTRILVTHSMSYLPQVDVIIVMSGGKISEMGSYQELLARDGAFAEFLRTYASTEQEQDAEENGSTVMDEEEAGVTGVSGPGKEAKQMENGMLVTDSAGKQLQRQLSSSSSYSGDISRHHNSTAELQKAEAKKEETWKLMEADKAQTGQVKLSVYWDYMKAIGLFISFLSIFLFMCNHVSALASNYWLSLWTDDPIVNGTQEHTKVRLSVYGALGISQGIAVFGYSMAVSIGGILASRCLHVDLLHSILRSPMSFFERTPSGNLVNRFSKELDTVDSMIPEVIKMFMGSLFNVIGACIVILLATPIAAIIIPPLGLIYFFVQRFYVASSRQLKRLESVSRSPVYSHFNETLLGVSVIRAFEEQERFIHQSDLKVDENQKAYYPSIVANRWLAVRLECVGNCIVLFAALFAVISRHSLSAGLVGLSVSYSLQVTTYLNWLVRMSSEMETNIVAVERLKEYSETEKEAPWQIQETAPPSSWPQVGRVEFRNYCLRYREDLDFVLRHINVTINGGEKVSSNL

SEQ ID NO: 26 - protein, 1327 aa, Artificial Sequence
  Synthetic polypeptide
MALRGFCSADGSDPLWDWNVTWNTSNPDFTKCFQNTVLVWVPCFYLWACFPFYFLYLSRHDRGYIQMTPLNKTKTALGFLLWIVCWADLFYSFWERSRGIFLAPVFLVSPTLLGITMLLATFLIQLERRKGVQSSGIMLTFWLVALVCALAILRSKIMTALKEDAQVDLFRDITFYVYFSLLLIQLVLSCFSDRSPLFSETIHDPNPCPESSASFLSRITFWWITGLIVRGYRQPLEGSDLWSLNKEDTSEQVVPVLVKNWKKECAKTRKQPVKVVYSSKDPAQPKESSKVDANEEVEALIVKSPQKEWNPSLFKVLYKTFGPYFLMSFFFKAIHDLMMFSGPQILKLLIKFVNDTKAPDWQGYFYTVLLFVTACLQTLVLHQYFHICFVSGMRIKTAVIGAVYRKALVITNSARKSSTVGEIVNLMSVDAQRFMDLATYINMIWSAPLQVILALYLLWLNLGPSVLAGVAVMVLMVPVNAVMAMKTKTYQVAHMKSKDNRIKLMNEILNGIKVLKLYAWELAFKDKVLAIRQEELKVLKKSAYLSAVGTFTWVCTPFLVALCTFAVYVTIDENNILDAQTAFVSLALFNILRFPLNILPMVISSIVQASVSLKRLRIFLSHEELEPDSIERRPVKDGGGTNSITVRNATFTWARSDPPTLNGITFSIPEGALVAVVGQVGCGKSSLLSALLAEMDKVEGHVAIKGSVAYVPQQAWIQNDSLRENILFGCQLEEPYYRSVIQACALLPDLEILPSGDRTEIGEKGVNLSGGQKQRVSLARAVYSNADIYLFDDPLSAVDAHVGKHIFENVIGPKGMLKNKTRILVTHSMSYLPQVDVIIVMSGGKISEMGSYQELLARDGAFAEFLRTYASTEQEQDAEENGVTGVSGPGKEAKQMENGMLVTDSAGKQLQRQLSSSSSYSGDISRHHNSTAELQKAEAKKEETWKLMEADKAQTGQVKLSVYWDYMKAIGLFISFLSIFLFMCNHVSALASNYWLSLWTDDPIVNGTQEHTKVRLSVYGALGISQGIAVFGYSMAVSIGGILASRCLHVDLLHSILRSPMSFFERTPSGNLVNRFSKELDTVDSMIPEVIKMFMGSLFNVIGACIVILLATPIAAIIIPPLGLIYFFVQRFYVASSRQLKRLESVSRSPVYSHFNETLLGVSVIRAFEEQERFIHQSDLKVDENQKAYYPSIVANRWLAVRLECVGNCIVLFAALFAVISRHSLSAGLVGLSVSYSLQVTTYLNWLVRMSSEMETNIVAVERLKEYSETEKEAPWQIQETAPPSSWPQVGRVEFRNYCLRYREDLDFVLRHINVTINGGEKVSSNL

SEQ ID NO: 27 - protein, 1327 aa, Artificial Sequence; identical to SEQ ID NO: 26
  Synthetic polypeptide

SEQ ID NO: 28 - protein, 1324 aa, Artificial Sequence
  Synthetic polypeptide
MVAAAAATEARLRRRTAATAALAGRSGGPHWDWDVTRAGRPGLGAGLRLPRLLSPPLRPRLLLLLLLLSPPLLLLLLPCEAEAAAAAAAVSGSAAAEAKECDRPCVNGGRCNPGTGQCVCPAGWVGEQCQHCGGRFRLTGSSGFVTDGPGNYKYKTKCTWLIEGQPNRIMRLRFNHFATECSWDHLYVYDGDSIYAPLVAAFSGLIVPERDGNETVPEVVATSGYALLHFFSDAAYNLTGFNITYSFDMCPNNCSGRGECKISNSSDTVECECSENWKGEACDIPHCTDNCGFPHRGICNSSDVRGCSCFSDWQGPGCSVPVPANQSFWTREEYSNLKLPRASHKAVVNGNIMWVVGGYMFNHSDYNMVLAYDLASREWLPLNRSVNNVVVRYGHSLALYKDKIYMYGGKIDSTGNVTNELRVFHIHNESWVLLTPKAKEQYAVVGHSAHIVTLKNGRVVMLVIFGHCPLYGYISNVQEYDLDKNTWSILHTQGALVQGGYGHSSVYDHRTRALYVHGGYKAFSANKYRLADDLYRYDVDTQMWTILKDSRFFRYLHTAVIVSGTMLVFGGNTHNDTSMSHGAKCFSSDFMAYDIACDRWSVLPRPDLHHDVNRFGHSAVLHNSTMYVFGGFNSLLLSDILVFTSEQCDAHRSEAACLAAGPGIRCVWNTGSSQCISWALATDEQEEKLKSECFSKRTLDHDRCDQHTDCYSCTANTNDCHWCNDHCVPRNHSCSEGQISIFRYENCPKDNPMYYCNKKTSCRSCALDQNCQWEPRNQECIALPENICGIGWHLVGNSCLKITTAKENYDNAKLFCRNHNALLASLTTQKKVEFVLKQLRIMQSSQSMSKLTLTPWVGLRKINVSYWCWEDMSPFTNSLLQWMPSEPSDAGFCGILSEPSTRGLKAATCINPLNGSVCERPANHSAKQCRTPCALRTACGDCTSGSSECMWCSNMKQCVDSNAYVASFPFGQCMEWYTMSTCPPENCSGYCTCSHCLEQPGCGWCTDPSNTGKGKCIEGSYKGPVKMPSQAPTGNFYPQPLLNSSMCLEDSRYNWSFIHCPACQCNGHSKCINQSICEKCENLTTGKHCETCISGFYGDPTNGGKCQPCKCNGHASLCNTNTGKCFCTTKGVKGDECQLCEVENRYQGNPLRGTCYYTLLIDYQFTFSLSQEDDRYYTAINFVATPDEQNRDLDMFINASKNFNLNITWAASFSAGTQAGEEMPVVSKTNIKEYKDSFSNEKFDFRNHPNITFFVYVSNFTWPIKIQIAFSQHSNFMDLVQFFVTFFSCFLSLLLVAAVVWKIKQSCWASRRREQPGWNWRPLF

SEQ ID NO: 29 - protein, 1321 aa, Artificial Sequence
  Synthetic polypeptide
MGPGARGRRRRRRPMSPPPPPPPVRALPLLLLLAGPGAAAPPCLDGSPCANGGRCTQLPSREAACLCPPGWVGERCQLEDPCHSGPCAGRGVCQSSVVAGTARFSCRCPRGFRGPDCSLPDPCLSSPCAHGARCSVGPDGRFLCSCPPGYQGRSCRSDVDECRVGEPCRHGGTCLNTPGSFRCQCPAGYTGPLCENPAVPCAPSPCRNGGTCRQSGDLTYDCACLPGFEGQNCEVNVDDCPGHRCLNGGTCVDGVNTYNCQCPPEWTGQFCTEDVDECQLQPNACHNGGTCFNTLGGHSCVCVNGWTGESCSQNIDDCATAVCFHGATCHDRVASFYCACPMGKTGLLCHLDDACVSNPCHEDAICDTNPVNGRAICTCPPGFTGGACDQDVDECSIGANPCEHLGRCVNTQGSFLCQCGRGYTGPRCETDVNECLSGPCRNQATCLDRIGQFTCICMAGFTGTYCEVDIDECQSSPCVNGGVCKDRVNGFSCTCPSGFSGSTCQLDVDECASTPCRNGAKCVDQPDGYECRCAEGFEGTLCDRNVDDCSPDPCHHGRCVDGIASFSCACAPGYTGTRCESQVDECRSQPCRHGGKCLDLVDKYLCRCPSGTTGVNCEVNIDDCASNPCTFGVCRDGINRYDCVCQPGFTGPLCNVEINECASSPCGEGGSCVDGENGFRCLCPPGSLPPLCLPPSHPCAHEPCSHGICYDAPGGFRCVCEPGWSGPRCSQSLARDACESQPCRAGGTCSSDGMGFHCTCPPGVQGRQCELLSPCTPNPCEHGGRCESAPGQLPVCSCPQGWQGPRCQQDVDECAGPAPCGPHGICTNLAGSFSCTCHGGYTGPSCDQDINDCDPNPCLNGGSCQDGVGSFSCSCLPGFAGPRCARDVDECLSNPCGPGTCTDHVASFTCTCPPGYGGFHCEQDLPDCSPSSCFNGGTCVDGVNSFSCLCRPGYTGAHCQHEADPCLSRPCLHGGVCSAAHPGFRCTCLESFTGPQCQTLVDWCSRQPCQNGGRCVQTGAYCLCPPGWSGRLCDIRSLPCREAAAQIGVRLEQLCQAGGQCVDEDSSHYCVCPEGRTGSHCEQEVDPCLAQPCQHGGTCRGYMGGYMCECLPGYNGDNCEDDVDECASQPCQHGGSCIDLVARYLCSCPPGTLGVLCEINEDDCGPGPPLDSGPRCLHNGTCVDLVGGFRCTCPPGYTGLRCEADINECRSGACHAAHTRDCLQDPGGGFRCLCHAGFSGPRCQTVLSPCESQPCQHGGQCRPSPGPGGGLTFTCHCAQLLGRLRQENHLNPGGGGCSEPSRHCTPAWRLSDTPSQKTKKQ

SEQ ID NO: 30 - protein, 1306 aa, Artificial Sequence
  Synthetic polypeptide
MAQALLVPPGPESFRLFTRESLAAIEKRAAEEKAKKPKKEQDNDDENKPKPNSDLEAGKNLPFIYGDIPPEMVSEPLEDLDPYYINKKTFIVMNKGKAIFRFSATSALYILTPLNPVRKIAIKILVHSLFSMLIMCTILTNCVFMTLSNPPDWTKNVEYTFTGIYTFESLIKILARGFCLEDFTFLRDPWNWLDFSVIVMAYVTEFVSLGNVSALRTFRVLRALKTISVIPGLKTIVGALIQSVKKLSDVMILTVFCLSVFALIGLQLFMGNLRNKCLQWPPSDSAFETNTTSYFNGTMDSNGTFVNVTMSTFNWKDYIGDDSHFYVLDGQKDPLLCGNGSDAGQCPEGYICVKAGRNPNYGYTSFDTFSWAFLSLFRLMTQDYWENLYQLTLRAAGKTYMIFFVLVIFLGSFYLVNLILAVVAMAYEEQNQATLEEAEQKEAEFQQMLEQLKKQQEEAQAVAAASAASRDFSGIGGLGELLESSSEASKLSSKSAKEWRNRRKKRRQREHLEGNNKGERDSFPKSESEDSVKRSSFLFSMDGNRLTSDKKFCSPHQSLLSIRGSLFSPRRNSKTSIFSFRGRAKDVGSENDFADDEHSTFEDSESRRDSLFVPHRHGERRNSNVSQASMSSRMVPGLPANGKMHSTVDCNGVVSLVGGPSALTSPTGQLPPEGTTTETEVRKRRLSSYQISMEMLEDSSGRQRAVSIASILTNTMEELEESRQKCPPCWYRFANVFLIWDCCDAWLKVKHLVNLIVMDPFVDLAITICIVLNTLFMAMEHYPMTEQFSSVLTVGNLVFTGIFTAEMVLKIIAMDPYYYFQEGWNIFDGIIVSLSLMELGLSNVEGLSVLRSFRLLRVFKLAKSWPTLNMLIKIIGNSVGALGNLTLVLAIIVFIFAVVGMQLFGKSYKECVCKINDDCTLPRWHMNDFFHSFLIVFRVLCGEWIETMWDCMEVAGQTMCLIVFMLVMVIGNLVVLNLFLALLLSSFSSDNLAATDDDNEMNNLQIAVGRMQKGIDYVKNKMRECFQKAFFRKPKVIEIHEGNKIDSCMSNNTGIEISKELNYLRDGNGTTSGVGTGSSVEKYVIDENDYMSFINNPSLTVTVPIAVGESDFENLNTEEFSSESELEESKEKLNATSSSEGSTVDVVLPREGEQAETEPEEDLKPEACFTEGCIKKFPFCQVSTEEGKGKIWWNLRKTCYSIVEHNWFETFIVFMILLSSGALAFEDIYIEQRKTIKTMLEYADKVFTYIFILEMLLKWVAYGFQTYFTNAWCWLDFLIVDARCHLQPFCLSPLTTNQSASSSPFY

SEQ ID NO: 31 - protein, 1306 aa, Artificial Sequence
  Synthetic polypeptide
MAQALLVPPGPESFRLFTRESLAAIEKRAAEEKAKKPKKEQDNDDENKPKPNSDLEAGKNLPFIYGDIPPEMVSEPLEDLDPYYINKKTFIVMNKGKAIFRFSATSALYILTPLNPVRKIAIKILVHSLFSMLIMCTILTNCVFMTLSNPPDWTKNVEYTFTGIYTFESLIKILARGFCLEDFTFLRDPWNWLDFSVIVMAYVTEFVDLGNVSALRTFRVLRALKTISVIPGLKTIVGALIQSVKKLSDVMILTVFCLSVFALIGLQLFMGNLRNKCLQWPPSDSAFETNTTSYFNGTMDSNGTFVNVTMSTFNWKDYIGDDSHFYVLDGQKDPLLCGNGSDAGQCPEGYICVKAGRNPNYGYTSFDTFSWAFLSLFRLMTQDYWENLYQLTLRAAGKTYMIFFVLVIFLGSFYLVNLILAVVAMAYEEQNQATLEEAEQKEAEFQQMLEQLKKQQEEAQAVAAASAASRDFSGIGGLGELLESSSEASKLSSKSAKEWRNRRKKRRQREHLEGNNKGERDSFPKSESEDSVKRSSFLFSMDGNRLTSDKKFCSPHQSLLSIRGSLFSPRRNSKTSIFSFRGRAKDVGSENDFADDEHSTFEDSESRRDSLFVPHRHGERRNSNVSQASMSSRMVPGLPANGKMHSTVDCNGVVSLVGGPSALTSPTGQLPPEGTTTETEVRKRRLSSYQISMEMLEDSSGRQRAVSIASILTNTMEELEESRQKCPPCWYRFANVFLIWDCCDAWLKVKHLVNLIVMDPFVDLAITICIVLNTLFMAMEHYPMTEQFSSVLTVGNLVFTGIFTAEMVLKIIAMDPYYYFQEGWNIFDGIIVSLSLMELGLSNVEGLSVLRSFRLLRVFKLAKSWPTLNMLIKIIGNSVGALGNLTLVLAIIVFIFAVVGMQLFGKSYKECVCKINDDCTLPRWHMNDFFHSFLIVFRVLCGEWIETMWDCMEVAGQTMCLIVFMLVMVIGNLVVLNLFLALLLSSFSSDNLAATDDDNEMNNLQIAVGRMQKGIDYVKNKMRECFQKAFFRKPKVIEIHEGNKIDSCMSNNTGIEISKELNYLRDGNGTTSGVGTGSSVEKYVIDENDYMSFINNPSLTVTVPIAVGESDFENLNTEEFSSESELEESKEKLNATSSSEGSTVDVVLPREGEQAETEPEEDLKPEACFTEGCIKKFPFCQVSTEEGKGKIWWNLRKTCYSIVEHNWFETFIVFMILLSSGALAFEDIYIEQRKTIKTMLEYADKVFTYIFILEMLLKWVAYGFQTYFTNAWCWLDFLIVDARCHLQPFCLSPLTTNQSASSSPFY

SEQ ID NO: 32 - protein, 1294 aa, Artificial Sequence
  Synthetic polypeptide
MGPGARGRRRRRRPMSPPPPPPPVRALPLLLLLAGPGAAAPPCLDGSPCANGGRCTQLPSREAACLCPPGWVGERCQLEDPCHSGPCAGRGVCQSSVVAGTARFSCRCPRGFRGPDCSLPDPCLSSPCAHGARCSVGPDGRFLCSCPPGYQGRSCRSDVDECRVGEPCRHGGTCLNTPGSFRCQCPAGYTGPLCENPAVPCAPSPCRNGGTCRQSGDLTYDCACLPGFEGQNCEVNVDDCPGHRCLNGGTCVDGVNTYNCQCPPEWTGQFCTEDVDECQLQPNACHNGGTCFNTLGGHSCVCVNGWTGESCSQNIDDCATAVCFHGATCHDRVASFYCACPMGKTGLLCHLDDACVSNPCHEDAICDTNPVNGRAICTCPPGFTGGACDQDVDECSIGANPCEHLGRCVNTQGSFLCQCGRGYTGPRCETDVNECLSGPCRNQATCLDRIGQFTCICMAGFTGTYCEVDIDECQSSPCVNGGVCKDRVNGFSCTCPSGFSGSTCQLDVDECASTPCRNGAKCVDQPDGYECRCAEGFEGTLCDRNVDDCSPDPCHHGRCVDGIASFSCACAPGYTGTRCESQVDECRSQPCRHGGKCLDLVDKYLCRCPSGTTGVNCEVNIDDCASNPCTFGVCRDGINRYDCVCQPGFTGPLCNVEINECASSPCGEGGSCVDGENGFRCLCPPGSLPPLCLPPSHPCAHEPCSHGICYDAPGGFRCVCEPGWSGPRCSQSLARDACESQPCRAGGTCSSDGMGFHCTCPPGVQGRQCELLSPCTPNPCEHGGRCESAPGQLPVCSCPQGWQGPRCQQDVDECAGPAPCGPHGICTNLAGSFSCTCHGGYTGPSCDQDINDCDPNPCLNGGSCQDGVGSFSCSCLPGFAGPRCARDVDECLSNPCGPGTCTDHVASFTCTCPPGYGGFHCEQDLPDCSPSSCFNGGTCVDGVNSFSCLCRPGYTGAHCQHEADPCLSRPCLHGGVCSAAHPGFRCTCLESFTGPQCQTLVDWCSRQPCQNGGRCVQTGAYCLCPPGWSGRLCDIRSLPCREAAAQIGVRLEQLCQAGGQCVDEDSSHYCVCPEGRTGSHCEQEVDPCLAQPCQHGGTCRGYMGGYMCECLPGYNGDNCEDDVDECASQPCQHGGSCIDLVARYLCSCPPGTLGVLCEINEDDCGPGPPLDSGPRCLHNGTCVDLVGGFRCTCPPGYTGLRCEADINECRSGACHAAHTRDCLQDPGGGFRCLCHAGFSGPRCQTVLSPCESQPCQHGGQCRPSPGPGGGLTFTCHCAQPGVVAAACNPSYSGG

SEQ ID NO: 33 - protein, 1282 aa, Artificial Sequence
  Synthetic polypeptide
MGPGARGRRRRRRPMSPPPPPPPVRALPLLLLLAGPGAAAPPCLDGSPCANGGRCTQLPSREAACLCPPGWVGERCQLEDPCHSGPCAGRGVCQSSVVAGTARFSCRCPRGFRGPDCSLPDPCLSSPCAHGARCSVGPDGRFLCSCPPGYQGRSCRSDVDECRVGEPCRHGGTCLNTPGSFRCQCPAGYTGPLCENPAVPCAPSPCRNGGTCRQSGDLTYDCACLPGFEGQNCEVNVDDCPGHRCLNGGTCVDGVNTYNCQCPPEWTGQFCTEDVDECQLQPNACHNGGTCFNTLGGHSCVCVNGWTGESCSQNIDDCATAVCFHGATCHDRVASFYCACPMGKTGLLCHLDDACVSNPCHEDAICDTNPVNGRAICTCPPGFTGGACDQDVDECSIGANPCEHLGRCVNTQGSFLCQCGRGYTGPRCETDVNECLSGPCRNQATCLDRIGQFTCICMAGFTGTYCEVDIDECQSSPCVNGGVCKDRVNGFSCTCPSGFSGSTCQLDVDECASTPCRNGAKCVDQPDGYECRCAEGFEGTLCDRNVDDCSPDPCHHGRCVDGIASFSCACAPGYTGTRCESQVDECRSQPCRHGGKCLDLVDKYLCRCPSGTTGVNCEVNIDDCASNPCTFGVCRDGINRYDCVCQPGFTGPLCNVEINECASSPCGEGGSCVDGENGFRCLCPPGSLPPLCLPPSHPCAHEPCSHGICYDAPGGFRCVCEPGWSGPRCSQSLARDACESQPCRAGGTCSSDGMGFHCTCPPGVQGRQCELLSPCTPNPCEHGGRCESAPGQLPVCSCPQGWQGPRCQQDVDECAGPAPCGPHGICTNLAGSFSCTCHGGYTGPSCDQDINDCDPNPCLNGGSCQDGVGSFSCSCLPGFAGPRCARDVDECLSNPCGPGTCTDHVASFTCTCPPGYGGFHCEQDLPDCSPSSCFNGGTCVDGVNSFSCLCRPGYTGAHCQHEADPCLSRPCLHGGVCSAAHPGFRCTCLESFTGPQCQTLVDWCSRQPCQNGGRCVQTGAYCLCPPGWSGRLCDIRSLPCREAAAQIGVRLEQLCQAGGQCVDEDSSHYCVCPEGRTGSHCEQEVDPCLAQPCQHGGTCRGYMGGYMCECLPGYNGDNCEDDVDECASQPCQHGGSCIDLVARYLCSCPPGTLGVLCEINEDDCGPGPPLDSGPRCLHNGTCVDLVGGFRCTCPPGYTGLRCEADINECRSGACHAAHTRDCLQDPGGGFRCLCHAGFSGPRCQTVLSPCESQPCQHGGQCRPSPGPGGGLTFTCHCAQPGD

SEQ ID NO: 34 - protein, 1280 aa, Artificial Sequence
  Synthetic polypeptide
MVAAAAATEARLRRRTAATAALAGRSGGPHWDWDVTRAGRPGLGAGLRLPRLLSPPLRPRLLLLLLLLSPPLLLLLLPCEAEAAAAAAAVSGSAAAEAKECDRPCVNGGRCNPGTGQCVCPAGWVGEQCQHCGGRFRLTGSSGFVTDGPGNYKYKTKCTWLIEGQPNRIMRLRFNHFATECSWDHLYVYDGDSIYAPLVAAFSGLIVPERDGNETVPEVVATSGYALLHFFSDAAYNLTGFNITYSFDMCPNNCSGRGECKISNSSDTVECECSENWKGEACDIPHCTDNCGFPHRGICNSSDVRGCSCFSDWQGPGCSVPVPANQSFWTREEYSNLKLPRASHKAVVNGNIMWVVGGYMFNHSDYNMVLAYDLASREWLPLNRSVNNVVVRYGHSLALYKDKIYMYGGKIDSTGNVTNELRVFHIHNESWVLLTPKAKEQYAVVGHSAHIVTLKNGRVVMLVIFGHCPLYGYISNVQEYDLDKNTWSILHTQGALVQGGYGHSSVYDHRTRALYVHGGYKAFSANKYRLADDLYRYDVDTQMWTILKDSRFFRYLHTAVIVSGTMLVFGGNTHNDTSMSHGAKCFSSDFMAYDIACDRWSVLPRPDLHHDVNRFGHSAVLHNSTMYVFGGFNSLLLSDILVFTSEQCDAHRSEAACLAAGPGIRCVWNTGSSQCISWALATDEQEEKLKSECFSKRTLDHDRCDQHTDCYSCTANTNDCHWCNDHCVPRNHSCSEGQISIFRYENCPKDNPMYYCNKKTSCRSCALDQNCQWEPRNQECIALPENICGIGWHLVGNSCLKITTAKENYDNAKLFCRNHNALLASLTTQKKVEFVLKQLRIMQSSQSMSKLTLTPWVGLRKINVSYWCWEDMSPFTNSLLQWMPSEPSDAGFCGILSEPSTRGLKAATCINPLNGSVCERPANHSAKQCRTPCALRTACGDCTSGSSECMWCSNMKQCVDSNAYVASFPFGQCMEWYTMSTCPPENCSGYCTCSHCLEQPGCGWCTDPSNTGKGKCIEGSYKGPVKMPSQAPTGNFYPQPLLNSSMCLEDSRYNWSFIHCPACQCNGHSKCINQSICEKCENLTTGKHCETCISGFYGDPTNGGKCQPCKCNGHASLCNTNTGKCFCTTKGVKGDECQLCEVENRYQGNPLRGTCYYTLLIDYQFTFSLSQEDDRYYTAINFVATPDEQNRDLDMFINASKNFNLNITWAASFSAGTQAGEEMPVVSKTNIKEYKDSFSNEKFDFRNHPNITFFVYVSNFTWPIKIQGHGWSWRPLSSAN

SEQ ID NO: 35 - protein, 1280 aa, Artificial Sequence; identical to SEQ ID NO: 34
  Synthetic polypeptide

SEQ ID NO: 36 - protein, 1271 aa, Artificial Sequence
  Synthetic polypeptide
MALRGFCSADGSDPLWDWNVTWNTSNPDFTKCFQNTVLVWVPCFYLWACFPFYFLYLSRHDRGYIQMTPLNKTKTALGFLLWIVCWADLFYSFWERSRGIFLAPVFLVSPTLLGITMLLATFLIQLERRKGVQSSGIMLTFWLVALVCALAILRSKIMTALKEDAQVDLFRDITFYVYFSLLLIQLVLSCFSDRSPLFSETIHDPNPCPESSASFLSRITFWWITGLIVRGYRQPLEGSDLWSLNKEDTSEQVVPVLVKNWKKECAKTRKQPVKVVYSSKDPAQPKESSKVDANEEVEALIVKSPQKEWNPSLFKVLYKTFGPYFLMSFFFKAIHDLMMFSGPQILKLLIKFVNDTKAPDWQGYFYTVLLFVTACLQTLVLHQYFHICFVSGMRIKTAVIGAVYRKALVITNSARKSSTVGEIVNLMSVDAQRFMDLATYINMIWSAPLQVILALYLLWLNLGPSVLAGVAVMVLMVPVNAVMAMKTKTYQVAHMKSKDNRIKLMNEILNGIKVLKLYAWELAFKDKVLAIRQEELKVLKKSAYLSAVGTFTWVCTPFLVALCTFAVYVTIDENNILDAQTAFVSLALFNILRFPLNILPMVISSIVQASVSLKRLRIFLSHEELEPDSIERRPVKDGGGTNSITVRNATFTWARSDPPTLNGITFSIPEGALVAVVGQVGCGKSSLLSALLAEMDKVEGHVAIKGSVAYVPQQAWIQNDSLRENILFGCQLEEPYYRSVIQACALLPDLEILPSGDRTEIGEKTRILVTHSMSYLPQVDVIIVMSGGKISEMGSYQELLARDGAFAEFLRTYASTEQEQDAEENGVTGVSGPGKEAKQMENGMLVTDSAGKQLQRQLSSSSSYSGDISRHHNSTAELQKAEAKKEETWKLMEADKAQTGQVKLSVYWDYMKAIGLFISFLSIFLFMCNHVSALASNYWLSLWTDDPIVNGTQEHTKVRLSVYGALGISQGIAVFGYSMAVSIGGILASRCLHVDLLHSILRSPMSFFERTPSGNLVNRFSKELDTVDSMIPEVIKMFMGSLFNVIGACIVILLATPIAAIIIPPLGLIYFFVQRFYVASSRQLKRLESVSRSPVYSHFNETLLGVSVIRAFEEQERFIHQSDLKVDENQKAYYPSIVANRWLAVRLECVGNCIVLFAALFAVISRHSLSAGLVGLSVSYSLQVTTYLNWLVRMSSEMETNIVAVERLKEYSETEKEAPWQIQETAPPSSWPQVGRVEFRNYCLRYREDLDFVLRHINVTINGGEKVSSNL

SEQ ID NO: 37 - protein, 1270 aa, Artificial Sequence
  Synthetic polypeptide
MTEALQWARYHWRRLIRGATRDDDSGPYNYSSLLACGRKSSQTPKLSGRHRIVVPHIQPFKDEYEKFSGAYVNNRIRTTKYTLLNFVPRNLFEQFHRAANLYFLFLVVLNWVPLVEAFQKEITMLPLVVVLTIIAIKDGLEDYRKYKIDKQINNLITKVYSRKEKKYIDRCWKDVTVGDFIRLSCNEVIPADMVLLFSTDPDGICHIETSGLDGESNLKQRQVVRGYAEQDSEVDPEKFSSRIECESPNNDLSRFRGFLEHSNKERVGLSKENLLLRGCTIRNTEAVVGIVVYAGHETKAMLNNSGPRYKRSKLERRANTDVLWCVMLLVIMCLTGAVGHGIWLSRYEKMHFFNVPEPDGHIISPLLAGFYMFWTMIILLQVLIPISLYVSIEIVKLGQIYFIQSDVDFYNEKMDSIVQCRALNIAEDLGQIQYLFSDKTGTLTENKMVFRRCSVAGFDYCHEENARRLESYQEAVSEDEDFIDTVSGSLSNMAKPRAPSCRTVHNGPLGNKPSNHLAGSSFTLGSGEGASEVPHSRQAAFSSPIETDVVPDTRLLDKFSQITPRLFMPLDETIQNPPMETLYIIDFFIALAICNTVVVSAPNQPRQKIRHPSLGGLPIKSLEEIKSLFQRWSVRRSSSPSLNSGKEPSSGVPNAFVSRLPLFSRMKPASPVEEEVSQVCESPQCSSSSACCTETEKQHGDAGLLNGKAESLPGQPLACNLCYEAESPDEAALVYAARAYQCTLRSRTPEQVMVDFAALGPLTFQLLHILPFDSVRKRMSVVVRHPLSNQVVVYTKGADSVIMELLSVASPDGASLEKQQMIVREKTQKHLDDYAKQGLRTLCIAKKVMSDTEYAEWLRNHFLAETSIDNREELLLESAMRLENKLTLLGATGIEDRLQEGVPESIEALHKAGIKIWMLTGDKQETAVNIAYACKLLEPDDKLFILNTQSKDACGMLMSTILKELQKKTQALPEQVSLSEDLLQPPVPRDSGLRAGLIITGKTLEFALQESLQKQFLELTSWCQAVVCCRATPLQKSEVVKLVRSHLQVMTLAIGDGANDVSMIQVADIGIGVSGQEGMQAVMASDFAVSQFKHLSKLLLVHGHWCYTRLSNMILYFFYKNVAYVNLLFWYQFFCGFSGTSMTDYWVLIFFNLLFTSAPPVIYGVLEKDVSAETLMQLPELYRSGQKSEAYLPHTFWITLLDAFYQSLVCFFVPYFTYQGSDTDIFAFGNPLNTAALFIVLLHLVIESKSLTRCSDSHLQFQSFGRLWIT

SEQ ID NO: 38 - protein, 1268 aa, Artificial Sequence
  Synthetic polypeptide
GPGARGRRRRRRPMSPPPPPPPVRALPLLLLLAGPGAAAPPCLDGSPCANGGRCTQLPSREAACLCPPGWVGERCQLEDPCHSGPCAGRGVCQSSVVAGTARFSCRCPRGFRGPDCSLPDPCLSSPCAHGARCSVGPDGRFLCSCPPGYQGRSCRSDVDECRVGEPCRHGGTCLNTPGSFRCQCPAGYTGPLCENPAVPCAPSPCRNGGTCRQSGDLTYDCACLPGFEGQNCEVNVDDCPGHRCLNGGTCVDGVNTYNCQCPPEWTGQFCTEDVDECQLQPNACHNGGTCFNTLGGHSCVCVNGWTGESCSQNIDDCATAVCFHGATCHDRVASFYCACPMGKTGLLCHLDDACVSNPCHEDAICDTNPVNGRAICTCPPGFTGGACDQDVDECSIGANPCEHLGRCVNTQGSFLCQCGRGYTGPRCETDVNECLSGPCRNQATCLDRIGQFTCICMAGFTGTYCEVDIDECQSSPCVNGGVCKDRVNGFSCTCPSGFSGSTCQLDVDECASTPCRNGAKCVDQPDGYECRCAEGFEGTLCDRNVDDCSPDPCHHGRCVDGIASFSCACAPGYTGTRCESQVDECRSQPCRHGGKCLDLVDKYLCRCPSGTTGVNCEVNIDDCASNPCTFGVCRDGINRYDCVCQPGFTGPLCNVEINECASSPCGEGGSCVDGENGFRCLCPPGSLPPLCLPPSHPCAHEPCSHGICYDAPGGFRCVCEPGWSGPRCSQSLARDACESQPCRAGGTCSSDGMGFHCTCPPGVQGRQCELLSPCTPNPCEHGGRCESAPGQLPVCSCPQGWQDPCLNGGSCQDGVGSFSCSCLPGFAGPRCARDVDECLSNPCGPGTCTDHVASFTCTCPPGYGGFHCEQDLPDCSPSSCFNGGTCVDGVNSFSCLCRPGYTGAHCQHEADPCLSRPCLHGGVCSAAHPGFRCTCLESFTGPQCQTLVDWCSRQPCQNGGRCVQTGAYCLCPPGWSGRLCDIRSLPCREAAAQIGVRLEQLCQAGGQCVDEDSSHYCVCPEGRTGSHCEQEVDPCLAQPCQHGGTCRGYMGGYMCECLPGYNGDNCEDDVDECASQPCQHGGSCIDLVARYLCSCPPGTLGVLCEINEDDCGPGPPLDSGPRCLHNGTCVDLVGGFRCTCPPGYTGLRCEADINECRSGACHAAHTRDCLQDPGGGFRCLCHAGFSGPRCQTVLSPCESQPCQHGGQCRPSPGPGGGLTFTCHCAQLLGRLRQENHLNPGGGGCSEPSRHCTPAWRLSDTPSQKTKKQ

SEQ ID NO: 39 - protein, 1268 aa, Artificial Sequence
  Synthetic polypeptide
MALRGFCSADGSDPLWDWNVTWNTSNPDFTKCFQNTVLVWVPCFYLWACFPFYFLYLSRHDRGYIQMTPLNKTKTALGFLLWIVCWADLFYSFWERSRGIFLAPVFLVSPTLLGITMLLATFLIQLERRKGVQSSGIMLTFWLVALVCALAILRSKIMTALKEDAQVDLFRDITFYVYFSLLLIQLVLSCFSDRSPLFSETIHDPNPCPESSASFLSRITFWWITGLIVRGYRQPLEGSDLWSLNKEDTSEQVVPVLVKNWKKECAKTRKQPVKVVYSSKDPAQPKESSKVDANEEVEALIVKSPQKEWNPSLFKVLYKTFGPYFLMSFFFKAIHDLMMFSGPQILKLLIKFVNDTKAPDWQGYFYTVLLFVTACLQTLVLHQYFHICFVSGMRIKTAVIGAVYRKALVITNSARKSSTVGEIVNLMSVDAQRFMDLATYINMIWSAPLQVILALYLLWLNLGPSVLAGVAVMVLMVPVNAVMAMKTKTYQVAHMKSKDNRIKLMNEILNGIKVLKLYAWELAFKDKVLAIRQEELKVLKKSAYLSAVGTFTWVCTPFLVALCTFAVYVTIDENNILDAQTAFVSLALFNILRFPLNILPMVISSIVQASVSLKRLRIFLSHEELEPDSIERRPVKDGGGTNSITVRNATFTWARSDPPTLNGITFSIPEGALVAVVGQVGCGKSSLLSALLAEMDKVEGHVAIKGVNLSGGQKQRVSLARAVYSNADIYLFDDPLSAVDAHVGKHIFENVIGPKGMLKNKTRILVTHSMSYLPQVDVIIVMSGGKISEMGSYQELLARDGAFAEFLRTYASTEQEQDAEENGVTGVSGPGKEAKQMENGMLVTDSAGKQLQRQLSSSSSYSGDISRHHNSTAELQKAEAKKEETWKLMEADKAQTGQVKLSVYWDYMKAIGLFISFLSIFLFMCNHVSALASNYWLSLWTDDPIVNGTQEHTKVRLSVYGALGISQGIAVFGYSMAVSIGGILASRCLHVDLLHSILRSPMSFFERTPSGNLVNRFSKELDTVDSMIPEVIKMFMGSLFNVIGACIVILLATPIAAIIIPPLGLIYFFVQRFYVASSRQLKRLESVSRSPVYSHFNETLLGVSVIRAFEEQERFIHQSDLKVDENQKAYYPSIVANRWLAVRLECVGNCIVLFAALFAVISRHSLSAGLVGLSVSYSLQVTTYLNWLVRMSSEMETNIVAVERLKEYSETEKEAPWQIQETAPPSSWPQVGRVEFRNYCLRYREDLDFVLRHINVTINGGEKVSSNL

SEQ ID NO: 40 - protein, 1257 aa, Artificial Sequence
  Synthetic polypeptide
MAQALLVPPGPESFRLFTRESLAAIEKRAAEEKAKKPKKEQDNDDENKPKPNSDLEAGKNLPFIYGDIPPEMVSEPLEDLDPYYINKKTFIVMNKGKAIFRFSATSALYILTPLNPVRKIAIKILVHSLFSMLIMCTILTNCVFMTLSNPPDWTKNVEYTFTGIYTFESLIKILARGFCLEDFTFLRDPWNWLDFSVIVMAYVTEFVSLGNVSALRTFRVLRALKTISVIPGLKTIVGALIQSVKKLSDVMILTVFCLSVFALIGLQLFMGNLRNKCLQWPPSDSAFETNTTSYFNGTMDSNGTFVNVTMSTFNWKDYIGDDSHFYVLDGQKDPLLCGNGSDAGQCPEGYICVKAGRNPNYGYTSFDTFSWAFLSLFRLMTQDYWENLYQLTLRAAGKTYMIFFVLVIFLGSFYLVNLILAVVAMAYEEQNQATLEEAEQKEAEFQQMLEQLKKQQEEAQAVAAASAASRDFSGIGGLGELLESSSEASKLSSKSAKEWRNRRKKRRQREHLEGNNKGERDSFPKSESEDSVKRSSFLFSMDGNRLTSDKKFCSPHQSLLSIRGSLFSPRRNSKTSIFSFRGRAKDVGSENDFADDEHSTFEDSESRRDSLFVPHRHGERRNSNGTTTETEVRKRRLSSYQISMEMLEDSSGRQRAVSIASILTNTMEELEESRQKCPPCWYRFANVFLIWDCCDAWLKVKHLVNLIVMDPFVDLAITICIVLNTLFMAMEHYPMTEQFSSVLTVGNLVFTGIFTAEMVLKIIAMDPYYYFQEGWNIFDGIIVSLSLMELGLSNVEGLSVLRSFRLLRVFKLAKSWPTLNMLIKIIGNSVGALGNLTLVLAIIVFIFAVVGMQLFGKSYKECVCKINDDCTLPRWHMNDFFHSFLIVFRVLCGEWIETMWDCMEVAGQTMCLIVFMLVMVIGNLVVLNLFLALLLSSFSSDNLAATDDDNEMNNLQIAVGRMQKGIDYVKNKMRECFQKAFFRKPKVIEIHEGNKIDSCMSNNTGIEISKELNYLRDGNGTTSGVGTGSSVEKYVIDENDYMSFINNPSLTVTVPIAVGESDFENLNTEEFSSESELEESKEKLNATSSSEGSTVDVVLPREGEQAETEPEEDLKPEACFTEGCIKKFPFCQVSTEEGKGKIWWNLRKTCYSIVEHNWFETFIVFMILLSSGALAFEDIYIEQRKTIKTMLEYADKVFTYIFILEMLLKWVAYGFQTYFTNAWCWLDFLIVDARCHLQPFCLSPLTTNQSASSSPFY

SEQ ID NO: 41 - protein, 1257 aa, Artificial Sequence
  Synthetic polypeptide
MAQALLVPPGPESFRLFTRESLAAIEKRAAEEKAKKPKKEQDNDDENKPKPNSDLEAGKNLPFIYGDIPPEMVSEPLEDLDPYYINKKTFIVMNKGKAIFRFSATSALYILTPLNPVRKIAIKILVHSLFSMLIMCTILTNCVFMTLSNPPDWTKNVEYTFTGIYTFESLIKILARGFCLEDFTFLRDPWNWLDFSVIVMAYVTEFVDLGNVSALRTFRVLRALKTISVIPGLKTIVGALIQSVKKLSDVMILTVFCLSVFALIGLQLFMGNLRNKCLQWPPSDSAFETNTTSYFNGTMDSNGTFVNVTMSTFNWKDYIGDDSHFYVLDGQKDPLLCGNGSDAGQCPEGYICVKAGRNPNYGYTSFDTFSWAFLSLFRLMTQDYWENLYQLTLRAAGKTYMIFFVLVIFLGSFYLVNLILAVVAMAYEEQNQATLEEAEQKEAEFQQMLEQLKKQQEEAQAVAAASAASRDFSGIGGLGELLESSSEASKLSSKSAKEWRNRRKKRRQREHLEGNNKGERDSFPKSESEDSVKRSSFLFSMDGNRLTSDKKFCSPHQSLLSIRGSLFSPRRNSKTSIFSFRGRAKDVGSENDFADDEHSTFEDSESRRDSLFVPHRHGERRNSNGTTTETEVRKRRLSSYQISMEMLEDSSGRQRAVSIASILTNTMEELEESRQKCPPCWYRFANVFLIWDCCDAWLKVKHLVNLIVMDPFVDLAITICIVLNTLFMAMEHYPMTEQFSSVLTVGNLVFTGIFTAEMVLKIIAMDPYYYFQEGWNIFDGIIVSLSLMELGLSNVEGLSVLRSFRLLRVFKLAKSWPTLNMLIKIIGNSVGALGNLTLVLAIIVFIFAVVGMQLFGKSYKECVCKINDDCTLPRWHMNDFFHSFLIVFRVLCGEWIETMWDCMEVAGQTMCLIVFMLVMVIGNLVVLNLFLALLLSSFSSDNLAATDDDNEMNNLQIAVGRMQKGIDYVKNKMRECFQKAFFRKPKVIEIHEGNKIDSCMSNNTGIEISKELNYLRDGNGTTSGVGTGSSVEKYVIDENDYMSFINNPSLTVTVPIAVGESDFENLNTEEFSSESELEESKEKLNATSSSEGSTVDVVLPREGEQAETEPEEDLKPEACFTEGCIKKFPFCQVSTEEGKGKIWWNLRKTCYSIVEHNWFETFIVFMILLSSGALAFEDIYIEQRKTIKTMLEYADKVFTYIFILEMLLKWVAYGFQTYFTNAWCWLDFLIVDARCHLQPFCLSPLTTNQSASSSPFY

SEQ ID NO: 42 - protein, 1246 aa, Artificial Sequence
  Synthetic polypeptide
MEQTDCKPYQPLPKVKHEMDLAYTSSSDESEDGRKPRQSYNSRETLHEYNQELRMNYNSQSRKRKEVEKSTQEMEFCETSHTLCSGYQTDMHSVSRHGYQLEMGSDVDTETEGAASPDHALRMWIRGMKSEHSSCLSSRANSALSLTDTDHERKSDGENGFKFSPVCCDMEAQAGSTQDVQSSPHNQFTFRPLPPPPPPPHACTCARKPPPAADSLQRRSMTTRSQPSPAAPAPPTSTQDSVHLHNSWVLNSNIPLETRHFLFKHGSGSSAIFSAASQNYPLTSNTVYSPPPRPLPRSTFSRPAFTFNKPYRCCNWKCTALSATAITVTLALLLAYVIAVHLFGLTWQLQPVEGELYANGVSKGNRGTESMDTTYSPIGGKVSDKSEKKVFQKGRAIDTGEVDIGAQVMQTIPPGLFWRFQITIHHPIYLKFNISLAKDSLLGIYGRRNIPPTHTQFDFVKLMDGKQLVKQDSKGSDDTQHSPRNLILTSLQETGFIEYMDQGPWYLAFYNDGKKMEQVFVLTTAIEIMDDCSTNCNGNGECISGHCHCFPGFLGPDCARDSCPVLCGGNGEYEKGHCVCRHGWKGPECDVPEEQCIDPTCFGHGTCIMGVCICVPGYKGEICEEEDCLDPMCSNHGICVKGECHCSTGWGGVNCETPLPVCQEQCSGHGTFLLDAGVCSCDPKWTGSDCSTELCTMECGSHGVCSRGICQCEEGWVGPTCEERSCHSHCTEHGQCKDGKCECSPGWEGDHCTIAHYLDAVRDGCPGLCFGNGRCTLDQNGWHCVCQVGWSGTGCNVVMEMLCGDNLDNDGDGLTDCVDPDCCQQSNCYISPLCQGSPDPLDLIQQSQTLFSQHTSRLFYDRIKFLIGKDSTHVIPPEVSFDSRRACVIRGQVVAIDGTPLVGVNVSFLHHSDYGFTISRQDGSFDLVAIGGISVILIFDRSPFLPEKRTLWLPWNQFIVVEKVTMQRVVSDPPSCDISNFISPNPIVLPSPLTSFGGSCPERGTIVPELQVVQEEIPIPSSFVRLSYLSSRTPGYKTLLRILLTHSTIPVGMIKVHLTVAVEGRLTQKWFPAAINLVYTFAWNKTDIYGQKVWGLAEALVSVGYEYETCPDFILWEQRTVVLQGFEMDASNLGGWSLNKHHILNPQSGIIHKGNGENMFISQQPPVISTIMGNGHQRSVACTNCNGPAHNNKLFAPVALASGPDGSVYVGDFNFVRRIFPSGNSVSILELRNRDTRHRSSKTRKV

SEQ ID NO: 43 - protein, 1241 aa, Artificial Sequence
  Synthetic polypeptide
GPGARGRRRRRRPMSPPPPPPPVRALPLLLLLAGPGAAAPPCLDGSPCANGGRCTQLPSREAACLCPPGWVGERCQLEDPCHSGPCAGRGVCQSSVVAGTARFSCRCPRGFRGPDCSLPDPCLSSPCAHGARCSVGPDGRFLCSCPPGYQGRSCRSDVDECRVGEPCRHGGTCLNTPGSFRCQCPAGYTGPLCENPAVPCAPSPCRNGGTCRQSGDLTYDCACLPGFEGQNCEVNVDDCPGHRCLNGGTCVDGVNTYNCQCPPEWTGQFCTEDVDECQLQPNACHNGGTCFNTLGGHSCVCVNGWTGESCSQNIDDCATAVCFHGATCHDRVASFYCACPMGKTGLLCHLDDACVSNPCHEDAICDTNPVNGRAICTCPPGFTGGACDQDVDECSIGANPCEHLGRCVNTQGSFLCQCGRGYTGPRCETDVNECLSGPCRNQATCLDRIGQFTCICMAGFTGTYCEVDIDECQSSPCVNGGVCKDRVNGFSCTCPSGFSGSTCQLDVDECASTPCRNGAKCVDQPDGYECRCAEGFEGTLCDRNVDDCSPDPCHHGRCVDGIASFSCACAPGYTGTRCESQVDECRSQPCRHGGKCLDLVDKYLCRCPSGTTGVNCEVNIDDCASNPCTFGVCRDGINRYDCVCQPGFTGPLCNVEINECASSPCGEGGSCVDGENGFRCLCPPGSLPPLCLPPSHPCAHEPCSHGICYDAPGGFRCVCEPGWSGPRCSQSLARDACESQPCRAGGTCSSDGMGFHCTCPPGVQGRQCELLSPCTPNPCEHGGRCESAPGQLPVCSCPQGWQDPCLNGGSCQDGVGSFSCSCLPGFAGPRCARDVDECLSNPCGPGTCTDHVASFTCTCPPGYGGFHCEQDLPDCSPSSCFNGGTCVDGVNSFSCLCRPGYTGAHCQHEADPCLSRPCLHGGVCSAAHPGFRCTCLESFTGPQCQTLVDWCSRQPCQNGGRCVQTGAYCLCPPGWSGRLCDIRSLPCREAAAQIGVRLEQLCQAGGQCVDEDSSHYCVCPEGRTGSHCEQEVDPCLAQPCQHGGTCRGYMGGYMCECLPGYNGDNCEDDVDECASQPCQHGGSCIDLVARYLCSCPPGTLGVLCEINEDDCGPGPPLDSGPRCLHNGTCVDLVGGFRCTCPPGYTGLRCEADINECRSGACHAAHTRDCLQDPGGGFRCLCHAGFSGPRCQTVLSPCESQPCQHGGQCRPSPGPGGGLTFTCHCAQPGVVAAACNPSYSGG

SEQ ID NO: 44 - protein, 1233 aa, Artificial Sequence
  Synthetic polypeptide
MVVPEKEQSWIPKIFKKKTCTTFIVDSTDPGGTLCQCGRPRTAHPAVAMEDAFGAAVVTVWDSDAHTTEKPTDAYGELDFTGAGRKHSNFLRLSDRTDPAAVYSLVTRTWGFRAPNLVVSVLGGSGGPVLQTWLQDLLRRGLVRAAQSTGAWIVTGGLHTGIGRHVGVAVRDHQMASTGGTKVVAMGVAPWGVVRNRDTLINPKGSFPARYRWRGDPEDGVQFPLDYNYSAFFLVDDGTHGCLGGENRFRLRLESYISQQKTGVGGTGIDIPVLLLLIDGDEKMLTRIENATQAQLPCLLVAGSGGAADCLAETLEDTLAPGSGGARQGEARDRIRRFFPKGDLEVLQAQVERIMTRKELLTVYSSEDGSEEFETIVLKALVKACGSSEASAYLDELRLAVAWNRVDIAQSELFRGDIQWRSFHLEASLMDALLNDRPEFVRLLISHGLSLGHFLTPMRLAQLYSAAPSNSLIRNLLDQASHSAGTKAPALKGGAAELRPPDVGHVLRMLLGKMCAPRYPSGGAWDPHPGQGFGESMYLLSDKATSPLSLDAGLGQAPWSDLLLWALLLNRAQMAMYFWEMGSNAVSSALGACLLLRVMARLEPDAEEAARRKDLAFKFEGMGVDLFGECYRSSEVRAARLLLRRCPLWGDATCLQLAMQADARAFFAQDGVQSLLTQKWWGDMASTTPIWALVLAFFCPPLIYTRLITFRKSEEEPTREELEFDMDSVINGEGPVGTADPAEKTPLGVPRQSGRPGCCGGRCGGRRCLRRWFHFWGAPVTIFMGNVVSYLLFLLLFSRVLLVDFQPAPPGSLELLLYFWAFTLLCEELRQGLSGGGGSLASGGPGPGHASLSQRLRLYLADSWNQCDLVALTCFLLGVGCRLTPGLYHLGRTVLCIDFMVFTVRLLHIFTVNKQLGPKIVIVSKMMKDVFFFLFFLGVWLVAYGVATEGLLRPRDSDFPSILRRVFYRPYLQIFGQIPQEDMDVALMEHSNCSSEPGFWAHPPGAQAGTCVSQYANWLVVLLLVIFLLVANILLVNLLIAMFSYTFGKVQGNSDLYWKAQRYRLIREFHSRPALAPPFIVISHLRLLLRQLCRRPRSPQPSSPALEHFRVYLSKEAERKLLTWESVHKENFLLARARDKRESDSERLKRTSQKVDLALKQLGHIREYEQRLKVLEREVQQCSRVLGWVAEALSRSALLPPGGPPPPDLPGSKGPRDGAVSSLIALTLPRICK

SEQ ID NO: 45 - protein, 1229 aa, Artificial Sequence
  Synthetic polypeptide
GPGARGRRRRRRPMSPPPPPPPVRALPLLLLLAGPGAAAPPCLDGSPCANGGRCTQLPSREAACLCPPGWVGERCQLEDPCHSGPCAGRGVCQSSVVAGTARFSCRCPRGFRGPDCSLPDPCLSSPCAHGARCSVGPDGRFLCSCPPGYQGRSCRSDVDECRVGEPCRHGGTCLNTPGSFRCQCPAGYTGPLCENPAVPCAPSPCRNGGTCRQSGDLTYDCACLPGFEGQNCEVNVDDCPGHRCLNGGTCVDGVNTYNCQCPPEWTGQFCTEDVDECQLQPNACHNGGTCFNTLGGHSCVCVNGWTGESCSQNIDDCATAVCFHGATCHDRVASFYCACPMGKTGLLCHLDDACVSNPCHEDAICDTNPVNGRAICTCPPGFTGGACDQDVDECSIGANPCEHLGRCVNTQGSFLCQCGRGYTGPRCETDVNECLSGPCRNQATCLDRIGQFTCICMAGFTGTYCEVDIDECQSSPCVNGGVCKDRVNGFSCTCPSGFSGSTCQLDVDECASTPCRNGAKCVDQPDGYECRCAEGFEGTLCDRNVDDCSPDPCHHGRCVDGIASFSCACAPGYTGTRCESQVDECRSQPCRHGGKCLDLVDKYLCRCPSGTTGVNCEVNIDDCASNPCTFGVCRDGINRYDCVCQPGFTGPLCNVEINECASSPCGEGGSCVDGENGFRCLCPPGSLPPLCLPPSHPCAHEPCSHGICYDAPGGFRCVCEPGWSGPRCSQSLARDACESQPCRAGGTCSSDGMGFHCTCPPGVQGRQCELLSPCTPNPCEHGGRCESAPGQLPVCSCPQGWQDPCLNGGSCQDGVGSFSCSCLPGFAGPRCARDVDECLSNPCGPGTCTDHVASFTCTCPPGYGGFHCEQDLPDCSPSSCFNGGTCVDGVNSFSCLCRPGYTGAHCQHEADPCLSRPCLHGGVCSAAHPGFRCTCLESFTGPQCQTLVDWCSRQPCQNGGRCVQTGAYCLCPPGWSGRLCDIRSLPCREAAAQIGVRLEQLCQAGGQCVDEDSSHYCVCPEGRTGSHCEQEVDPCLAQPCQHGGTCRGYMGGYMCECLPGYNGDNCEDDVDECASQPCQHGGSCIDLVARYLCSCPPGTLGVLCEINEDDCGPGPPLDSGPRCLHNGTCVDLVGGFRCTCPPGYTGLRCEADINECRSGACHAAHTRDCLQDPGGGFRCLCHAGFSGPRCQTVLSPCESQPCQHGGQCRPSPGPGGGLTFTCHCAQPGD

SEQ ID NO: 46 - protein, 1212 aa, Artificial Sequence
  Synthetic polypeptide
MALRGFCSADGSDPLWDWNVTWNTSNPDFTKCFQNTVLVWVPCFYLWACFPFYFLYLSRHDRGYIQMTPLNKTKTALGFLLWIVCWADLFYSFWERSRGIFLAPVFLVSPTLLGITMLLATFLIQLERRKGVQSSGIMLTFWLVALVCALAILRSKIMTALKEDAQVDLFRDITFYVYFSLLLIQLVLSCFSDRSPLFSETIHDPNPCPESSASFLSRITFWWITGLIVRGYRQPLEGSDLWSLNKEDTSEQVVPVLVKNWKKECAKTRKQPVKVVYSSKDPAQPKESSKVDANEEVEALIVKSPQKEWNPSLFKVLYKTFGPYFLMSFFFKAIHDLMMFSGPQILKLLIKFVNDTKAPDWQGYFYTVLLFVTACLQTLVLHQYFHICFVSGMRIKTAVIGAVYRKALVITNSARKSSTVGEIVNLMSVDAQRFMDLATYINMIWSAPLQVILALYLLWLNLGPSVLAGVAVMVLMVPVNAVMAMKTKTYQVAHMKSKDNRIKLMNEILNGIKVLKLYAWELAFKDKVLAIRQEELKVLKKSAYLSAVGTFTWVCTPFLVALCTFAVYVTIDENNILDAQTAFVSLALFNILRFPLNILPMVISSIVQASVSLKRLRIFLSHEELEPDSIERRPVKDGGGTNSITVRNATFTWARSDPPTLNGITFSIPEGALVAVVGQVGCGKSSLLSALLAEMDKVEGHVAIKTRILVTHSMSYLPQVDVIIVMSGGKISEMGSYQELLARDGAFAEFLRTYASTEQEQDAEENGVTGVSGPGKEAKQMENGMLVTDSAGKQLQRQLSSSSSYSGDISRHHNSTAELQKAEAKKEETWKLMEADKAQTGQVKLSVYWDYMKAIGLFISFLSIFLFMCNHVSALASNYWLSLWTDDPIVNGTQEHTKVRLSVYGALGISQGIAVFGYSMAVSIGGILASRCLHVDLLHSILRSPMSFFERTPSGNLVNRFSKELDTVDSMIPEVIKMFMGSLFNVIGACIVILLATPIAAIIIPPLGLIYFFVQRFYVASSRQLKRLESVSRSPVYSHFNETLLGVSVIRAFEEQERFIHQSDLKVDENQKAYYPSIVANRWLAVRLECVGNCIVLFAALFAVISRHSLSAGLVGLSVSYSLQVTTYLNWLVRMSSEMETNIVAVERLKEYSETEKEAPWQIQETAPPSSWPQVGRVEFRNYCLRYREDLDFVLRHINVTINGGEKVSSNL

SEQ ID NO: 47 - protein, 1192 aa, Artificial Sequence
  Synthetic polypeptide
MAGLRRPQPGCYCRTAAAVNLLLGVFQVLLPCCRPGGAQGQAIEPLPNVVELWQAEEGELLLPTQGDSEEGLEEPSQEQSFSDKLFSGKGLHFQPSVLDFGIQFLGHPVAKILHAYNPSRDSEVVVNSVFAAAGHFHVPPVPCRVIPAMGKTSFRIIFLPTEEGSIESSLFINTSSYGVLSYHVSGIGTRRISTEGSAKQLPNAYFLLPKVQSIQLSQMQAETTNTSLLQVQLECSLHNKVCQQLKGCYLESDDVLRLQMSIMVTMENFSKEFEENTQHLLDHLSIVYVATDESETSDDSAVNMYILHSGNSLIWIQDIRHFSQRDALSLQFEPVLLPTSTTNFTKIASFTCKAATSCDSGIIEDVKKTTHTPTLKACLFSSVAQGYFRMDSSATQFHIETHENTSGLWSIWYRNHFDRSVVLNDVFLSKETKHMLKILNFTGPLFLPPGCWNIFSLKLAVKDIAINLFTNVFLTTNIGAIFAIPLQIYSAPTKEGSLGFEVIAHCGMHYFMGKSKAGNPNWNGSLSLDQSTWNVDSELANKLYERWKKYKNGDVCKRNVLGTTRFAHLKKSKESESFVFFLPRLIAEPGLMLNFSATALRSRMIKYFVVQNPSSWPVSLQLLPLSLYPKPEALVHLLHRWFGTDMQMINFTTGEFQLTEACPYLGTHSEESRFGILHLHLQPLEMKRVGVVFTPADYGKVTSLILIRNNLTVIDMIGVEGFGARELLKVGGRLPGAGGSLRFKVPESTLMDCRRQLKDSKQILSITKNFKVENIGPLPITVSSLKINGYNCQGYGFEVLDCHQFSLDPNTSRDISIVFTPDFTSSWVIRDLSLVTAADLEFRFTLNVTLPHHLLPLCADVVPGPSWEESFWRLTVFFVSLSLLGVILIAFQQAQYILMEFMKTRQRQNASSSSQQNNGPMDVISPHSYKSNCKNFLDTYGPSDKGRGKNCLPVNTPQSRIQNAAKRSPATYGHSQKKHKCSVYYSKHKTSTAAASSTSTTTEEKQTSPLGSSLPAAKEDICTDAMRENWISLRYASGINVNLQKNLTLPKNLLNKEENTLKNTIVFSNPSSECSMKEGIQTCMFPKETDIKTSENTAEFKERELCPLKTSKKLPENHLPRNSPQYHQPDLPEISRKNNGNNQQVPVKNEVDHCENLKKVDTKPSSEKKIHKTSREDMFSEKQDIPFVENED

SEQ ID NO: 48 - protein, 1191 aa, Artificial Sequence
  Synthetic polypeptide
MAGLRRPQPGCYCRTAAAVNLLLGVFQVLLPCCRPGGAQGQAIEPLPNVVELWQAEEGELLLPTQGDSEEGLEEPSQEQSFSDKLFSGKGLHFQPSVLDFGIQFLGHPVAKILHAYNPSRDSEVVVNSVFAAAGHFHVPPVPCRVIPAMGKTSFRIIFLPTEEGSIESSLFINTSSYGVLSYHVSGIGTRRISTEGSAKQLPNAYFLLPKVQSIQLSQMQAETTNTSLLQVQLECSLHNKVCQQLKGCYLESDDVLRLQMSIMVTMENFSKEFEENTQHLLDHLSIVYVATDESETSDDSAVNMYILHSGNSLIWIQDIRHFSQRDALSLQFEPVLLPTSTTNFTKIASFTCKATSCDSGIIEDVKKTTHTPTLKACLFSSVAQGYFRMDSSATQFHIETHENTSGLWSIWYRNHFDRSVVLNDVFLSKETKHMLKILNFTGPLFLPPGCWNIFSLKLAVKDIAINLFTNVFLTTNIGAIFAIPLQIYSAPTKEGSLGFEVIAHCGMHYFMGKSKAGNPNWNGSLSLDQSTWNVDSELANKLYERWKKYKNGDVCKRNVLGTTRFAHLKKSKESESFVFFLPRLIAEPGLMLNFSATALRSRMIKYFVVQNPSSWPVSLQLLPLSLYPKPEALVHLLHRWFGTDMQMINFTTGEFQLTEACPYLGTHSEESRFGILHLHLQPLEMKRVGVVFTPADYGKVTSLILIRNNLTVIDMIGVEGFGARELLKVGGRLPGAGGSLRFKVPESTLMDCRRQLKDSKQILSITKNFKVENIGPLPITVSSLKINGYNCQGYGFEVLDCHQFSLDPNTSRDISIVFTPDFTSSWVIRDLSLVTAADLEFRFTLNVTLPHHLLPLCADVVPGPSWEESFWRLTVFFVSLSLLGVILIAFQQAQYILMEFMKTRQRQNASSSSQQNNGPMDVISPHSYKSNCKNFLDTYGPSDKGRGKNCLPVNTPQSRIQNAAKRSPATYGHSQKKHKCSVYYSKHKTSTAAASSTSTTTEEKQTSPLGSSLPAAKEDICTDAMRENWISLRYASGINVNLQKNLTLPKNLLNKEENTLKNTIVFSNPSSECSMKEGIQTCMFPKETDIKTSENTAEFKERELCPLKTSKKLPENHLPRNSPQYHQPDLPEISRKNNGNNQQVPVKNEVDHCENLKKVDTKPSSEKKIHKTSREDMFSEKQDIPFVENED

SEQ ID NO: 49 - protein, 1175 aa, Artificial Sequence
  Synthetic polypeptide
MPLFKNTSVSSLYSGCRLTLLRPEKDGAATRVDAVCTHRPDPKSPGLDRERLYWKLSQLTHGITELGPYTLDRHSLYVNGFTHQSSMTTTRTPDTSTMHLATSRTPASLSGPMTASPLLVLFTINFTITNLRYEENMHHPGSRKFNTTERVLQGLLRPVFKNTSVGPLYSGCRLTLLRPKKDGAATKVDAICTYRPDPKSPGLDREQLYWELSQLTHSITELGPYTLDRDSLYVNGFTQRSSVPTTSIPGTPTVDLGTSGTPVSKPGPSAASPLLVLFTLNFTITNLRYEENMQHPGSRKFNTTERVLQGLLRSLFKSTSVGPLYSGCRLTLLRPEKDGTATGVDAICTHHPDPKSPRLDREQLYWELSQLTHNITELGPYALDNDSLFVNGFTHRSSVSTTSTPGTPTVYLGASKTPASIFGPSAASHLLILFTLNFTITNLRYEENMWPGSRKFNTTERVLQGLLRPLFKNTSVGPLYSGCRLTLLRPEKDGEATGVDAICTHRPDPTGPGLDREQLYLELSQLTHSITELGPYTLDRDSLYVNGFTHRSSVPTTSTGVVSEEPFTLNFTINNLRYMADMGQPGSLKFNITDNVMQHLLSPLFQRSSLGARYTGCRVIALRSVKNGAETRVDLLCTYLQPLSGPGLPIKQVFHELSQQTHGITRLGPYSLDKDSLYLNGYNEPGPDEPPTTPKPATTFLPPLSEATTAMGYHLKTLTLNFTISNLQYSPDMGKGSATFNSTEGVLQHLLRPLFQKSSMGPFYLGCQLISLRPEKDGAATGVDTTCTYHPDPVGPGLDIQQLYWELSQLTHGVTQLGFYVLDRDSLFINGYAPQNLSIRGEYQINFHIVNWNLSNPDPTSSEYITLLRDIQDKVTTLYKGSQLHDTFRFCLVTNLTMDSVLVTVKALFSSNLDPSLVEQVFLDKTLNASFHWLGSTYQLVDIHVTEMESSVYQPTSSSSTQHFYLNFTITNLPYSQDKAQPGTTNYQRNKRNIEDALNQLFRNSSIKSYFSDCQVSTFRSVPNRHHTGVDSLCNFSPLARRVDRVAIYEEFLRMTRNGTQLQNFTLDRSSVLVDGYSPNRNEPLTGNSDLPFWAVILIGLAGLLGVITCLICGVLAPQAEEWQNDTAERREGASECRKEFNWGQSERRLATGQPNSRGRSSSHSIPLLAPHPSH

SEQ ID NO: 50 - protein, 1162 aa, Artificial Sequence
  Synthetic polypeptide
MQRSPLEKASVVSKLFFSWTRPILRKGYRQRLELSDIYQIPSVDSADNLSEKLEREWDRELASKKNPKLINALRRCFFWRFMFYGIFLYLGEVTKAVQPLLLGRIIASYDPDNKEERSIAIYLGIGLCLLFIVRTLLLHPAIFGLHHIGMQMRIAMFSLIYKKTLKLSSRVLDKISIGQLVSLLSNNLNKFDEGLALAHFVWIAPLQVALLMGLIWELLQASAFCGLGFLIVLALFQAGLGRMMMKYRDQRAGKISERLVITSEMIENIQSVKAYCWEEAMEKMIENLRQTELKLTRKAAYVRYFNSSAFFFSGFFVVFLSVLPYALIKGIILRKIFTTISFCIVLRMAVTRQFPWAVQTWYDSLGAINKIQDFLQKQEYKTLEYNLTTTEVVMENVTAFWEEGFGELFEKAKQNNNNRKTSNGDDSLFFSNFSLLGTPVLKDINFKIERGQLLAVAGSTGAGKTSLLMVIMGELEPSEGKIKHSGRISFCSQFSWIMPGTIKENIIFGVSYDEYRYRSVIKACQLEEDISKFAEKDNIVLGEGGITLSGGQRARISLARAVYKDADLYLLDSPFGYLDVLTEKEIFESCVCKLMANKTRILVTSKMEHLKKADKILILHEGSSYFYGTFSELQNLQPDFSSKLMGCDSFDQFSAERRNSILTETLHRFSLEGDAPVSWTETKKQSFKQTGEFGEKRKNSILNPINSIRKFSIVQKTPLQMNGIEEDSDEPLERRLSLVPDSEQGEAILPRISVISTGPTLQARRRQSVLNLMTHSVNQGQNIHRKTTASTRKVSLAPQANLTELDIYSRRLSQETGLEISEEINEEDLKECFFDDMESIPAVTTWNTYLRYITVHKSLIFVLIWCLVIFLAEVAASLVVLWLLGNTPLQDKGNSTHSRNNSYAVIITSTSSYYVFYIYVGVADTLLAMGFFRGLPLVHTLITVSKILHHKMLHSVLQAPMSTLNTLKAGGILNRFSKDIAILDDLLPLTIFDFIQLLLIVIGAIAVVAVLQPYIFVATVPVIVAFIMLRAYFLQTSQQLKQLESEGRSPIFTHLVTSLKGLWTLRAFGRQPYFETLFHKALNLHTANWFLYLSTLRWFQMRIEMIFVIFFIAVTFISILTTGEGEGRVGIILTLAMNIMSTLQWAVNSSIDVDSLKPYLDE

SEQ ID NO: 51 - protein, 1132 aa, Artificial Sequence
  Synthetic polypeptide
MQRSPLEKASVVSKLFFSWTRPILRKGYRQRLELSDIYQIPSVDSADNLSEKLEREWDRELASKKNPKLINALRRCFFWRFMFYGIFLYLGEVTKAVQPLLLGRIIASYDPDNKEERSIAIYLGIGLCLLFIVRTLLLHPAIFGLHHIGMQMRIAMFSLIYKKGLALAHFVWIAPLQVALLMGLIWELLQASAFCGLGFLIVLALFQAGLGRMMMKYRDQRAGKISERLVITSEMIENIQSVKAYCWEEAMEKMIENLRQTELKLTRKAAYVRYFNSSAFFFSGFFVVFLSVLPYALIKGIILRKIFTTISFCIVLRMAVTRQFPWAVQTWYDSLGAINKIQDFLQKQEYKTLEYNLTTTEVVMENVTAFWEEGFGELFEKAKQNNNNRKTSNGDDSLFFSNFSLLGTPVLKDINFKIERGQLLAVAGSTGAGKTSLLMVIMGELEPSEGKIKHSGRISFCSQFSWIMPGTIKENIIFGVSYDEYRYRSVIKACQLEEDISKFAEKDNIVLGEGGITLSGGQRARISLARAVYKDADLYLLDSPFGYLDVLTEKEIFESCVCKLMANKTRILVTSKMEHLKKADKILILHEGSSYFYGTFSELQNLQPDFSSKLMGCDSFDQFSAERRNSILTETLHRFSLEGDAPVSWTETKKQSFKQTGEFGEKRKNSILNPINSIRKFSIVQKTPLQMNGIEEDSDEPLERRLSLVPDSEQGEAILPRISVISTGPTLQARRRQSVLNLMTHSVNQGQNIHRKTTASTRKVSLAPQANLTELDIYSRRLSQETGLEISEEINEEDLKECFFDDMESIPAVTTWNTYLRYITVHKSLIFVLIWCLVIFLAEVAASLVVLWLLGNTPLQDKGNSTHSRNNSYAVIITSTSSYYVFYIYVGVADTLLAMGFFRGLPLVHTLITVSKILHHKMLHSVLQAPMSTLNTLKAGGILNRFSKDIAILDDLLPLTIFDFIQLLLIVIGAIAVVAVLQPYIFVATVPVIVAFIMLRAYFLQTSQQLKQLESEGRSPIFTHLVTSLKGLWTLRAFGRQPYFETLFHKALNLHTANWFLYLSTLRWFQMRIEMIFVIFFIAVTFISILTTGEGEGRVGIILTLAMNIMSTLQWAVNSSIDVDSLKPYLDE

SEQ ID NO: 52 - protein, 1129 aa, Artificial Sequence
  Synthetic polypeptide
MGDMANSSIEFHPKPQQQRDVPQAGGFGCTLAELRTLMELRGAEALQKIEEAYGDVSGLCRRLKTSPTEGLADNTNDLEKRRQIYGQNFIPPKQPKTFLQLVWEALQDVTLIILEVAAIVSLGLSFYAPPGEESEACGNVSGGAEDEGEAEAGWIEGAAILLSVICVVLVTAFNDWSKEKQFRGLQSRIEQEQKFTVIRNGQLLQVPVAALVVGDIAQVKYGDLLPADGVLIQANDLKIDESSLTGESDHVRKSADKDPMLLSGTHVMEGSGRMVVTAVGVNSQTGIIFTLLGAGGEEEEKKDKKGKQQDGAMESSQTKAKKQDGAVAMEMQPLKSAEGGEMEEREKKKANAPKKEKSVLQGKLTKLAVQIGKAGLVMSAITVIILVLYFVIETFVVEGRTWLAECTPVYVQYFVKFFIIGVTVLVVAVPEGLPLAVTISLAYSVKKMMKDNNLVRHLDACETMGNATAICSDKTGTLTTNRMTVVQSYLGDTHYKEIPAPSALTPKILDLLVHAISINSAYTTKILPPEKEGALPRQVGNKTECALLGFVLDLKRDFQPVREQIPEDKLYKVYTFNSVRKSMSTVIRMPDGGFRLFSKGASEILLKKCTNILNSNGELRGFRPRDRDDMVRKIIEPMACDGLRTICIAYRDFSAGQEPDWDNENEVVGDLTCIAVVGIEDPVRPEVPEAIRKCQRAGITVRMVTGDNINTARAIAAKCGIIQPGEDFLCLEGKEFNRRIRNEKGEIEQERLDKVWPKLRVLARSSPTDKHTLVKGIIDSTTGEQRQVVAVTGDGTNDGPALKKADVGFAMGIAGTDVAKEASDIILTDDNFTSIVKAVMWGRNVYDSISKFLQFQLTVNVVAVIVAFTGACITQDSPLKAVQMLWVNLIMDTFASLALATEPPTESLLLRKPYGRDKPLISRTMMKNILGHAVYQLAIIFTLLFVGELFFDIDSGRNAPLHSPPSEHYTIIFNTFVMMQLFNEINARKIHGERNVFDGIFSNPIFCTIVLGTFGIQIVIVQFGGKPFSCSPLSTEQWLWCLFVGVGELVWGQVIATIPTSQLKCLKEAGHGPGKDEMTDEELAEGEEEIDHAERELRRGQILWFRGLNRIQTQPGLCPPLPRNGARLG

SEQ ID NO: 53 - protein, 1129 aa, Artificial Sequence; identical to SEQ ID NO: 52
  Synthetic polypeptide

SEQ ID NO: 54 - protein, 1129 aa, Artificial Sequence; identical to SEQ ID NO: 52
  Synthetic polypeptide

SEQ ID NO: 55 - protein, 1125 aa, Artificial Sequence
  Synthetic polypeptide
MERSPGEGPSPSPMDQPSAPSDPTDQPPAAHAKPDPGSGGQPAGPGAAGEALAVLTSFGRRLLVLIPVYLAGAVGLSVGFVLFGLALYLGWRRVRDEKERSLRAARQLLDDEEQLTAKTLYMSHRELPAWVSFPDVEKAEWLNKIVAQVWPFLGQYMEKLLAETVAPAVRGSNPHLQTFTFTRVELGEKPLRIIGVKVHPGQRKEQILLDLNISYVGDVQIDVEVKKYFCKAGVKGMQLHGVLRVILEPLIGDLPFVGAVSMFFIRRPTLDINWTGMTNLLDIPGLSSLSDTMIMDSIAAFLVLPNRLLVPLVPDLQDVAQLRSPLPRGIIRIHLLAARGLSSKDKYVKGLIEGKSDPYALVRLGTQTFCSRVIDEELNPQWGETYEVMVHEVPGQEIEVEVFDKDPDKDDFLGRMKLDVGKVLQASVLDDWFPLQGGQGQVHLRLEWLSLLSDAEKLEQVLQWNWGVSSRPDPPSAAILVVYLDRAQDLPMVTSELYPPQLKKGNKEPNPMVQLSIQDVTQESKAVYSTNCPVWEEAFRFFLQDPQSQELDVQVKDDSRALTLGALTLPLARLLTAPELILDQWFQLSSSGPNSRLYMKLVMRILYLDSSEICFPTVPGCPGAWDVDSENPQRGSSVDAPPRPCHTTPDSQFGTEHVLRIHVLEAQDLIAKDRFLGGLVKGKSDPYVKLKLAGRSFRSHVVREDLNPRWNEVFEVIVTSVPGQELEVEVFDKDLDKDDFLGRCKVRLTTVLNSGFLDEWLTLEDVPSGRLHLRLERLTPRPTAAELEEVLQVNSLIQTQKSAELAAALLSIYMERAEDLPLRKGTKHLSPYATLTVGDSSHKTKTISQTSAPVWDESASFLIRKPHTESLELQVRGEGTGVLGSLSLPLSELLVADQLCLDRWFTLSSGQGQVLLRAQLGILVSQHSGVEAHSHSYSHSSSSLSEEPELSGGPPHITSSAPELRQRLTHVDSPLEAPAGPLGQVKLTLWYYSEERKLVSIVHGCRSLRQNGRDPPDPYVSLLLLPDKNRGTKRRTSQKKRTLSPEFNERFEWELPLDEAQRRKLDVSVKSNSSFMSRERELLGKVQLDLAETDLSQGVARWVDFNCPRGSFPVVSPGVRTYSRG

SEQ ID NO: 56 - protein, 1125 aa, Artificial Sequence; identical to SEQ ID NO: 55
  Synthetic polypeptide

SEQ ID NO: 57 - protein, 1115 aa, Artificial Sequence
  Synthetic polypeptide
MERSPGEGPSPSPMDQPSAPSDPTDQPPAAHAKPDPGSGGQPAGPGAAGEALAVLTSFGRRLLVLIPVYLAGAVGLSVGFVLFGLALYLGWRRVRDEKERSLRAARQLLDDEEQLTAKTLYMSHRELPAWVSFPDVEKAEWLNKIVAQVWPFLGQYMEKLLAETVAPAVRGSNPHLQTFTFTRVELGEKPLRIIGVKVHPGQRKEQILLDLNISYVGDVQIDVEVKKYFCKAGVKGMQLHGVLRVILEPLIGDLPFVGAVSMFFIRRPTLDINWTGMTNLLDIPGLSSLSDTMIMDSIAAFLVLPNRLLVPLVPDLQDVAQLRSPLPRGIIRIHLLAARGLSSKDKYVKGLIEGKSDPYALVRLGTQTFCSRVIDEELNPQWGETYEVMVHEVPGQEIEVEVFDKDPDKDDFLGRMKLDVGKVLQASVLDDWFPLQGGQGQVHLRLEWLSLLSDAEKLEQVLQWNWGVSSRPDPPSAAILVVYLDRAQDLPLKKGNKEPNPMVQLSIQDVTQESKAVYSTNCPVWEEAFRFFLQDPQSQELDVQVKDDSRALTLGALTLPLARLLTAPELILDQWFQLSSSGPNSRLYMKLVMRILYLDSSEICFPTVPGCPGAWDVDSENPQRGSSVDAPPRPCHTTPDSQFGTEHVLRIHVLEAQDLIAKDRFLGGLVKGKSDPYVKLKLAGRSFRSHVVREDLNPRWNEVFEVIVTSVPGQELEVEVFDKDLDKDDFLGRCKVRLTTVLNSGFLDEWLTLEDVPSGRLHLRLERLTPRPTAAELEEVLQVNSLIQTQKSAELAAALLSIYMERAEDLPLRKGTKHLSPYATLTVGDSSHKTKTISQTSAPVWDESASFLIRKPHTESLELQVRGEGTGVLGSLSLPLSELLVADQLCLDRWFTLSSGQGQVLLRAQLGILVSQHSGVEAHSHSYSHSSSSLSEEPELSGGPPHITSSAPELRQRLTHVDSPLEAPAGPLGQVKLTLWYYSEERKLVSIVHGCRSLRQNGRDPPDPYVSLLLLPDKNRGTKRRTSQKKRTLSPEFNERFEWELPLDEAQRRKLDVSVKSNSSFMSRERELLGKVQLDLAETDLSQGVARWVDFNCPRGSFPVVSPGVRTYSRG

SEQ ID NO: 58 - protein, 1115 aa, Artificial Sequence
  Synthetic polypeptide
MGDMANSSIEFHPKPQQQRDVPQAGGFGCTLAELRTLMELRGAEALQKIEEAYGDVSGLCRRLKTSPTEGLADNTNDLEKRRQIYGQNFIPPKQPKTFLQLVWEALQDVTLIILEVAAIVSLGLSFYAPPGEESEACGNVSGGAEDEGEAEAGWIEGAAILLSVICVVLVTAFNDWSKEKQFRGLQSRIEQEQKFTVIRNGQLLQVPVAALVVGDIAQVKYGDLLPADGVLIQANDLKIDESSLTGESDHVRKSADKDPMLLSGTHVMEGSGRMVVTAVGVNSQTGIIFTLLGAGGEEEEKKDKKAKKQDGAVAMEMQPLKSAEGGEMEEREKKKANAPKKEKSVLQGKLTKLAVQIGKAGLVMSAITVIILVLYFVIETFVVEGRTWLAECTPVYVQYFVKFFIIGVTVLVVAVPEGLPLAVTISLAYSVKKMMKDNNLVRHLDACETMGNATAICSDKTGTLTTNRMTVVQSYLGDTHYKEIPAPSALTPKILDLLVHAISINSAYTTKILPPEKEGALPRQVGNKTECALLGFVLDLKRDFQPVREQIPEDKLYKVYTFNSVRKSMSTVIRMPDGGFRLFSKGASEILLKKCTNILNSNGELRGFRPRDRDDMVRKIIEPMACDGLRTICIAYRDFSAGQEPDWDNENEVVGDLTCIAVVGIEDPVRPEVPEAIRKCQRAGITVRMVTGDNINTARAIAAKCGIIQPGEDFLCLEGKEFNRRIRNEKGEIEQERLDKVWPKLRVLARSSPTDKHTLVKGIIDSTTGEQRQVVAVTGDGTNDGPALKKADVGFAMGIAGTDVAKEASDIILTDDNFTSIVKAVMWGRNVYDSISKFLQFQLTVNVVAVIVAFTGACITQDSPLKAVQMLWVNLIMDTFASLALATEPPTESLLLRKPYGRDKPLISRTMMKNILGHAVYQLAIIFTLLFVGELFFDIDSGRNAPLHSPPSEHYTIIFNTFVMMQLFNEINARKIHGERNVFDGIFSNPIFCTIVLGTFGIQIVIVQFGGKPFSCSPLSTEQWLWCLFVGVGELVWGQVIATIPTSQLKCLKEAGHGPGKDEMTDEELAEGEEEIDHAERELRRGQILWFRGLNRIQTQPGLCPPLPRNGARLG

SEQ ID NO: 59 - protein, 1115 aa, Artificial Sequence; identical to SEQ ID NO: 58
  Synthetic polypeptide

SEQ ID NO: 60 - protein, 1115 aa, Artificial Sequence; identical to SEQ ID NO: 58
  Synthetic polypeptide

SEQ ID NO: 61 - protein, 1108 aa, Artificial Sequence
  Synthetic polypeptide
MAGLRRPQPGCYCRTAAAVNLLLGVFQVLLPCCRPGGAQGQAIEPLPNVVELWQAEEGELLLPTQGDSEEGLEEPSQEQSFSDKLFSGKGLHFQPSVLDFGIQFLGHPVAKILHAYNPSRDSEVVVNSVFAAAGHFHVPPVPCRVIPAMGKTSFRIIFLPTEEGSIESSLFINTSSYGVLSYHVSGIGTRRISTEGSAKQLPNAYFLLPKVQSIQLSQMQAETTNTSLLQVQLECSLHNKVCQQLKGCYLESDDVLRLQMSIMVTMENFSKEFEENTQHLLDHLSIVYVATDESETSDDSAVNMYILHSGNSLIWIQDIRHFSQRDALSLQFEPVLLPTSTTNFTKIASFTCKAATSCDSGIIEDVKKTTHTPTLKACLFSSVAQGYFRMDSSATQFHIETHENTSGLWSIWYRNHFDRSVVLNDVFLSKETKHMLKILNFTGPLFLPPGCWNIFSLKLAVKDIAINLFTNVFLTTNIGAIFAIPLQIYSAPTKEGSLGFEVIAHCGMHYFMGKSKAGNPNWNGSLSLDQSTWNVDSELANKLYERWKKYKNGDVCKFGTDMQMINFTTGEFQLTEACPYLGTHSEESRFGILHLHLQPLEMKRVGVVFTPADYGKVTSLILIRNNLTVIDMIGVEGFGARELLKVGGRLPGAGGSLRFKVPESTLMDCRRQLKDSKQILSITKNFKVENIGPLPITVSSLKINGYNCQGYGFEVLDCHQFSLDPNTSRDISIVFTPDFTSSWVIRDLSLVTAADLEFRFTLNVTLPHHLLPLCADVVPGPSWEESFWRLTVFFVSLSLLGVILIAFQQAQYILMEFMKTRQRQNASSSSQQNNGPMDVISPHSYKSNCKNFLDTYGPSDKGRGKNCLPVNTPQSRIQNAAKRSPATYGHSQKKHKCSVYYSKHKTSTAAASSTSTTTEEKQTSPLGSSLPAAKEDICTDAMRENWISLRYASGINVNLQKNLTLPKNLLNKEENTLKNTIVFSNPSSECSMKEGIQTCMFPKETDIKTSENTAEFKERELCPLKTSKKLPENHLPRNSPQYHQPDLPEISRKNNGNNQQVPVKNEVDHCENLKKVDTKPSSEKKIHKTSREDMFSEKQDIPFVENED

SEQ ID NO: 62 - protein, 1101 aa, Artificial Sequence
  Synthetic polypeptide
MQRSPLEKASVVSKLFFSWTRPILRKGYRQRLELSDIYQIPSVDSADNLSEKLEREWDRELASKKNPKLINALRRCFFWRFMFYGIFLYLGEVTKAVQPLLLGRIIASYDPDNKEERSIAIYLGIGLCLLFIVRTLLLHPAIFGLHHIGMQMRIAMFSLIYKKTLKLSSRVLDKISIGQLVSLLSNNLNKFDEGLALAHFVWIAPLQVALLMGLIWELLQASAFCGLGFLIVLALFQAGLGRMMMKYRDQRAGKISERLVITSEMIENIQSVKAYCWEEAMEKMIENLRQTELKLTRKAAYVRYFNSSAFFFSGFFVVFLSVLPYALIKGIILRKIFTTISFCIVLRMAVTRQFPWAVQTWYDSLGAINKIQDFLQKQEYKTLEYNLTTTEVVMENVTAFWEETSLLMVIMGELEPSEGKIKHSGRISFCSQFSWIMPGTIKENIIFGVSYDEYRYRSVIKACQLEEDISKFAEKDNIVLGEGGITLSGGQRARISLARAVYKDADLYLLDSPFGYLDVLTEKEIFESCVCKLMANKTRILVTSKMEHLKKADKILILHEGSSYFYGTFSELQNLQPDFSSKLMGCDSFDQFSAERRNSILTETLHRFSLEGDAPVSWTETKKQSFKQTGEFGEKRKNSILNPINSIRKFSIVQKTPLQMNGIEEDSDEPLERRLSLVPDSEQGEAILPRISVISTGPTLQARRRQSVLNLMTHSVNQGQNIHRKTTASTRKVSLAPQANLTELDIYSRRLSQETGLEISEEINEEDLKECFFDDMESIPAVTTWNTYLRYITVHKSLIFVLIWCLVIFLAEVAASLVVLWLLGNTPLQDKGNSTHSRNNSYAVIITSTSSYYVFYIYVGVADTLLAMGFFRGLPLVHTLITVSKILHHKMLHSVLQAPMSTLNTLKAGGILNRFSKDIAILDDLLPLTIFDFIQLLLIVIGAIAVVAVLQPYIFVATVPVIVAFIMLRAYFLQTSQQLKQLESEGRSPIFTHLVTSLKGLWTLRAFGRQPYFETLFHKALNLHTANWFLYLSTLRWFQMRIEMIFVIFFIAVTFISILTTGEGEGRVGIILTLAMNIMSTLQWAVNSSIDVDSLKPYLDE

SEQ ID NO: 63 - protein, 1088 aa, Artificial Sequence
  Synthetic polypeptide
MVVPEKEQSWIPKIFKKKTCTTFIVDSTDPGGTLCQCGRPRTAHPAVAMEDAFGAAVVTVWDSDAHTTEKPTDAYGELDFTGAGRKHSNFLRLSDRTDPAAVYSLVTRTWGFRAPNLVVSVLGGSGGPVLQTWLQDLLRRGLVRAAQSTGAWIVTGGLHTGIGRHVGVAVRDHQMASTGGTKVVAMGVAPWGVVRNRDTLINPKGSFPARYRWRGDPEDGVQFPLDYNYSAFFLVDDGTHGCLGGENRFRLRLESYISQQKTGVGGTGIDIPVLLLLIDGDEKMLTRIENATQAQLPCLLVAGSGGAADCLAETLEDTLAPGSGGARQGEARDRIRRFFPKGDLEVLQAQVERIMTRKELLTVYSSEDGSEEFETIVLKALVKACGSSEASAYLDELRLAVAWNRVDIAQSELFRGDIQWRSFHLEASLMDALLNDRPEFVRLLISHGLSLGHFLTPMRLAQLYSAAPSNSLIRNLLDQASHSAGTKAPALKGGAAELRPPDVGHVLRMLLGKMCAPRYPSGGAWDPHPGQGFGESMYLLSDKATSPLSLDAGLGQAPWSDLLLWALLLNRAQMAMYFWEMGSNAVSSALGACLLLRVMARLEPDAEEAARRKDLAFKFEGMGVDLFGECYRSSEVRAARLLLRRCPLWGDATCLQLAMQADARAFFAQDGVQSLLTQKWWGDMASTTPIWALVLAFFCPPLIYTRLITFRKSEEEPTREELEFDMDSVINGEGPVGLTPGLYHLGRTVLCIDFMVFTVRLLHIFTVNKQLGPKIVIVSKMMKDVFFFLFFLGVWLVAYGVATEGLLRPRDSDFPSILRRVFYRPYLQIFGQIPQEDMDVALMEHSNCSSEPGFWAHPPGAQAGTCVSQYANWLVVLLLVIFLLVANILLVNLLIAMFSYTFGKVQGNSDLYWKAQRYRLIREFHSRPALAPPFIVISHLRLLLRQLCRRPRSPQPSSPALEHFRVYLSKEAERKLLTWESVHKENFLLARARDKRESDSERLKRTSQKVDLALKQLGHIREYEQRLKVLEREVQQCSRVLGWVAEALSRSALLPPGGPPPPDLPGSKGPRDGAVSSLIALTLPRICK

SEQ ID NO: 64 - protein, 1066 aa, Artificial Sequence
  Synthetic polypeptide
MGSGGSDSYRIATSQDKKDDKDSPKKNKGKERRDLDDLKKEVAMTEHKMSVEEVCRKYNTDCVQGLTHSKAQEILARDGPNALTPPPTTPEWVKFCRQLFGGFSILLWIGAILCFLAYGIQAGTEDDPSGDNLYLGIVLAAVVIITGCFSYYQEAKSSKIMESFKNMVPQQALVIREGEKMQVNAEEVVVGDLVEIKGGDRVPADLRIISAHGCKVDNSSLTGESEPQTRSPDCTHDNPLETRNITFFSTNCVEGTARGVVVATGDRTVMGRIATLASGLEVGKTPIAIEIEHFIQLITGVAVFLGVSFFILSLILGYTWLEAVIFLIGIIVANVPEGLLATVTVCLTLTAKRMARKNCLVKNLEAVETLGSTSTICSDKTGTLTQNRMTVAHMWFDNQIHEADTTEDQSGTSFDKSSHTWVALSHIAGLCNRAVFKGGQDNIPVLKRDVAGDASESALLKCIELSSGSVKLMRERNKKVAEIPFNSTNKYQLSIHETEDPNDNRYLLVMKGAPERILDRCSTILLQGKEQPLDEEMKEAFQNAYLELGGLGERVLGFCHYYLPEEQFPKGFAFDCDDVNFTTDNLCFVGLMSMIDPPRAAVPDAVGKCRSAGIKVIMVTGDHPITAKAIAKGVGIISEGNETVEDIAARLNIPVSQVNPRDAKACVIHGTDLKDFTSEQIDEILQNHTEIVFARTSPQQKLIIVEGCQRQGAIVAVTGDGVNDSPALKKADIGVAMGIAGSDVSKQAADMILLDDNFASIVTGVEEGRLIFDNLKKSIAYTLTSNIPEITPFLLFIMANIPLPLGTITILCIDLGTDMVPAISLAYEAAESDIMKRQPRNPRTDKLVNERLISMAYGQIGMIQALGGFFSYFVILAENGFLPGNLVGIRLNWDDRTVNDLEDSYGQQWTYEQRKVVEFTCHTAFFVSIVVVQWADLIICKTRRNSVFQQGMKNKILIFGLFEETALAAFLSYCPGMDVALRMYPLKPSWWFCAFPYSFLIFVYDEIRKLILRRNPGGQARWLPPVIPALWEAQAGGSLEVRSTRPAWPTWRNPISTKNTKKKKKK

SEQ ID NO: 65 - protein, 1064 aa, Artificial Sequence
  Synthetic polypeptide
MGGWEEERNRRATDKKDDKDSPKKNKGKERRDLDDLKKEVAMTEHKMSVEEVCRKYNTDCVQGLTHSKAQEILARDGPNALTPPPTTPEWVKFCRQLFGGFSILLWIGAILCFLAYGIQAGTEDDPSGDNLYLGIVLAAVVIITGCFSYYQEAKSSKIMESFKNMVPQQALVIREGEKMQVNAEEVVVGDLVEIKGGDRVPADLRIISAHGCKVDNSSLTGESEPQTRSPDCTHDNPLETRNITFFSTNCVEGTARGVVVATGDRTVMGRIATLASGLEVGKTPIAIEIEHFIQLITGVAVFLGVSFFILSLILGYTWLEAVIFLIGIIVANVPEGLLATVTVCLTLTAKRMARKNCLVKNLEAVETLGSTSTICSDKTGTLTQNRMTVAHMWFDNQIHEADTTEDQSGTSFDKSSHTWVALSHIAGLCNRAVFKGGQDNIPVLKRDVAGDASESALLKCIELSSGSVKLMRERNKKVAEIPFNSTNKYQLSIHETEDPNDNRYLLVMKGAPERILDRCSTILLQGKEQPLDEEMKEAFQNAYLELGGLGERVLGFCHYYLPEEQFPKGFAFDCDDVNFTTDNLCFVGLMSMIDPPRAAVPDAVGKCRSAGIKVIMVTGDHPITAKAIAKGVGIISEGNETVEDIAARLNIPVSQVNPRDAKACVIHGTDLKDFTSEQIDEILQNHTEIVFARTSPQQKLIIVEGCQRQGAIVAVTGDGVNDSPALKKADIGVAMGIAGSDVSKQAADMILLDDNFASIVTGVEEGRLIFDNLKKSIAYTLTSNIPEITPFLLFIMANIPLPLGTITILCIDLGTDMVPAISLAYEAAESDIMKRQPRNPRTDKLVNERLISMAYGQIGMIQALGGFFSYFVILAENGFLPGNLVGIRLNWDDRTVNDLEDSYGQQWTYEQRKVVEFTCHTAFFVSIVVVQWADLIICKTRRNSVFQQGMKNKILIFGLFEETALAAFLSYCPGMDVALRMYPLKPSWWFCAFPYSFLIFVYDEIRKLILRRNPGGQARWLPPVIPALWEAQAGGSLEVRSTRPAWPTWRNPISTKNTKKKKKK

SEQ ID NO: 66 - protein, 1057 aa, Artificial Sequence
  Synthetic polypeptide
MSLRAGGKTRRWPGPEQAARGGRSGGEQSPRRGEARRRCTHAHGAMGRHVATSCHVAWLLVLISGCWGQVNRLPFFTNHFFDTYLLISEDTPVGSSVTQLLAQDMDNDPLVFGVSGEEASRFFAVEPDTGVVWLRQPLDRETKSEFTVEFSVSDHQGVITRKVNIQVGDVNDNAPTFHNQPYSVRIPENTPVGTPIFIVNATDPDLGAGGSVLYSFQPPSQFFAIDSARGIVTVIRELDYETTQAYQLTVNATDQDKTRPLSTLANLAIIITDVQDMDPIFINLPYSTNIYEHSPPGTTVRIITAIDQDKGRPRGIGYTIVSGNTNSIFALDYISGVLTLNGLLDRENPLYSHGFILTVKGTELNDDRTPSDATVTTTFNILVIDINDNAPEFNSSEYSVAITELAQVGFALPLFIQVVDKDENLGLNSMFEVYLVGNNSHHFIISPTSVQGKADIRIRVAIPLDYETVDRYDFDLFANESVPDHVGYAKVKITLINENDNRPIFSQPLYNISLYENVTVGTSVLTVLATDNDAGTFGEVSYFFSDDPDRFSLDKDTGLIMLIARLDYELIQRFTLTIIARDGGGEETTGRVRINVLDVNDNVPTFQKDAYVGALRENEPSVTQLVRLRATDEDSPPNNQITYSIVSASAFGSYFDISLYEGYGVISVSRPLDYEQISNGLIYLTVMAMDAGNPPLNSTVPVTIEVFDENDNPPTFSKPAYFVSVVENIMAGATVLFLNATDLDRSREYGQESIIYSLEGSTQFRINARSGEITTTSLLDRETKSEYILIVRAVDGGVGHNQKTGIATVNITLLDINDNHPTWKDAPYYINLVEMTPPDSDVTTVVAVDPDLGENGTLVYSIQPPNKFYSLNSTTGKIRTTHAMLDRENPDPHEAELMRKIVVSVTDCGRPPLKATSSATVFVNLLDLNDNDPTFQNLPFVAEVLEGIPAGVSIYQVVAIDLDEGLNGLVSYRMPVGMPRMDFLINSSSGVVVTTTELDRERIAEYQLRVVASDAGTPTKSSTSTLTIHGCSEGCMWSCMGSTQHGLGTLDKLVNGH

SEQ ID NO: 67 - protein, 1057 aa, Artificial Sequence
  Synthetic polypeptide
MIVLLLFALLWMVEGVFSQLHYTVQEEQEHGTFVGNIAEDLGLDITKLSARGFQTVPNSRTPYLDLNLETGVLYVNEKIDREQICKQSPSCVLHLEVFLENPLELFQVEIEVLDINDNPPSFPEPDLTVEISESATPGTRFPLESAFDPDVGTNSLRDYEITPNSYFSLDVQTQGDGNRFAELVLEKPLDREQQAVHRYVLTAVDGGGGGGVGEGGGGGGGAGLPPQQQRTGTALLTIRVLDSNDNVPAFDQPVYTVSLPENSPPGTLVIQLNATDPDEGQNGEVVYSFSSHISPRARELFGLSPRTGRLEVSGELDYEESPVYQVYVQAKDLGPNAVPAHCKVLVRVLDANDNAPEISFSTVKEAVSEGAAPGTVVALFSVTDRDSEENGQVQCELLGDVPFRLKSSFKNYYTIVTEAPLDREAGDSYTLTVVARDRGEPALSTSKSIQVQVSDVNDNAPRFSQPVYDVYVTENNVPGAYIYAVSATDRDEGANAQLAYSILECQIQGMSVFTYVSINSENGYLYALRSFDYEQLKDFSFQVEARDAGSPQALAGNATVNILIVDQNDNAPAIVAPLPGRNGTPAREVLPRSAEPGYLLTRVAAVDADDGENARLTYSIVRGNEMNLFRMDWRTGELRTARRVPAKRDPQRPYELVIEVRDHGQPPLSSTATLVVQLVDGAVEPQGGGGSGGGGSGEHQRPSRSGGGETSLDLTLILIIALGSVSFIFLLAMIVLAVRCQKEKKLNIYTCLASDCCLCCCCCGGGGSTCCGRQARARKKKLSKSDIMLVQSSNVPSNPAQVPIEESGGFGSHHHNQNYCYQVCLTPESAKTDLMFLKPCSPSRSTDTEHNPCGAIVTGYTDQQPDIISNGSILSNETKHQRAELSYLVDRPRRVNSSAFQEADIVSSKDSGHGDSEQGDSDHDATNRAQSAGMDLFSNCTEECKALGHSDRCWMPSFVPSDGRQAADYRSNLHVPGMDSVPDTEVFETPEAQPGAERSFSTFGKEKALHSTLERKELDGLLTNTRAPYKPPYLKLLWRQLCGETHVAQDQGLSTTT

SEQ ID NO: 68 - protein, 1053 aa, Artificial Sequence
  Synthetic polypeptide
MGDKKDDKDSPKKNKGKERRDLDDLKKEVAMTEHKMSVEEVCRKYNTDCVQGLTHSKAQEILARDGPNALTPPPTTPEWVKFCRQLFGGFSILLWIGAILCFLAYGIQAGTEDDPSGDNLYLGIVLAAVVIITGCFSYYQEAKSSKIMESFKNMVPQQALVIREGEKMQVNAEEVVVGDLVEIKGGDRVPADLRIISAHGCKVDNSSLTGESEPQTRSPDCTHDNPLETRNITFFSTNCVEGTARGVVVATGDRTVMGRIATLASGLEVGKTPIAIEIEHFIQLITGVAVFLGVSFFILSLILGYTWLEAVIFLIGIIVANVPEGLLATVTVCLTLTAKRMARKNCLVKNLEAVETLGSTSTICSDKTGTLTQNRMTVAHMWFDNQIHEADTTEDQSGTSFDKSSHTWVALSHIAGLCNRAVFKGGQDNIPVLKRDVAGDASESALLKCIELSSGSVKLMRERNKKVAEIPFNSTNKYQLSIHETEDPNDNRYLLVMKGAPERILDRCSTILLQGKEQPLDEEMKEAFQNAYLELGGLGERVLGFCHYYLPEEQFPKGFAFDCDDVNFTTDNLCFVGLMSMIDPPRAAVPDAVGKCRSAGIKVIMVTGDHPITAKAIAKGVGIISEGNETVEDIAARLNIPVSQVNPRDAKACVIHGTDLKDFTSEQIDEILQNHTEIVFARTSPQQKLIIVEGCQRQGAIVAVTGDGVNDSPALKKADIGVAMGIAGSDVSKQAADMILLDDNFASIVTGVEEGRLIFDNLKKSIAYTLTSNIPEITPFLLFIMANIPLPLGTITILCIDLGTDMVPAISLAYEAAESDIMKRQPRNPRTDKLVNERLISMAYGQIGMIQALGGFFSYFVILAENGFLPGNLVGIRLNWDDRTVNDLEDSYGQQWTYEQRKVVEFTCHTAFFVSIVVVQWADLIICKTRRNSVFQQGMKNKILIFGLFEETALAAFLSYCPGMDVALRMYPLKPSWWFCAFPYSFLIFVYDEIRKLILRRNPGGQARWLPPVIPALWEAQAGGSLEVRSTRPAWPTWRNPISTKNTKKKKKK

SEQ ID NO: 69 - protein, 1053 aa, Artificial Sequence; identical to SEQ ID NO: 68
  Synthetic polypeptide

SEQ ID NO: 70 - protein, 1052 aa, Artificial Sequence
  Synthetic polypeptide
MTGAGEPRREEPPPQPSAGLRSRESGAPSAGGWERAERGRGAAARPATGPPPRRIGPLYGMWLVTFLLLLDSLHKARPEDVGTSLYFVNDSLQQVTFSSSVGVVVPCPAAGSPSAALRWYLATGDDIYDVPHIRHVHANGTLQLYPFSPSAFNSFIHDNDYFCTAENAAGKIRSPNIRVKAVFREPYTVRVEDQRSMRGNVAVFKCLIPSSVQEYVSVVSWEKDTVSIIPEHRFFITYHGGLYISDVQKEDALSTYRCITKHKYSGETRQSNGARLSVTDPAESIPTILDGFHSQEVWAGHTVELPCTASGYPIPAIRWLKDGRPLPADSRWTKRITGLTISDLRTEDSGTYICEVTNTFGSAEATGILMVIDPLHVTLTPKKLKTGIGSTVILSCALTGSPEFTIRWYRNTELVLPDEAISIRGLSNETLLITSAQKSHSGAYQCFATRKAQTAQDFAIIALEDGTPRIVSSFSEKVVNPGEQFSLMCAAKGAPPPTVTWALDDEPIVRDGSHRTNQYTMSDGTTISHMNVTGPQIRDGGVYRCTARNLVGSAEYQARINVRGPPSIRAMRNITAVAGRDTLINCRVIGYPYYSIKWYKDALLLPDNHRQVVFENGTLKLTDVQKGMDEGEYLCSVLIQPQLSISQSVHVAVKVPPLIQPFEFPPASIGQLLYIPCVVSSGDMPIRITWRKDGQVIISGSGVTIESKEFMSSLQISSVSLKHNGNYTCIASNAAATVSRERQLIVRVPPRFVVQPNNQDGIYGKAGVLNCSVDGYPPPKVMWKHAKGSGNPQQYHPVPLTGRIQILPNSSLLIRHVLEEDIGYYLCQASNGVGTDISKSMFLTVKIPAMITSHPNTTIAIKGHAKELNCTARGERPIIIRWEKGDTVIDPDRVMRYAIATKDNGDEVVSTLKLKPADRGDSVFFSCHAINSYGEDRGLIQLTVQEPPDPPELEIREVKARSMNLRWTQRFDGNSIITGFDIEYKNKSDSWDFKQSTRNISPTINQANIVDLHPASVYSIRMYSFNKIGRSEPSKELTISTEEAAGRGGACL

SEQ ID NO: 71 - protein, 1051 aa, Artificial Sequence
  Synthetic polypeptide
MLFRARGPVRGRGWGRPAEAPRRGRSPPWSPAWICCWALAGCQAAWAGDLPSSSSRPLPPCQEKDYHFEYTECDSSGSRWRVAIPNSAVDCSGLPDPVRGKECTFSCASGEYLEMKNQVCSKCGEGTYSLGSGIKFDEWDELPAGFSNIATFMDTVVGPSDSRPDGCNNSSWIPRGNYIESNRDDCTVSLIYAVHLKKSGYVFFEYQYVDNNIFFEFFIQNDQCQEMDTTTDKWVKLTDNGEWGSHSVMLKSGTNILYWRTTGILMGSKAVKPVLVKNITIEGVAYTSECFPCKPGTFSNKPGSFNCQVCPRNTYSEKGAKECIRCKDDSQFSEEGSSECTERPPCTTKDYFQIHTPCDEEGKTQIMYKWIEPKICREDLTDAIRLPPSGEKKDCPPCNPGFYNNGSSSCHPCPPGTFSDGTKECRPCPAGTEPALGFEYKWWNVLPGNMKTSCFNVGNSKCDGMNGWEVAGDHIQSGAGGSDNDYLILNLHIPGFKPPTSMTGATGSELGRITFVFETLCSADCVLYFMVDINRKSTNVVESWGGTKEKQAYTHIIFKNATFTFTWAFQRTNQGQDNRRFINDMVKIYSITATNAVDGVASSCRACALGSEQSGSSCVPCPPGHYIEKETNQCKECPPDTYLSIHQVYGKEACIPCGPGSKNNQDHSVCYSDCFFYHEKENQSLHYDFSNLSSVGSLMNGPSFTSKGTKYFHFFNISLCGHEGKKMALCTNNITDFTVKEIVAGSDDYTNLVGAFVCQSTIIPSESKGFRAALSSQSIILADTFIGVTVETTLKNINIKEDMFPVPTSQIPDVHFFYKSSTATTSCINGRSTAVKMRCNPTKSGAGVISVPSKCPAGTCDGCTFYFLWESAEACPLCTEHDFHEIEGACKRGFQETLYVWNEPKWCIKGISLPEKKLATCETVDFWLKVGAGVGAFTAVLLVALTCYFWKKNQKLEYKYSKLVMTTNSKECELPAADSCAIMEGEDNEEEVVYSNKQSLLGKLKSLATKKLPQSPQSSATTTLISQQPSTLRQDRQSAKRVWLAKGWDDC

SEQ ID NO: 72 - protein, 1029 aa, Artificial Sequence
  Synthetic polypeptide
MAPPTGVLSSLLLLVTIAGCARKQCSEGRTYSNAVISPNLETTRIMRVSHTFPVVDCTAACCDLSSCDLAWWFEGRCYLVSCPHKENCEPKKMGPIRSYLTFVLRPVQRPAQLLDYGDMMLNRGSPSGIWGDSPEDIRKDLTFLGKDWGLEEMSEYSDDYRELEKDLLQPSGKQEPRGSAEYTDWGLLPGSEGAFNSSVGDSPAVPAETQQDPELHYLNESASTPAPKLPERSVLLPLPTTPSSGEVLEKEKASQLQEQSSNSSGKEVLMPSHSLPPASLELSSVTVEKSPVLTVTPGSTEHSIPTPPTSAAPSESTPSELPISPTTAPRTVKELTVSAGDNLIITLPDNEVELKAFVAPAPPVETTYNYEWNLISHPTDYQGEIKQGHKQTLNLSQLSVGLYVFKVTVSSENAFGEGFVNVTVKPARRVNLPPVAVVSPQLQELTLPLTSALIDGSQSTDDTEIVSYHWEEINGPFIEEKTSVDSPVLRLSNLDPGNYSFRLTVTDSDGATNSTTAALIVNNAVDYPPVANAGPNHTITLPQNSITLNGNQSSDDHQIVLYEWSLGPGSEGKHVVMQGVQTPYLHLSAMQEGDYTFQLKVTDSSRQQSTAVVTVIVQPENNRPPVAVAGPDKELIFPVESATLDGSSSSDDHGIVFYHWEHVRGPSAVEMENIDKAIATVTGLQVGTYHFRLTVKDQQGLSSTSTLTVAVKKENNSPPRARAGGRHVLVLPNNSITLDGSRSTDDQRIVSYLWIRDGQSPAAGDVIDGSDHSVALQLTNLVEGVYTFHLRVTDSQGASDTDTATVEVQPDPRKSGLVELTLQVGVGQLTEQRKDTLVRQLAVLLNVLDSDIKVQKIRAHSDLSTVIVFYVQSRPPFKVLKAAEVARNLHMRLSKEKADFLLFKVLRVDTAGCLLKCSGHGHCDPLTKRCICSHLWMENLIQRYIWDGESNCEWSIFYVTVLAFTLIVLTGGFTWLCICCCKRQKRTKIRKKTKYTILDNMDEQERMELRPKYETGDSQESLAKPHLQA

SEQ ID NO: 73 - protein, 1029 aa, Artificial Sequence; identical to SEQ ID NO: 72
  Synthetic polypeptide

SEQ ID NO: 74 - protein, 1023 aa, Artificial Sequence
  Synthetic polypeptide
MTEHKMSVEEVCRKYNTDCVQGLTHSKAQEILARDGPNALTPPPTTPEWVKFCRQLFGGFSILLWIGAILCFLAYGIQAGTEDDPSGDNLYLGIVLAAVVIITGCFSYYQEAKSSKIMESFKNMVPQQALVIREGEKMQVNAEEVVVGDLVEIKGGDRVPADLRIISAHGCKVDNSSLTGESEPQTRSPDCTHDNPLETRNITFFSTNCVEGTARGVVVATGDRTVMGRIATLASGLEVGKTPIAIEIEHFIQLITGVAVFLGVSFFILSLILGYTWLEAVIFLIGIIVANVPEGLLATVTVCLTLTAKRMARKNCLVKNLEAVETLGSTSTICSDKTGTLTQNRMTVAHMWFDNQIHEADTTEDQSGTSFDKSSHTWVALSHIAGLCNRAVFKGGQDNIPVLKRDVAGDASESALLKCIELSSGSVKLMRERNKKVAEIPFNSTNKYQLSIHETEDPNDNRYLLVMKGAPERILDRCSTILLQGKEQPLDEEMKEAFQNAYLELGGLGERVLGFCHYYLPEEQFPKGFAFDCDDVNFTTDNLCFVGLMSMIDPPRAAVPDAVGKCRSAGIKVIMVTGDHPITAKAIAKGVGIISEGNETVEDIAARLNIPVSQVNPRDAKACVIHGTDLKDFTSEQIDEILQNHTEIVFARTSPQQKLIIVEGCQRQGAIVAVTGDGVNDSPALKKADIGVAMGIAGSDVSKQAADMILLDDNFASIVTGVEEGRLIFDNLKKSIAYTLTSNIPEITPFLLFIMANIPLPLGTITILCIDLGTDMVPAISLAYEAAESDIMKRQPRNPRTDKLVNERLISMAYGQIGMIQALGGFFSYFVILAENGFLPGNLVGIRLNWDDRTVNDLEDSYGQQWTYEQRKVVEFTCHTAFFVSIVVVQWADLIICKTRRNSVFQQGMKNKILIFGLFEETALAAFLSYCPGMDVALRMYPLKPSWWFCAFPYSFLIFVYDEIRKLILRRNPGGQARWLPPVIPALWEAQAGGSLEVRSTRPAWPTWRNPISTKNTKKKKKK

SEQ ID NO: 75 - protein, 1020 aa, Artificial Sequence
  Synthetic polypeptide
MTRLGWPSPCCARKQCSEGRTYSNAVISPNLETTRIMRVSHTFPVVDCTAACCDLSSCDLAWWFEGRCYLVSCPHKENCEPKKMGPIRSYLTFVLRPVQRPAQLLDYGDMMLNRGSPSGIWGDSPEDIRKDLTFLGKDWGLEEMSEYSDDYRELEKDLLQPSGKQEPRGSAEYTDWGLLPGSEGAFNSSVGDSPAVPAETQQDPELHYLNESASTPAPKLPERSVLLPLPTTPSSGEVLEKEKASQLQEQSSNSSGKEVLMPSHSLPPASLELSSVTVEKSPVLTVTPGSTEHSIPTPPTSAAPSESTPSELPISPTTAPRTVKELTVSAGDNLIITLPDNEVELKAFVAPAPPVETTYNYEWNLISHPTDYQGEIKQGHKQTLNLSQLSVGLYVFKVTVSSENAFGEGFVNVTVKPARRVNLPPVAVVSPQLQELTLPLTSALIDGSQSTDDTEIVSYHWEEINGPFIEEKTSVDSPVLRLSNLDPGNYSFRLTVTDSDGATNSTTAALIVNNAVDYPPVANAGPNHTITLPQNSITLNGNQSSDDHQIVLYEWSLGPGSEGKHVVMQGVQTPYLHLSAMQEGDYTFQLKVTDSSRQQSTAVVTVIVQPENNRPPVAVAGPDKELIFPVESATLDGSSSSDDHGIVFYHWEHVRGPSAVEMENIDKAIATVTGLQVGTYHFRLTVKDQQGLSSTSTLTVAVKKENNSPPRARAGGRHVLVLPNNSITLDGSRSTDDQRIVSYLWIRDGQSPAAGDVIDGSDHSVALQLTNLVEGVYTFHLRVTDSQGASDTDTATVEVQPDPRKSGLVELTLQVGVGQLTEQRKDTLVRQLAVLLNVLDSDIKVQKIRAHSDLSTVIVFYVQSRPPFKVLKAAEVARNLHMRLSKEKADFLLFKVLRVDTAGCLLKCSGHGHCDPLTKRCICSHLWMENLIQRYIWDGESNCEWSIFYVTVLAFTLIVLTGGFTWLCICCCKRQKRTKIRKKTKYTILDNMDEQERMELRPKYETGDSQESLAKPHLQA

SEQ ID NO: 76 - protein, 1019 aa, Artificial Sequence
  Synthetic polypeptide
MGRGAGREYSPAATTAENGGGKKKQKEKELDELKKEVAMDDHKLSLDELGRKYQVDLSKGLTNQRAQDVLARDGPNALTPPPTTPEWVKFCRQLFGGFSILLWIGAILCFLAYGIQAAMEDEPSNDNLYLGVVLAAVVIVTGCFSYYQEAKSSKIMDSFKNMVPQQALVIREGEKMQINAEEVVVGDLVEVKGGDRVPADLRIISSHGCKVDNSSLTGESEPQTRSPEFTHENPLETRNICFFSTNCVEGTARGIVIATGDRTVMGRIATLASGLEVGRTPIAMEIEHFIQLITGVAVFLGVSFFVLSLILGYSWLEAVIFLIGIIVANVPEGLLATVTVCLTLTAKRMARKNCLVKNLEAVETLGSTSTICSDKTGTLTQNRMTVAHMWFDNQIHEADTTEDQSGATFDKRSPTWTALSRIAGLCNRAVFKAGQENISVSKRDTAGDASESALLKCIELSCGSVRKMRDRNPKVAEIPFNSTNKYQLSIHEREDSPQSHVLVMKGAPERILDRCSTILVQGKEIPLDKEMQDAFQNAYMELGGLGERVLGFCQLNLPSGKFPRGFKFDTDELNFPTEKLCFVGLMSMIDPPRAAVPDAVGKCRSAGIKVIMVTGDHPITAKAIAKGVGIISEGNETVEDIAARLNIPMSQVNPREAKACVVHGSDLKDMTSEQLDEILKNHTEIVFARTSPQQKLIIVEGCQRQGAIVAVTGDGVNDSPALKKADIGIAMGISGSDVSKQAADMILLDDNFASIVTGVEEGRLIFDNLKKSIAYTLTSNIPEITPFLLFIIANIPLPLGTVTILCIDLGTDMVPAISLAYEAAESDIMKRQPRNSQTDKLVNERLISMAYGQIGMIQALGGFFTYFVILAENGFLPSRLLGIRLDWDDRTMNDLEDSYGQEWTYEQRKVVEFTCHTAFFASIVVVQWADLIICKTRRNSVFQQGMKNKILIFGLLEETALAAFLSYCPGMGVALRMYPLKVTWWFCAFPYSLLIFIYDEVRKLILRRYPGEWTAAPLD

SEQ ID NO: 77 - protein, 1017 aa, Artificial Sequence
  Synthetic polypeptide
MGRHVATSCHVAWLLVLISGCWGQVNRLPFFTNHFFDTYLLISEDTPVGSSVTQLLAQDMDNDPLVFGVSGEEASRFFAVEPDTGVVWLRQPLDRETKSEFTVEFSVSDHQGVITRKVNIQVGDVNDNAPTFHNQPYSVRIPEVGATGNTPVGTPIFIVNATDPDLGAGGSVLYSFQPPSQFFAIDSARGIVTVIRELDYETTQAYQLTVNATDQDKTRPLSTLANLAIIITDVQDMDPIFINLPYSTNIYEHSPPGTTVRIITAIDQDKGRPRGIGYTIVSGNTNSIFALDYISGVLTLNGLLDRENPLYSHGFILTVKGTELNDDRTPSDATVTTTFNILVIDINDNAPEFNSSEYSVAITELAQVGFALPLFIQVVDKDENLGLNSMFEVYLVGNNSHHFIISPTSVQGKADIRIRVAIPLDYETVDRYDFDLFANESVPDHVGYAKVKITLINENDNRPIFSQPLYNISLYENVTVGTSVLTVLATDNDAGTFGEVSYFFSDDPDRFSLDKDTGLIMLIARLDYELIQRFTLTIIARDGGGEETTGRVRINVLDVNDNVPTFQKDAYVGALRENEPSVTQLVRLRATDEDSPPNNQITYSIVSASAFGSYFDISLYEGYGVISVSRPLDYEQISNGLIYLTVMAMDAGNPPLNSTVPVTIEVFDENDNPPTFSKPAYFVSVVENIMAGATVLFLNATDLDRSREYGQESIIYSLEGSTQFRINARSGEITTTSLLDRETKSEYILIVRAVDGGVGHNQKTGIATVNITLLDINDNHPTWKDAPYYINLVEMTPPDSDVTTVVAVDPDLGENGTLVYSIQPPNKFYSLNSTTGKIRTTHAMLDRENPDPHEAELMRKIVVSVTDCGRPPLKATSSATVFVNLLDLNDNDPTFQNLPFVAEVLEGIPAGVSIYQVVAIDLDEGLNGLVSYRMPVGMPRMDFLINSSSGVVVTTTELDRERIAEYQLRVVASDAGTPTKSSTSTLTIHGCSEGCMWSCMGSTQHGLGTLDKLVNGH

SEQ ID NO: 78 - protein, 1016 aa, Artificial Sequence
  Synthetic polypeptide
MGRGAGREYSPAATTAENGGGKKKQKEKELDELKKEVAMDDHKLSLDELGRKYQVDLSKGLTNQRAQDVLARDGPNALTPPPTTPEWVKFCRQLFGGFSILLWIGAILCFLAYGIQAAMEDEPSNDNLYLGVVLAAVVIVTGCFSYYQEAKSSKIMDSFKNMVPQQALVIREGEKMQINAEEVVVGDLVEVKGGDRVPADLRIISSHGCKVDNSSLTGESEPQTRSPEFTHENPLETRNICFFSTNCVEGTARGIVIATGDRTVMGRIATLASGLEVGRTPIAMEIEHFIQLITGVAVFLGVSFFVLSLILGYSWLEAVIFLIGIIVANVPEGLLATVTVCLTLTAKRMARKNCLVKNLEAVETLGSTSTICSDKTGTLTQNRMTVAHMWFDNQIHEADTTEDQSGATFDKRSPTWTALSRIAGLCNRAVFKAGQENISVSKRDTAGDASESALLKCIELSCGSVRKMRDRNPKVAEIPFNSTNKYQLSIHEREDSPQSHVLVMKGAPERILDRCSTILVQGKEIPLDKEMQDAFQNAYMELGGLGERVLGFCQLNLPSGKFPRGFKFDTDELNFPTEKLCFVGLMSMIDPPRAAVPDAVGKCRSAGIKVIMVTGDHPITAKAIAKGVGIISEGNETVEDIAARLNIPMSQVNPREAKACVVHGSDLKDMTSEQLDEILKNHTEIVFARTSPQQKLIIVEGCQRQGAIVAVTGDGVNDSPALKKADIGIAMGISGSDVSKQAADMILLDDNFASIVTGVEEGRLIFDNLKKSIAYTLTSNIPEITPFLLFIIANIPLPLGTVTILCIDLGTDMVPAISLAYEAAESDIMKRQPRNSQTDKLVNERLISMAYGQIGMIQALGGFFTYFVILAENGFLPSRLLGIRLDWDDRTMNDLEDSYGQEWTYEQRKVVEFTCHTAFFASIVVVQWADLIICKTRRNSVFQQGMKNKILIFGLLEETALAAFLSYCPGMGVALRMYPLKVTWWFCAFPYSLLIFIYDEVRKLILRRYPGDQKSC

SEQ ID NO: 79 - protein, 1016 aa, Artificial Sequence
  Synthetic polypeptide
MRPSGTAGAALLALLAALCPASRALEEKKVCQGTSNKLTQLGTFEDHFLSLQRMFNNCEVVLGNLEITYVQRNYDLSFLKTIQEVAGYVLIALNTVERIPLENLQIIRGNMYYENSYALAVLSNYDANKTGLKELPMRNLQEILHGAVRFSNNPALCNVESIQWRDIVSSDFLSNMSMDFQNHLGSCQKCDPSCPNGSCWGAGEENCQKLTKIICAQQCSGRCRGKSPSDCCHNQCAAGCTGPRESDCLVCRKFRDEATCKDTCPPLMLYNPTTYQMDVNPEGKYSFGATCVKKCPRNYVVTDHGSCVRACGADSYEMEEDGVRKCKKCEGPCRKVCNGIGIGEFKDSLSINATNIKHFKNCTSISGDLHILPVAFRGDSFTHTPPLDPQELDILKTVKEITGFLLIQAWPENRTDLHAFENLEIIRGRTKQHGQFSLAVVSLNITSLGLRSLKEISDGDVIISGNKNLCYANTINWKKLFGTSGQKTKIISNRGENSCKATGQVCHALCSPEGCWGPEPRDCVSCRNVSRGRECVDKCNLLEGEPREFVENSECIQCHPECLPQAMNITCTGRGPDNCIQCAHYIDGPHCVKTCPAGVMGENNTLVWKYADAGHVCHLCHPNCTYGCTGPGLEGCPTNGPKIPSIATGMVGALLLLLVVALGIGLFMRRRHIVRKRTLRRLLQERELVEPLTPSGEAPNQALLRILKETEFKKIKVLGSGAFGTVYKGLWIPEGEKVKIPVAIKELREATSPKANKEILDEAYVMASVDNPHVCRLLGICLTSTVQLITQLMPFGCLLDYVREHKDNIGSQYLLNWCVQIAKGMNYLEDRRLVHRDLAARNVLVKTPQHVKITDFGLAKLLGAEEKEYHAEGGKVPIKWMALESILHRIYTHQSDVWSYGVTVWELMTFGSKPYDGIPASEISSILEKGERLPQPPICTIDVYMIMVKCWMIDADSRPKFRELIIEFSKMARDPQRYLVIQAADPPISFHNTGIPKPSSQDCLKDSIKYVAKYAP

SEQ ID NO: 80 - protein, 1008 aa, Artificial Sequence
  Synthetic polypeptide
MGRGAGREYSPAATTAENGGGKKKQKEKELDELKKEVAMDDHKLSLDELGRKYQVDLSKGLTNQRAQDVLARDGPNALTPPPTTPEWVKFCRQLFGGFSILLWIGAILCFLAYGIQAAMEDEPSNDNLYLGVVLAAVVIVTGCFSYYQEAKSSKIMDSFKNMVPQQALVIREGEKMQINAEEVVVGDLVEVKGGDRVPADLRIISSHGCKVDNSSLTGESEPQTRSPEFTHENPLETRNICFFSTNCVEGTARGIVIATGDRTVMGRIATLASGLEVGRTPIAMEIEHFIQLITGVAVFLGVSFFVLSLILGYSWLEAVIFLIGIIVANVPEGLLATVTVCLTLTAKRMARKNCLVKNLEAVETLGSTSTICSDKTGTLTQNRMTVAHMWFDNQIHEADTTEDQSGATFDKRSPTWTALSRIAGLCNRAVFKAGQENISVSKRDTAGDASESALLKCIELSCGSVRKMRDRNPKVAEIPFNSTNKYQLSIHEREDSPQSHVLVMKGAPERILDRCSTILVQGKEIPLDKEMQDAFQNAYMELGGLGERVLGFCQLNLPSGKFPRGFKFDTDELNFPTEKLCFVGLMSMIDPPRAAVPDAVGKCRSAGIKVIMVTGDHPITAKAIAKGVGIISEGNETVEDIAARLNIPMSQVNPREAKACVVHGSDLKDMTSEQLDEILKNHTEIVFARTSPQQKLIIVEGCQRQGAIVAVTGDGVNDSPALKKADIGIAMGISGSDVSKQAADMILLDDNFASIVTGVEEGRLIFDNLKKSIAYTLTSNIPEITPFLLFIIANIPLPLGTVTILCIDLGTDMVPAISLAYEAAESDIMKRQPRNSQTDKLVNERLISMAYGQIGMIQALGGFFTYFVILAENGFLPSRLLGIRLDWDDRTMNDLEDSYGQEWTYEQRKVVEFTCHTAFFASIVVVQWADLIICKTRRNSVFQQGMKNKILIFGLLEETALAAFLSYCPGMGVALRMYPLNLLIFIYDEVRKLILRRYPGEWTAAPLD

SEQ ID NO: 81 - protein, 1005 aa, Artificial Sequence
  Synthetic polypeptide
MGRGAGREYSPAATTAENGGGKKKQKEKELDELKKEVAMDDHKLSLDELGRKYQVDLSKGLTNQRAQDVLARDGPNALTPPPTTPEWVKFCRQLFGGFSILLWIGAILCFLAYGIQAAMEDEPSNDNLYLGVVLAAVVIVTGCFSYYQEAKSSKIMDSFKNMVPQQALVIREGEKMQINAEEVVVGDLVEVKGGDRVPADLRIISSHGCKVDNSSLTGESEPQTRSPEFTHENPLETRNICFFSTNCVEGTARGIVIATGDRTVMGRIATLASGLEVGRTPIAMEIEHFIQLITGVAVFLGVSFFVLSLILGYSWLEAVIFLIGIIVANVPEGLLATVTVCLTLTAKRMARKNCLVKNLEAVETLGSTSTICSDKTGTLTQNRMTVAHMWFDNQIHEADTTEDQSGATFDKRSPTWTALSRIAGLCNRAVFKAGQENISVSKRDTAGDASESALLKCIELSCGSVRKMRDRNPKVAEIPFNSTNKYQLSIHEREDSPQSHVLVMKGAPERILDRCSTILVQGKEIPLDKEMQDAFQNAYMELGGLGERVLGFCQLNLPSGKFPRGFKFDTDELNFPTEKLCFVGLMSMIDPPRAAVPDAVGKCRSAGIKVIMVTGDHPITAKAIAKGVGIISEGNETVEDIAARLNIPMSQVNPREAKACVVHGSDLKDMTSEQLDEILKNHTEIVFARTSPQQKLIIVEGCQRQGAIVAVTGDGVNDSPALKKADIGIAMGISGSDVSKQAADMILLDDNFASIVTGVEEGRLIFDNLKKSIAYTLTSNIPEITPFLLFIIANIPLPLGTVTILCIDLGTDMVPAISLAYEAAESDIMKRQPRNSQTDKLVNERLISMAYGQIGMIQALGGFFTYFVILAENGFLPSRLLGIRLDWDDRTMNDLEDSYGQEWTYEQRKVVEFTCHTAFFASIVVVQWADLIICKTRRNSVFQQGMKNKILIFGLLEETALAAFLSYCPGMGVALRMYPLNLLIFIYDEVRKLILRRYPGDQKSC

SEQ ID NO: 82 - protein, 984 aa, Artificial Sequence
  Synthetic polypeptide
MRVSHTFPVVDCTAACCDLSSCDLAWWFEGRCYLVSCPHKENCEPKKMGPIRSYLTFVLRPVQRPAQLLDYGDMMLNRGSPSGIWGDSPEDIRKDLTFLGKDWGLEEMSEYSDDYRELEKDLLQPSGKQEPRGSAEYTDWGLLPGSEGAFNSSVGDSPAVPAETQQDPELHYLNESASTPAPKLPERSVLLPLPTTPSSGEVLEKEKASQLQEQSSNSSGKEVLMPSHSLPPASLELSSVTVEKSPVLTVTPGSTEHSIPTPPTSAAPSESTPSELPISPTTAPRTVKELTVSAGDNLIITLPDNEVELKAFVAPAPPVETTYNYEWNLISHPTDYQGEIKQGHKQTLNLSQLSVGLYVFKVTVSSENAFGEGFVNVTVKPARRVNLPPVAVVSPQLQELTLPLTSALIDGSQSTDDTEIVSYHWEEINGPFIEEKTSVDSPVLRLSNLDPGNYSFRLTVTDSDGATNSTTAALIVNNAVDYPPVANAGPNHTITLPQNSITLNGNQSSDDHQIVLYEWSLGPGSEGKHVVMQGVQTPYLHLSAMQEGDYTFQLKVTDSSRQQSTAVVTVIVQPENNRPPVAVAGPDKELIFPVESATLDGSSSSDDHGIVFYHWEHVRGPSAVEMENIDKAIATVTGLQVGTYHFRLTVKDQQGLSSTSTLTVAVKKENNSPPRARAGGRHVLVLPNNSITLDGSRSTDDQRIVSYLWIRDGQSPAAGDVIDGSDHSVALQLTNLVEGVYTFHLRVTDSQGASDTDTATVEVQPDPRKSGLVELTLQVGVGQLTEQRKDTLVRQLAVLLNVLDSDIKVQKIRAHSDLSTVIVFYVQSRPPFKVLKAAEVARNLHMRLSKEKADFLLFKVLRVDTAGCLLKCSGHGHCDPLTKRCICSHLWMENLIQRYIWDGESNCEWSIFYVTVLAFTLIVLTGGFTWLCICCCKRQKRTKIRKKTKYTILDNMDEQERMELRPKYETGDSQESLAKPHLQA

SEQ ID NO: 83 - protein, 981 aa, Artificial Sequence
  Synthetic polypeptide
MPLAFCGSENHSAAYRVDQGVLNNGCFVDALNVVPHVFLLFITFPILFIGWGSQSSKVHIHHSTWLHFPGHNLRWILTFMLLFVLVCEIAEGILSDGVTESHHLHLYMPAGMAFMAAVTSVVYYHNIETSNFPKLLIALLVYWTLAFITKTIKFVKFLDHAIGFSQLRFCLTGLLVILYGMLLLVEVNVIRVRRYIFFKTPREVKPPEDLQDLGVRFLQPFVNLLSKGTYWWMNAFIKTAHKKPIDLRAIGKLPIAMRALTNYQRLCEAFDAQVRKDIQGTQGARAIWQALSHAFGRRLVLSSTFRILADLLGFAGPLCIFGIVDHLGKENDVFQPKTQFLGVYFVSSQEFLANAYVLAVLLFLALLLQRTFLQASYYVAIETGINLRGAIQTKIYNKIMHLSTSNLSMGEMTAGQICNLVAIDTNQLMWFFFLCPNLWAMPVQIIVGVILLYYILGVSALIGAAVIILLAPVQYFVATKLSQAQRSTLEYSNERLKQTNEMLRGIKLLKLYAWENIFRTRVETTRRKEMTSLRAFAIYTSISIFMNTAIPIAAVLITFVGHVSFFKEADFSPSVAFASLSLFHILVTPLFLLSSVVRSTVKALVSVQKLSEFLSSAEIREEQCAPHEPTPQGPASKYQAVPLRVVNRKRPAREDCRGLTGPLQSLVPSADGDADNCCVQIMGGYFTWTPDGIPTLSNITIRIPRGQLTMIVGQVGCGKSSLLLAALGEMQKVSGAVFWSSSLPDSEIGEDPSPERETATDLDIRKRGPVAYASQKPWLLNATVEENIIFESPFNKQRYKMVIEACSLQPDIDILPHGDQTQIGERGINLSGGQRQRISVARALYQHANVVFLDDPFSALDIHLSDHLMQAGILELLRDDKRTVVLVTHKLQYLPHADWIIAMKDGTIQREGTLKDFQRSECQLFEHWKTLMNRQDQELEKETVTERKATEPPQGLSRAMSSRDGLLQDEEEEEVSGDKMP

SEQ ID NO: 84 - protein, 980 aa, Artificial Sequence
  Synthetic polypeptide
MLFRARGPVRGRGWGRPAEAPRRGRSPPWSPAWICCWALAGCQAAWAGDLPSSSSRPLPPCQEKDYHFEYTECDSSGSRWRVAIPNSAVDCSGLPDPVRGKECTFSCASGEYLEMKNQVCSKCGEGTYSLGSGIKFDEWDELPAGFSNIATFMDTVVGPSDSRPDGCNNSSWIPRGNYIESNRDDCTVSLIYAVHLKKSGYVFFEYQYVDNNIFFEFFIQNDQCQEMDTTTDKWVKLTDNGEWGSHSVMLKSGTNILYWRTTGILMGSKAVKPVLVKNITIEGVAYTSECFPCKPGTFSNKPGSFNCQVCPRNTYSEKGAKECIRCKDDSQFSEEGSSECTERPPCTTKDYFQIHTPCDEEGKTQIMYKWIEPKICREDLTDAIRLPPSGEKKDCPPCNPGFYNNGSSSCHPCPPGTFSDGTKECRPCPAGTEPALGFEYKWWNVLPGNMKTSCFNVGNSKCDGMNGWEVAGDHIQSGAGGSDNDYLILNLHIPGFKPPTSMTGATGSELGRITFVFETLCSADCVLYFMVDINRKSTNVVESWGGTKEKQAYTHIIFKNATFTFTWAFQRTNQGQDATTLRKKPTSARNVHLTPTCPYIRSMAKRLVFHAGLGVKTISNLSSVGSLMNGPSFTSKGTKYFHFFNISLCGHEGKKMALCTNNITDFTVKEIVAGSDDYTNLVGAFVCQSTIIPSESKGFRAALSSQSIILADTFIGVTVETTLKNINIKEDMFPVPTSQIPDVHFFYKSSTATTSCINGRSTAVKMRCNPTKSGAGVISVPSKCPAGTCDGCTFYFLWESAEACPLCTEHDFHEIEGACKRGFQETLYVWNEPKWCIKGISLPEKKLATCETVDFWLKVGAGVGAFTAVLLVALTCYFWKKNQKLEYKYSKLVMTTNSKECELPAADSCAIMEGEDNEEEVVYSNKQSLLGKLKSLATKKLPQSPQSSATTTLISQQPSTLRQDRQSAKRVWLAKGWDDC

SEQ ID NO: 85 - protein, 980 aa, Artificial Sequence
  Synthetic polypeptide
MPLAFCGSENHSAAYRVDQGVLNNGCFVDALNVVPHVFLLFITFPILFIGWGSQSSKVHIHHSTWLHFPGHNLRWILTFMLLFVLVCEIAEGILSDGVTESHHLHLYMPAGMAFMAAVTSVVYYHNIETSNFPKLLIALLVYWTLAFITKTIKFVKFLDHAIGFSQLRFCLTGLLVILYGMLLLVEVNVIRVRRYIFFKTPREVKPPEDLQDLGVRFLQPFVNLLSKGTYWWMNAFIKTAHKKPIDLRAIGKLPIAMRALTNYQRLCEAFDAQVRKDIQGTQGARAIWQALSHAFGRRLVLSSTFRILADLLGFAGPLCIFGIVDHLGKENDVFQPKTQFLGVYFVSSQEFLANAYVLAVLLFLALLLQRTFLQASYYVAIETGINLRGAIQTKIYNKIMHLSTSNLSMGEMTAGQICNLVAIDTNQLMWFFFLCPNLWAMPVQIIVGVILLYYILGVSALIGAAVIILLAPVQYFVATKLSQAQRSTLEYSNERLKQTNEMLRGIKLLKLYAWENIFRTRVETTRRKEMTSLRAFAIYTSISIFMNTAIPIAAVLITFVGHVSFFKEADFSPSVAFASLSLFHILVTPLFLLSSVVRSTVKALVSVQKLSEFLSSAEIREEQCAPHEPTPQGPASKYQAVPLRVVNRKRPAREDCRGLTGPLQSLVPSADGDADNCCVQIMGGYFTWTPDGIPTLSNITIRIPRGQLTMIVGQVGCGKSSLLLAALGEMQKVSGAVFWSSLPDSEIGEDPSPERETATDLDIRKRGPVAYASQKPWLLNATVEENIIFESPFNKQRYKMVIEACSLQPDIDILPHGDQTQIGERGINLSGGQRQRISVARALYQHANVVFLDDPFSALDIHLSDHLMQAGILELLRDDKRTVVLVTHKLQYLPHADWIIAMKDGTIQREGTLKDFQRSECQLFEHWKTLMNRQDQELEKETVTERKATEPPQGLSRAMSSRDGLLQDEEEEEVSGDKMP

SEQ ID NO: 86 - protein, 971 aa, Artificial Sequence
  Synthetic polypeptide
MRPSGTAGAALLALLAALCPASRALEEKKVCQGTSNKLTQLGTFEDHFLSLQRMFNNCEVVLGNLEITYVQRNYDLSFLKTIQEVAGYVLIALNTVERIPLENLQIIRGNMYYENSYALAVLSNYDANKTGLKELPMRNLQGQKCDPSCPNGSCWGAGEENCQKLTKIICAQQCSGRCRGKSPSDCCHNQCAAGCTGPRESDCLVCRKFRDEATCKDTCPPLMLYNPTTYQMDVNPEGKYSFGATCVKKCPRNYVVTDHGSCVRACGADSYEMEEDGVRKCKKCEGPCRKVCNGIGIGEFKDSLSINATNIKHFKNCTSISGDLHILPVAFRGDSFTHTPPLDPQELDILKTVKEITGFLLIQAWPENRTDLHAFENLEIIRGRTKQHGQFSLAVVSLNITSLGLRSLKEISDGDVIISGNKNLCYANTINWKKLFGTSGQKTKIISNRGENSCKATGQVCHALCSPEGCWGPEPRDCVSCRNVSRGRECVDKCNLLEGEPREFVENSECIQCHPECLPQAMNITCTGRGPDNCIQCAHYIDGPHCVKTCPAGVMGENNTLVWKYADAGHVCHLCHPNCTYGCTGPGLEGCPTNGPKIPSIATGMVGALLLLLVVALGIGLFMRRRHIVRKRTLRRLLQERELVEPLTPSGEAPNQALLRILKETEFKKIKVLGSGAFGTVYKGLWIPEGEKVKIPVAIKELREATSPKANKEILDEAYVMASVDNPHVCRLLGICLTSTVQLITQLMPFGCLLDYVREHKDNIGSQYLLNWCVQIAKGMNYLEDRRLVHRDLAARNVLVKTPQHVKITDFGLAKLLGAEEKEYHAEGGKVPIKWMALESILHRIYTHQSDVWSYGVTVWELMTFGSKPYDGIPASEISSILEKGERLPQPPICTIDVYMIMVKCWMIDADSRPKFRELIIEFSKMARDPQRYLVIQAADPPISFHNTGIPKPSSQDCLKDSIKYVAKYAP

SEQ ID NO: 87 - protein, 969 aa, Artificial Sequence
  Synthetic polypeptide
PVPCRVIPAMGKTSFRIIFLPTEEGSIESSLFINTSSYGVLSYHVSGIGTRRISTEGSAKQLPNAYFLLPKVQSIQLSQMQAETTNTSLLQVQLECSLHNKVCQQLKGCYLESDDVLRLQMSIMVTMENFSKEFEENTQHLLDHLSIVYVATDESETSDDSAVNMYILHSGNSLIWIQDIRHFSQRDALSLQFEPVLLPTSTTNFTKIASFTCKAATSCDSGIIEDVKKTTHTPTLKACLFSSVAQGYFRMDSSATQFHIETHENTSGLWSIWYRNHFDRSVVLNDVFLSKETKHMLKILNFTGPLFLPPGCWNIFSLKLAVKDIAINLFTNVFLTTNIGAIFAIPLQIYSAPTKEGSLGFEVIAHCGMHYFMGKSKAGNPNWNGSLSLDQSTWNVDSELANKLYERWKKYKNGDVCKFGTDMQMINFTTGEFQLTEACPYLGTHSEESRFGILHLHLQPLEMKRVGVVFTPADYGKVTSLILIRNNLTVIDMIGVEGFGARELLKVGGRLPGAGGSLRFKVPESTLMDCRRQLKDSKQILSITKNFKVENIGPLPITVSSLKINGYNCQGYGFEVLDCHQFSLDPNTSRDISIVFTPDFTSSWVIRDLSLVTAADLEFRFTLNVTLPHHLLPLCADVVPGPSWEESFWRLTVFFVSLSLLGVILIAFQQAQYILMEFMKTRQRQNASSSSQQNNGPMDVISPHSYKSNCKNFLDTYGPSDKGRGKNCLPVNTPQSRIQNAAKRSPATYGHSQKKHKCSVYYSKHKTSTAAASSTSTTTEEKQTSPLGSSLPAAKEDICTDAMRENWISLRYASGINVNLQKNLTLPKNLLNKEENTLKNTIVFSNPSSECSMKEGIQTCMFPKETDIKTSENTAEFKERELCPLKTSKKLPENHLPRNSPQYHQPDLPEISRKNNGNNQQVPVKNEVDHCENLKKVDTKPSSEKKIHKTSREDMFSEKQDIPFVENED

SEQ ID NO: 88 - protein, 963 aa, Artificial Sequence
  Synthetic polypeptide
MFNNCEVVLGNLEITYVQRNYDLSFLKTIQEVAGYVLIALNTVERIPLENLQIIRGNMYYENSYALAVLSNYDANKTGLKELPMRNLQEILHGAVRFSNNPALCNVESIQWRDIVSSDFLSNMSMDFQNHLGSCQKCDPSCPNGSCWGAGEENCQKLTKIICAQQCSGRCRGKSPSDCCHNQCAAGCTGPRESDCLVCRKFRDEATCKDTCPPLMLYNPTTYQMDVNPEGKYSFGATCVKKCPRNYVVTDHGSCVRACGADSYEMEEDGVRKCKKCEGPCRKVCNGIGIGEFKDSLSINATNIKHFKNCTSISGDLHILPVAFRGDSFTHTPPLDPQELDILKTVKEITGFLLIQAWPENRTDLHAFENLEIIRGRTKQHGQFSLAVVSLNITSLGLRSLKEISDGDVIISGNKNLCYANTINWKKLFGTSGQKTKIISNRGENSCKATGQVCHALCSPEGCWGPEPRDCVSCRNVSRGRECVDKCNLLEGEPREFVENSECIQCHPECLPQAMNITCTGRGPDNCIQCAHYIDGPHCVKTCPAGVMGENNTLVWKYADAGHVCHLCHPNCTYGCTGPGLEGCPTNGPKIPSIATGMVGALLLLLVVALGIGLFMRRRHIVRKRTLRRLLQERELVEPLTPSGEAPNQALLRILKETEFKKIKVLGSGAFGTVYKGLWIPEGEKVKIPVAIKELREATSPKANKEILDEAYVMASVDNPHVCRLLGICLTSTVQLITQLMPFGCLLDYVREHKDNIGSQYLLNWCVQIAKGMNYLEDRRLVHRDLAARNVLVKTPQHVKITDFGLAKLLGAEEKEYHAEGGKVPIKWMALESILHRIYTHQSDVWSYGVTVWELMTFGSKPYDGIPASEISSILEKGERLPQPPICTIDVYMIMVKCWMIDADSRPKFRELIIEFSKMARDPQRYLVIQAADPPISFHNTGIPKPSSQDCLKDSIKYVAKYAP

SEQ ID NO: 89 - protein, 957 aa, Artificial Sequence
  Synthetic polypeptide
MGRGAGREYSPAATTAENGGGKKKQKEKELDELKKEVAMDDHKLSLDELGRKYQVDLSKGLTNQRAQDVLARDGPNALTPPPTTPEWVKFCRQLFGGFSILLWIGAILCFLAYGIQAAMEDEPSNDNLYLGVVLAAVVIVTGCFSYYQEAKSSKIMDSFKNMVPQQALVIREGEKMQINAEEVVVGDLVEVKGGDRVPADLRIISSHGCKVDNSSLTGESEPQTRSPEFTHENPLETRNICFFSTNCVEGTARGIVIATGDRTVMGRIATLASGLEVGRTPIAMEIEHFIQLITGVAVFLGVSFFVLSLILGYSWLEAVIFLIGIIVANVPEGLLATVTVCLTLTAKRMARKNCLVKNLEAVETLGSTSTICSDKTGTLTQNRMTVAHMWFDNQIHEADTTEDQSGATFDKRSPTWTALSRIAGLCNRAVFKAGQENISVSKRDTAGDASESALLKCIELSCGSVRKMRDRNPKVAEIPFNSTNKYQLSIHEREDSPQSHVLVMKGAPERILDRCSTILVQGKEIPLDKEMQDAFQNAYMELGGLGERVLGFCQLNLPSGKFPRGFKFDTDELNFPTEKLCFVGLMSMIDPPRAAVPDAVGKCRSAGIKVIMVTGDHPITAKAIAKGVGIISEGNETVEDIAARLNIPMSQVNPREAKACVVHGSDLKDMTSEQLDEILKNHTEIVFARTSPQQKLIIVEGCQRQGAIVAVTGDGVNDSPALKKADIGIAMGISGSDVSKQAADMILLDDNFASIVTGVEEGRLIFDNLKKSIAYTLTSNIPEITPFLLFIIANIPLPLGTVTILCIDLGTDMVPAISLAYEAAESDIMKRQPRNSQTDKLVNERLISMAYGQIGMIQALGGFFTYFVILAENGFLPSRLLGIRLDWDDRTMNDLEDSYGQEWTYEQRKVVEFTCHTAFFASIVVVQWADLIICKTRRNSVFQQGMKQKPRAHIMTW

SEQ ID NO: 90 - protein, 957 aa, Artificial Sequence; identical to SEQ ID NO: 89
  Synthetic polypeptide

SEQ ID NO: 91 - protein, 932 aa, Artificial Sequence
  Synthetic polypeptide
MFQTKLRNETWEDLPKMSCTTEIQAAFILSSFVTFFSGLIILLIFRLIWRSVKKWQIIKGTGIILELFTSGTIARSHVRSLHFQGQFRDHIEMLLSAQTFVGQVLVILVFVLSIGSLIIYFINSADPVGSCSSYEDKTIPIDLVFNAFFSFYFGLRFMAADDKIKFWLEMNSIVDIFTIPPTFISYYLKSNWLGLRFLRALRLLELPQILQILRAIKTSNSVKFSKLLSIILSTWFTAAGFIHLVENSGDPWLKGRNSQNISYFESIYLVMATTSTVGFGDVVAKTSLGRTFIMFFTLGSLILFANYIPEMVELFANKRKYTSSYEALKGKKFIVVCGNITVDSVTAFLRNFLRDKSGEINTEIVFLGETPPSLELETIFKCYLAYTTFISGSAMKWEDLRRVAVESAEACLIIANPLCSDSHAEDISNIMRVLSIKNYDSTTRIIIQILQSHNKVYLPKIPSWNWDTGDNIICFAELKLGFIAQGCLVPGLCTFLTSLFVEQNKKVMPKQTWKKHFLNSMKNKILTQRLSDDFAGMSFPEVARLCFLKMHLLLIAIEYKSLFTDGFCGLILNPPPQVRIRKNTLGFFIAETPKDVRRALFYCSVCHDDVFIPELITNCGCKSRSRQHITVPSVKRMKKCLKGISSRISGQDSPPRVSASTSSISNFTTRTLQHDVEQDSDQLDSSGMFHWCKPTSLDKVTLKRTGKSKYKFRNHIVACVFGDAHSAPMGLRNFVMPLRASNYTRKELKDIVFIGSLDYLQREWRFLWNFPQIYILPGCALYSGDLHAANIEQCSMCAVLSPPPQPSSNQTLVDTEAIMATLTIGSLQIDSSSDPSPSVSEETPGYTNGHNEKSNCRKVPILTELKNPSNIHFIEQLGGLEGSLQETNLHLSTAFSTGTVFSGSFLDSLLATEIWDPRNLHSLISLQMIQIH

SEQ ID NO: 92 - protein, 932 aa, Artificial Sequence; identical to SEQ ID NO: 91
  Synthetic polypeptide

SEQ ID NO: 93 - protein, 930 aa, Artificial Sequence
  Synthetic polypeptide
MGKGVGRDKYEPAAVSEQGDKKGKKGKKDRDMDELKKEVSMDDHKLSLDELHRKYGTDLSRGLTSARAAEILARDGPNALTPPPTTPEWIKFCRQLFGGFSMLLWIGAILCFLAYSIQAATEEEPQNDNLYLGVVLSAVVIITGCFSYYQEAKSSKIMESFKNMVPQQALVIRNGEKMSINAEEVVVGDLVEVKGGDRIPADLRIISANGCKVDNSSLTGESEPQTRSPDFTNENPLETRNIAFFSTNCVEGTARGIVVYTGDRTVMGRIATLASGLEGGQTPIAAEIEHFIHIITGVAVFLGVSFFILSLILEYTWLEAVIFLIGIIVANVPEGLLATVTVCLTLTAKRMARKNCLVKNLEAVETLGSTSTICSDKTGTLTQNRMTVAHMWFDNQIHEADTTENQSGVSFDKTSATWLALSRIAGLCNRAVFQANQENLPILKRAVAGDASESALLKCIELCCGSVKEMRERYAKIVEIPFNSTNKYQLSIHKNPNTSEPQHLLVMKGAPERILDRCSSILLHGKEQPLDEELKDAFQNAYLELGGLGERVLGFCHLFLPDEQFPEGFQFDTDDVNFPIDNLCFVGLISMIDPPRAAVPDAVGKCRSAGIKVIMVTGDHPITAKAIAKGVGIISEGNETVEDIAARLNIPVSQVNPRDAKACVVHGSDLKDMTSEQLDDILKYHTEIVFARTSPQQKLIIVEGCQRQGAIVAVTGDGVNDSPALKKADIGVAMGIAGSDVSKQAADMILLDDNFASIVTGVEEGRLIFDNLKKSIAYTLTSNIPEITPFLIFIIANIPLPLGTVTILCIDLGTDMVPAISLAYEQAESDIMKRQPRNPKTDKLVNERLISMAYGQIGMIQALGGFFTYFVILAENGFLPIHLLGLRVDWDDRWINDVEDSYGQQWTYEQRKIVEFTCHTAFFVSIVAVQ

SEQ ID NO: 94 - protein, 930 aa, Artificial Sequence
  Synthetic polypeptide
MAFKVGRDKYEPAAVSEQGDKKGKKGKKDRDMDELKKEVSMDDHKLSLDELHRKYGTDLSRGLTSARAAEILARDGPNALTPPPTTPEWIKFCRQLFGGFSMLLWIGAILCFLAYSIQAATEEEPQNDNLYLGVVLSAVVIITGCFSYYQEAKSSKIMESFKNMVPQQALVIRNGEKMSINAEEVVVGDLVEVKGGDRIPADLRIISANGCKVDNSSLTGESEPQTRSPDFTNENPLETRNIAFFSTNCVEGTARGIVVYTGDRTVMGRIATLASGLEGGQTPIAAEIEHFIHIITGVAVFLGVSFFILSLILEYTWLEAVIFLIGIIVANVPEGLLATVTVCLTLTAKRMARKNCLVKNLEAVETLGSTSTICSDKTGTLTQNRMTVAHMWFDNQIHEADTTENQSGVSFDKTSATWLALSRIAGLCNRAVFQANQENLPILKRAVAGDASESALLKCIELCCGSVKEMRERYAKIVEIPFNSTNKYQLSIHKNPNTSEPQHLLVMKGAPERILDRCSSILLHGKEQPLDEELKDAFQNAYLELGGLGERVLGFCHLFLPDEQFPEGFQFDTDDVNFPIDNLCFVGLISMIDPPRAAVPDAVGKCRSAGIKVIMVTGDHPITAKAIAKGVGIISEGNETVEDIAARLNIPVSQVNPRDAKACVVHGSDLKDMTSEQLDDILKYHTEIVFARTSPQQKLIIVEGCQRQGAIVAVTGDGVNDSPALKKADIGVAMGIAGSDVSKQAADMILLDDNFASIVTGVEEGRLIFDNLKKSIAYTLTSNIPEITPFLIFIIANIPLPLGTVTILCIDLGTDMVPAISLAYEQAESDIMKRQPRNPKTDKLVNERLISMAYGQIGMIQALGGFFTYFVILAENGFLPIHLLGLRVDWDDRWINDVEDSYGQQWTYEQRKIVEFTCHTAFFVSIVAVQ

SEQ ID NO: 95 - protein, 925 aa, Artificial Sequence
  Synthetic polypeptide
MKDIDIGKEYIIPSPGYRSVRERTSTSGTHRDREDSKFRRTRPLECQDALETAARAEGLSLDASMHSQLRILDEEHPKGKYHHGLSALKPIRTTSKHQHPVDNAGLFSCMTFSWLSSLARVAHKKGELSMEDVWSLSKHESSDVNCRRLERLWQEELNEVGPDAASLRRVVWIFCRTRLILSIVCLMITQLAGFSGPAFMVKHLLEYTQATESNLQYSLLLVLGLLLTEIVRSWSLALTWALNYRTGVRLRGAILTMAFKKILKLKNIKEKSLGELINICSNDGQRMFEAAAVGSLLAGGPVVAILGMIYNVIILGPTGFLGSAVFILFYPAMMFASRLTAYFRRKCVAATDERVQKMNEVLTYIKFIKMYAWVKAFSQSVQKIREEERRILEKAGYFQSITVGVAPIVVVIASVVTFSVHMTLGFDLTAAQAFTVVTVFNSMTFALKVTPFSVKSLSEASVAVDRFKSLFLMEEVHMIKNKPASPHIKIEMKNATLAWDSSHSSIQNSPKLTPKMKKDKRASRGKKEKVRQLQRTEHQAVLAEQKGHLLLDSDERPSPEEEEGKHIHLGHLRLQRTLHSIDLEIQEGKLVGICGSVGSGKTSLISAILGQMTLLEGSIAISGTFAYVAQQAWILNATLRDNILFGKEYDEERYNSVLNSCCLRPDLAILPSSDLTEIGERGANLSGGQRQRISLARALYSDRSIYILDDPLSALDAHVGNHIFNSAIRKHLKSKTVLFVTHQLQYLVDCDEVIFMKEGCITERGTHEELMNLNGDYATIFNNLLLGETPPVEINSKKETSGSQKKSQDKGPKTGSVKKEKAVKPEEGLSRGSDTFDRRHSHLFSLTSATGRLHLHDKNLGVHTLSPTTPPPLKLISTLQAELNPFNQLPIRKSLNSPLTFKLHLPAPCCPTFPDQTSDYPTYID

SEQ ID NO: 96 - protein, 925 aa, Artificial Sequence; identical to SEQ ID NO: 95
  Synthetic polypeptide

SEQ ID NO: 97 - protein, 925 aa, Artificial Sequence
  Synthetic polypeptide
MALRGFCSADGSDPLWDWNVTWNTSNPDFTKCFQNTVLVWVPCFYLWACFPFYFLYLSRHDRGYIQMTPLNKTKTALGFLLWIVCWADLFYSFWERSRGIFLAPVFLVSPTLLGITMLLATFLIQLERRKGVQSSGIMLTFWLVALVCALAILRSKIMTALKEDAQVDLFRDITFYVYFSLLLIQLVLSCFSDRSPLFSETIHDPNPCPESSASFLSRITFWWITGLIVRGYRQPLEGSDLWSLNKEDTSEQVVPVLVKNWKKECAKTRKQPVKVVYSSKDPAQPKESSKVDANEEVEALIVKSPQKEWNPSLFKVLYKTFGPYFLMSFFFKAIHDLMMFSGPQILKLLIKFVNDTKAPDWQGYFYTVLLFVTACLQTLVLHQYFHICFVSGMRIKTAVIGAVYRKALVITNSARKSSTVGEIVNLMSVDAQRFMDLATYINMIWSAPLQVILALYLLWLNLGPSVLAGVAVMVLMVPVNAVMAMKTKTYQVAHMKSKDNRIKLMNEILNGIKVLKLYAWELAFKDKVLAIRQEELKVLKKSAYLSAVGTFTWVCTPFLVALCTFAVYVTIDENNILDAQTAFVSLALFNILRFPLNILPMVISSIVQASVSLKRLRIFLSHEELEPDSIERRPVKDGGGTNSITVRNATFTWARSDPPTLNGITFSIPEGALVAVVGQVGCGKSSLLSALLAEMDKVEGHVAIKGSVAYVPQQAWIQNDSLRENILFGCQLEEPYYRSVIQACALLPDLEILPSGDRTEIGEKGVNLSGGQKQRVSLARAVYSNADIYLFDDPLSAVDAHVGKHIFENVIGPKGMLKNKTRILVTHSMSYLPQVDVIIVMSGGKISEMGSYQELLARDGAFAEFLRTYASTEQEQDAEENGSTVMDEEEAGVTGVSGPGKEAKQMENGMLVTDSAGKQLQRYKN

SEQ ID NO: 98 - protein, 915 aa, Artificial Sequence
  Synthetic polypeptide
MALRGFCSADGSDPLWDWNVTWNTSNPDFTKCFQNTVLVWVPCFYLWACFPFYFLYLSRHDRGYIQMTPLNKTKTALGFLLWIVCWADLFYSFWERSRGIFLAPVFLVSPTLLGITMLLATFLIQLERRKGVQSSGIMLTFWLVALVCALAILRSKIMTALKEDAQVDLFRDITFYVYFSLLLIQLVLSCFSDRSPLFSETIHDPNPCPESSASFLSRITFWWITGLIVRGYRQPLEGSDLWSLNKEDTSEQVVPVLVKNWKKECAKTRKQPVKVVYSSKDPAQPKESSKVDANEEVEALIVKSPQKEWNPSLFKVLYKTFGPYFLMSFFFKAIHDLMMFSGPQILKLLIKFVNDTKAPDWQGYFYTVLLFVTACLQTLVLHQYFHICFVSGMRIKTAVIGAVYRKALVITNSARKSSTVGEIVNLMSVDAQRFMDLATYINMIWSAPLQVILALYLLWLNLGPSVLAGVAVMVLMVPVNAVMAMKTKTYQVAHMKSKDNRIKLMNEILNGIKVLKLYAWELAFKDKVLAIRQEELKVLKKSAYLSAVGTFTWVCTPFLVALCTFAVYVTIDENNILDAQTAFVSLALFNILRFPLNILPMVISSIVQASVSLKRLRIFLSHEELEPDSIERRPVKDGGGTNSITVRNATFTWARSDPPTLNGITFSIPEGALVAVVGQVGCGKSSLLSALLAEMDKVEGHVAIKGSVAYVPQQAWIQNDSLRENILFGCQLEEPYYRSVIQACALLPDLEILPSGDRTEIGEKGVNLSGGQKQRVSLARAVYSNADIYLFDDPLSAVDAHVGKHIFENVIGPKGMLKNKTRILVTHSMSYLPQVDVIIVMSGGKISEMGSYQELLARDGAFAEFLRTYASTEQEQDAEENGVTGVSGPGKEAKQMENGMLVTDSAGKQLQRYKN

SEQ ID NO: 99 - protein, 915 aa, Artificial Sequence; identical to SEQ ID NO: 98
  Synthetic polypeptide

SEQ ID NO: 100 - protein, 904 aa, Artificial Sequence
  Synthetic polypeptide
MALVLGSLLLLGLCGNSFSGGQPSSTDAPKAWNYELPATNYETQDSHKAGPIGILFELVHIFLYVVQPRDFPEDTLRKFLQKAYESKIDYDKPETVILGLKIVYYEAGIILCCVLGLLFIILMPLVGYFFCMCRCCNKCGGEMHQRQKENGPFLRKCFAISLLVICIIISIGIFYGFVANHQVRTRIKRSRKLADSNFKDLRTLLNETPEQIKYILAQYNTTKDKAFTDLNSINSVLGGGILDRLRPNIIPVLDEIKSMATAIKETKEALENMNSTLKSLHQQSTQLSSSLTSVKTSLRSSLNDPLCLVHPSSETCNSIRLSLSQLNSNPELRQLPPVDAELDNVNNVLRTDLDGLVQQGYQSLNDIPDRVQRQTTTVVAGIKRVLNSIGSDIDNVTQRLPIQDILSAFSVYVNNTESYIHRNLPTLEEYDSYWWLGGLVICSLLTLIVIFYYLGLLCGVCGYDRHATPTTRGCVSNTGGVFLMVGVGLSFLFCWILMIIVVLTFVFGANVEKLICEPYTSKELFRVLDTPYLLNEDWEYYLSGKLFNKSKMKLTFEQVYSDCKKNRGTYGTLHLQNSFNISEHLNINEHTGSISSELESLKVNLNIFLLGAAGRKNLQDFAACGIDRMNYDSYLAQTGKSPAGVNLLSFAYDLEAKANSLPPGNLRNSLKRDAQTIKTIHQQRVLPIEQSLSTLYQSVKILQRTGNGLLERVTRILASLDFAQNFITNNTSSVIIEETKKYGRTIIGYFEHYLQWIEFSISEKVASCKPVATALDTAVDVFLCSYIIDPLNLFWFGIGKATVFLLPALIFAVKLAKYYRRMDSEDVYDDVETIPMKNMENGNNGYHKDHVYGIHNPVMTSWPASAPPSPLPTVMSQMQKGESNVGAWGRSTLEGPRSTWEASS

SEQ ID NO: 101 - protein, 904 aa, Artificial Sequence; identical to SEQ ID NO: 100
  Synthetic polypeptide

SEQ ID NO: 102 - protein, 899 aa, Artificial Sequence
  Synthetic polypeptide
MDELKKEVSMDDHKLSLDELHRKYGTDLSRGLTSARAAEILARDGPNALTPPPTTPEWIKFCRQLFGGFSMLLWIGAILCFLAYSIQAATEEEPQNDNLYLGVVLSAVVIITGCFSYYQEAKSSKIMESFKNMVPQQALVIRNGEKMSINAEEVVVGDLVEVKGGDRIPADLRIISANGCKVDNSSLTGESEPQTRSPDFTNENPLETRNIAFFSTNCVEGTARGIVVYTGDRTVMGRIATLASGLEGGQTPIAAEIEHFIHIITGVAVFLGVSFFILSLILEYTWLEAVIFLIGIIVANVPEGLLATVTVCLTLTAKRMARKNCLVKNLEAVETLGSTSTICSDKTGTLTQNRMTVAHMWFDNQIHEADTTENQSGVSFDKTSATWLALSRIAGLCNRAVFQANQENLPILKRAVAGDASESALLKCIELCCGSVKEMRERYAKIVEIPFNSTNKYQLSIHKNPNTSEPQHLLVMKGAPERILDRCSSILLHGKEQPLDEELKDAFQNAYLELGGLGERVLGFCHLFLPDEQFPEGFQFDTDDVNFPIDNLCFVGLISMIDPPRAAVPDAVGKCRSAGIKVIMVTGDHPITAKAIAKGVGIISEGNETVEDIAARLNIPVSQVNPRDAKACVVHGSDLKDMTSEQLDDILKYHTEIVFARTSPQQKLIIVEGCQRQGAIVAVTGDGVNDSPALKKADIGVAMGIAGSDVSKQAADMILLDDNFASIVTGVEEGRLIFDNLKKSIAYTLTSNIPEITPFLIFIIANIPLPLGTVTILCIDLGTDMVPAISLAYEQAESDIMKRQPRNPKTDKLVNERLISMAYGQIGMIQALGGFFTYFVILAENGFLPIHLLGLRVDWDDRWINDVEDSYGQQWTYEQRKIVEFTCHTAFFVSIVAVQ

SEQ ID NO: 103 - protein, 895 aa, Artificial Sequence
  Synthetic polypeptide
MGPWGWKLRWTVALLLAAAGTAVGDRCERNEFQCQDGKCISYKWVCDGSAECQDGSDESQETCLSVTCKSGDFSCGGRVNRCIPQFWRCDGQVDCDNGSDEQGCPPKTCSQDEFRCHDGKCISRQFVCDSDRDCLDGSDEASCPVLTCGPASFQCNSSTCIPQLWACDNDPDCEDGSDEWPQRCRGLYVFQGDSSPCSAFEFHCLSGECIHSSWRCDGGPDCKDKSDEENCAVATCRPDEFQCSDGNCIHGSRQCDREYDCKDMSDEVGCVNVTLCEGPNKFKCHSGECITLDKVCNMARDCRDWSDEPIKECGTNECLDNNGGCSHVCNDLKIGYECLCPDGFQLVAQRRCEDIDECQDPDTCSQLCVNLEGGYKCQCEEGFQLDPHTKACKAVGSIAYLFFTNRHEVRKMTLDRSEYTSLIPNLRNVVALDTEVASNRIYWSDLSQRMICSTQLDRAHGVSSYDTVISRDIQAPDGLAVDWIHSNIYWTDSVLGTVSVADTKGVKRKTLFRENGSKPRAIVVDPVHGFMYWTDWGTPAKIKKGGLNGVDIYSLVTENIQWPNGITLDLLSGRLYWVDSKLHSISSIDVNGGNRKTILEDEKRLAHPFSLAVFEDKVFWTDIINEAIFSANRLTGSDVNLLAENLLSPEDMVLFHNLTQPRGVNWCERTTLSNGGCQYLCLPAPQINPHSPKFTCACPDGMLLARDMRSCLTEAEAAVATQETSTVRLKVSSTAVRTQHTTTRPVPDTSRLPGATPGLTTVEIVTMSHQALGDVAGRGNEKKPSSVRALSIVLPIATELGLWSRGQLCDRACLSLQCSSSSFAWGSSFYGRTGGLRTSTASTLTTPSIRRPQRMRSTFATTRTATATPRCLTPVIPALWEAELDHLSSGVGDQA

SEQ ID NO: 104 - protein, 895 aa, Artificial Sequence
  Synthetic polypeptide
MALVLGSLLLLGLCGNSFSGGQPSSTDAPKAWNYELPATNYETQDSHKAGPIGILFELVHIFLYVVQPRDFPEDTLRKFLQKAYESKIDYDKIVYYEAGIILCCVLGLLFIILMPLVGYFFCMCRCCNKCGGEMHQRQKENGPFLRKCFAISLLVICIIISIGIFYGFVANHQVRTRIKRSRKLADSNFKDLRTLLNETPEQIKYILAQYNTTKDKAFTDLNSINSVLGGGILDRLRPNIIPVLDEIKSMATAIKETKEALENMNSTLKSLHQQSTQLSSSLTSVKTSLRSSLNDPLCLVHPSSETCNSIRLSLSQLNSNPELRQLPPVDAELDNVNNVLRTDLDGLVQQGYQSLNDIPDRVQRQTTTVVAGIKRVLNSIGSDIDNVTQRLPIQDILSAFSVYVNNTESYIHRNLPTLEEYDSYWWLGGLVICSLLTLIVIFYYLGLLCGVCGYDRHATPTTRGCVSNTGGVFLMVGVGLSFLFCWILMIIVVLTFVFGANVEKLICEPYTSKELFRVLDTPYLLNEDWEYYLSGKLFNKSKMKLTFEQVYSDCKKNRGTYGTLHLQNSFNISEHLNINEHTGSISSELESLKVNLNIFLLGAAGRKNLQDFAACGIDRMNYDSYLAQTGKSPAGVNLLSFAYDLEAKANSLPPGNLRNSLKRDAQTIKTIHQQRVLPIEQSLSTLYQSVKILQRTGNGLLERVTRILASLDFAQNFITNNTSSVIIEETKKYGRTIIGYFEHYLQWIEFSISEKVASCKPVATALDTAVDVFLCSYIIDPLNLFWFGIGKATVFLLPALIFAVKLAKYYRRMDSEDVYDDVETIPMKNMENGNNGYHKDHVYGIHNPVMTSWPASAPPSPLPTVMSQMQKGESNVGAWGRSTLEGPRSTWEASS

SEQ ID NO: 105 - protein, 895 aa, Artificial Sequence; identical to SEQ ID NO: 104
  Synthetic polypeptide

SEQ ID NO: 106 - protein, 885 aa, Artificial Sequence
  Synthetic polypeptide
MSPGASRGPRGSQAPLIAPLCCAAAALGMLLWSPACQAFNLDVEKLTVYSGPKGSYFGYAVDFHIPDARTASVLVGAPKANTSQPDIVEGGAVYYCPWPAEGSAQCRQIPFDTTNNRKIRVNGTKEPIEFKSNQWFGATVKAHKGKVVACAPLYHWRTLKPTPEKDPVGTCYVAIQNFSAYAEFSPCRNSNADPEGQGYCQAGFSLDFYKNGDLIVGGPGSFYWQGQVITASVADIIANYSFKDILRKLAGEKQTEVAPASYDDSYLGYSVAAGEFTGDSQQELVAGIPRGAQNFGYVSIINSTDMTFIQNFTGEQMASYFGYTVVVSDVNSDGLDDVLVGAPLFMEREFESNPREVGQIYLYLQVSSLLFRDPQILTGTETFGRFGSAMAHLGDLNQDGYNDIAIGVPFAGKDQRGKVLIYNGNKDGLNTKPSQVLQGVWASHAVPSGFGFTLRGDSDIDKNDYPDLIVGAFGTGKVAVYRARPVVTVDAQLLLHPMIINLENKTCQVPDSMTSAACFSLRVCASVTGQSIANTIVLMAEVQLDSLKQKGAIKRTLFLDNHQAHRVFPLVIKRQKSHQCQDFIVYLRDETEFRDKLSPINISLNYSLDESTFKEGLEVKPILNYYRENIVSEQAHILVDCGEDNLCVPDLKLSARPDKHQVIIGDENHLMLIINARNEGEGAYEAELFVMIPEEADYVGIERNNKGFRPLSCEYKMENVTRMVVCDLGNPMVSGTNYSLGLRFAVPRLEKTNMSINFDLQIRSSNKDNPDSNFVSLQINITAVAQVEIRGVSHPPQIVLPIHNWEPEEEPHKEEEVGPLVEHIYELHNIGPSTISDTILEVGWPFSARDEFLLYIFHIQTLGPLQCQPNPNINPQDIKEHGSCL

SEQ ID NO: 107 - protein, 884 aa, Artificial Sequence
  Synthetic polypeptide
MEPRPTAPSSGAPGLAGVGETPSAAALAAARVELPGTAVPSVPEDAAPASRDGGGVRDEGPAAAGDGLGRPLGPTPSQSRFQVDLVSENAGRAAAAAAAAAAAAAAAGAGAGAKQTPADGEASGESEPAKGSEEAKGRFRVNFVDPAASSSAEDSLSDAAGVGVDGPNVSFQNGGDTVLSEGSSLHSGGGGGSGHHQHYYYDTHTNTYYLRTFGHNTMDAVPRIDHYRHTAAQLGEKLLRPSLAELHDELEKEPFEDGFANGEESTPTRDAVVTYTAESKGVVKFGWIKGVLVRCMLNIWGVMLFIRLSWIVGQAGIGLSVLVIMMATVVTTITGLSTSAIATNGFVRGGGAYYLISRSLGPEFGGAIGLIFAFANAVAVAMYVVGFAETVVELLKEHSILMIDEINDIRIIGAITVVILLGISVAGMEWEAKAQIVLLVILLLAIGDFVIGTFIPLESKKPKGFFGYKSEIFNENFGPDFREEETFFSVFAIFFPAATGILAGANISGDLADPQSAIPKGTLLAILITTLVYVGIAVSVGSCVVRDATGNVNDTIVTELTNCTSAACKLNFDFSSCESSPCSYGLMNNFQVMSMVSGFTPLISAGIFSATLSSALASLVSAPKIFQALCKDNIYPAFQMFAKGYGKNNEPLRGYILTFLIALGFILIAELNVIAPIISNFFLASYALINFSVFHASLAKSPGWRPAFKYYNMWISLLGAILCCIVMFVINWWAALLTYVIVLGLYIYVTYKKPDVNWGSSTQALTYLNALQHSIRLSGVEDHVKNFRPQCLVMTGAPNSRPALLHLVHDFTKNVGLMICGHVHMGPRRQAMKEMSIDQAKYQRWLIKNKMKAFYAPVHADDLREGAQYLMQCGPEKPKDWTPL

SEQ ID NO: 108 - protein, 884 aa, Artificial Sequence; identical to SEQ ID NO: 107
  Synthetic polypeptide

SEQ ID NO: 109 - protein, 884 aa, Artificial Sequence; identical to SEQ ID NO: 107
  Synthetic polypeptide

SEQ ID NO: 110 - protein, 884 aa, Artificial Sequence
  Synthetic polypeptide
MHSSWIPRGNYIESNRDDCTVSLIYAVHLKKSGYVFFEYQYVDNNIFFEFFIQNDQCQEMDTTTDKWVKLTDNGEWGSHSVMLKSGTNILYWRTTGILMGSKAVKPVLVKNITIEGVAYTSECFPCKPGTFSNKPGSFNCQVCPRNTYSEKGAKECIRCKDDSQFSEEGSSECTERPPCTTKDYFQIHTPCDEEGKTQIMYKWIEPKICREDLTDAIRLPPSGEKKDCPPCNPGFYNNGSSSCHPCPPGTFSDGTKECRPCPAGTEPALGFEYKWWNVLPGNMKTSCFNVGNSKCDGMNGWEVAGDHIQSGAGGSDNDYLILNLHIPGFKPPTSMTGATGSELGRITFVFETLCSADCVLYFMVDINRKSTNVVESWGGTKEKQAYTHIIFKNATFTFTWAFQRTNQGQDNRRFINDMVKIYSITATNAVDGVASSCRACALGSEQSGSSCVPCPPGHYIEKETNQCKECPPDTYLSIHQVYGKEACIPCGPGSKNNQDHSVCYSDCFFYHEKENQSLHYDFSNLSSVGSLMNGPSFTSKGTKYFHFFNISLCGHEGKKMALCTNNITDFTVKEIVAGSDDYTNLVGAFVCQSTIIPSESKGFRAALSSQSIILADTFIGVTVETTLKNINIKEDMFPVPTSQIPDVHFFYKSSTATTSCINGRSTAVKMRCNPTKSGAGVISVPSKCPAGTCDGCTFYFLWESAEACPLCTEHDFHEIEGACKRGFQETLYVWNEPKWCIKGISLPEKKLATCETVDFWLKVGAGVGAFTAVLLVALTCYFWKKNQKLEYKYSKLVMTTNSKECELPAADSCAIMEGEDNEEEVVYSNKQSLLGKLKSLATKKLPQSPQSSATTTLISQQPSTLRQDRQSAKRVWLAKGWDDC

SEQ ID NO: 111 - protein, 880 aa, Artificial Sequence
  Synthetic polypeptide
MKNIYCLIPKLVNFATLGCLWISVVQCTVLNSCLKSCVTNLGQQLDLGTPHNLSEPCIQGCHFWNSVDQKNCALKCRESCEVGCSSAEGAYEEEVLENADLPTAPFASSIGSHNMTLRWKSANFSGVKYIIQWKYAQLLGSWTYTKTVSRPSYVVKPLHPFTEYIFRVVWIFTAQLQLYSPPSPSYRTHPHGVPETAPLIRNIESSSPDTVEVSWDPPQFPGGPILGYNLRLISKNQKLDAGTQRTSFQFYSTLPNTIYRFSIAAVNEVGEGPEAESSITTSSSAVQQEEQWLFLSRKTSLRKRSLKHLVDEAHCLRLDAIYHNITGISVDVHQQIVYFSEGTLIWAKKAANMSDVSDLRIFYRGSGLISSISIDWLYQRMYFIMDELVCVCDLENCSNIEEITPPSISAPQKIVADSYNGYVFYLLRDGIYRADLPVPSGRCAEAVRIVESCTLKDFAIKPQAKRIIYFNDTAQVFMSTFLDGSASHLILPRIPFADVKSFACENNDFLVTDGKVIFQQDALSFNEFIVGCDLSHIEEFGFGNLVIFGSSSQLHPLPGRPQELSVLFGSHQALVQWKPPALAIGANVILISDIIELFELGPSAWQNWTYEVKVSTQDPPEVTHIFLNISGTMLNVPELQSAMKYKVSVRASSPKRPGPWSEPSVGTTLVPASEPPFIMAVKEDGLWSKPLNSFGPGEFLSSDIGNVSDMDWYNNSLYYSDTKGDVFVWLLNGTDISENYHLPSIAGAGALAFEWLGHFLYWAGKTYVIQRQSVLTGHTDIVTHVKLLVNDMVVDSVGGYLYWTTLYSVESTRLNGESSLVLQTQPWFSGKKVIALTLDLSDGLLYWLVQDSQCIHLYTAVLRGQRSTASLLRPVRPRTQ

SEQ ID NO: 112 - protein, 879 aa, Artificial Sequence
  Synthetic polypeptide
MLTRIENATQAQLPCLLVAGSGGAADCLAETLEDTLAPGSGGARQGEARDRIRRFFPKGDLEVLQAQSFHLEASLMDALLNDRPEFVRLLISHGLSLGHFLTPMRLAQLYSAAPSNSLIRNLLDQASHSAGTKAPALKGGAAELRPPDVGHVLRMLLGKMCAPRYPSGGAWDPHPGQGFGESMYLLSDKATSPLSLDAGLGQAPWSDLLLWALLLNRAQMAMYFWEMGSNAVSSALGACLLLRVMARLEPDAEEAARRKDLAFKFEGMGVDLFGECYRSSEVRAARLLLRRCPLWGDATCLQLAMQADARAFFAQDGVQSLLTQKWWGDMASTTPIWALVLAFFCPPLIYTRLITFRKSEEEPTREELEFDMDSVINGEGPVGTADPAEKTPLGVPRQSGRPGCCGGRCGGRRCLRRWFHFWGAPVTIFMGNVVSYLLFLLLFSRVLLVDFQPAPPGSLELLLYFWAFTLLCEELRQGLSGGGGSLASGGPGPGHASLSQRLRLYLADSWNQCDLVALTCFLLGVGCRLTPGLYHLGRTVLCIDFMVFTVRLLHIFTVNKQLGPKIVIVSKMMKDVFFFLFFLGVWLVAYGVATEGLLRPRDSDFPSILRRVFYRPYLQIFGQIPQEDMDVALMEHSNCSSEPGFWAHPPGAQAGTCVSQYANWLVVLLLVIFLLVANILLVNLLIAMFSYTFGKVQGNSDLYWKAQRYRLIREFHSRPALAPPFIVISHLRLLLRQLCRRPRSPQPSSPALEHFRVYLSKEAERKLLTWESVHKENFLLARARDKRESDSERLKRTSQKVDLALKQLGHIREYEQRLKVLEREVQQCSRVLGWVAEALSRSALLPPGGPPPPDLPGSKGPRDGAVSSLIALTLPRICK

SEQ ID NO: 113 - protein, 878 aa, Artificial Sequence
  Synthetic polypeptide
MALVLGSLLLLGLCGNSFSGGQPSSTDAPKAWNYELPATNYETQDSHKAGPIGILFELVHIFLYVVQPRDFPEDTLRKFLQKAYESKIDYDKPETVILGLKIVYYEAGIILCCVLGLLFIILMPLVGYFFCMCRCCNKCGGEMHQRQKENGPFLRKCFAISLLVICIIISIGIFYGFVANHQVRTRIKRSRKLADSNFKDLRTLLNETPEQIKYILAQYNTTKDKAFTDLNSINSVLGGGILDRLRPNIIPVLDEIKSMATAIKETKEALENMNSTLKSLHQQSTQLSSSLTSVKTSLRSSLNDPLCLVHPSSETCNSIRLSLSQLNSNPELRQLPPVDAELDNVNNVLRTDLDGLVQQGYQSLNDIPDRVQRQTTTVVAGIKRVLNSIGSDIDNVTQRLPIQDILSAFSVYVNNTESYIHRNLPTLEEYDSYWWLGGLVICSLLTLIVIFYYLGLLCGVCGYDRHATPTTRGCVSNTGGVFLMVGVGLSFLFCWILMIIVVLTFVFGANVEKLICEPYTSKELFRVLDTPYLLNEDWEYYLSGKLFNKSKMKLTFEQVYSDCKKNRGTYGTLHLQNSFNISEHLNINEHTGSISSELESLKVNLNIFLLGAAGRKNLQDFAACGIDRMNYDSYLAQTGKSPAGVNLLSFAYDLEAKANSLPPGNLRNSLKRDAQTIKTIHQQRVLPIEQSLSTLYQSVKILQRTGNGLLERVTRILASLDFAQNFITNNTSSVIIEETKKYGRTIIGYFEHYLQWIEFSISEKVASCKPVATALDTAVDVFLCSYIIDPLNLFWFGIGKATVFLLPALIFAVKLAKYYRRMDSEDVYDDVETIPMKNMENGNNGYHKDHVYGIHNPVMTSPHQMPAPGSWTSWPSEL

SEQ ID NO: 114 - protein, 878 aa, Artificial Sequence; identical to SEQ ID NO: 113
  Synthetic polypeptide

SEQ ID NO: 115 - protein, 875 aa, Artificial Sequence
  Synthetic polypeptide
MKNIYCLIPKLVNFATLGCLWISVVQCTVLNSCLKSCVTNLGQQLDLGTPHNLSEPCIQGCHFWNSVDQKNCALKCNDTYATVCERESCEVGCSSAEGAYEEEVLENADLPTAPFASSIGSHNMTLRWKSANFSGVKYIIQWKYAQLLGSWTYTKTVSRPSYVVKPLHPFTEYIFRVVWIFTAQLQLYSPPSPSYRTHPHGVPETAPLIRNIESSSPDTVEVSWDPPQFPGGPILGYNLRLISKNQKLDAGTQRTSFQFYSTLPNTIYRFSIAAVNEVGEGPEAESSITTSSSAVQQEEQWLFLSRKTSLRKRSLKHLVDEAHCLRLDAIYHNITGISVDVHQQIVYFSEGTLIWAKKAANMSDVSDLRIFYRGSGLISSISIDWLYQRMYFIMDELVCVCDLENCSNIEEITPPSISAPQKIVADSYNGYVFYLLRDGIYRADLPVPSGRCAEAVRIVESCTLKDFAIKPQAKRIIYFNDTAQVFMSTFLDGSASHLILPRIPFADVKSFACENNDFLVTDGKVIFQQDALSFNEFIVGCDLSHIEEFGFGNLVIFGSSSQLHPLPGRPQELSVLFGSHQALVQWKPPALAIGASPSAWQNWTYEVKVSTQDPPEVTHIFLNISGTMLNVPELQSAMKYKVSVRASSPKRPGPWSEPSVGTTLVPASEPPFIMAVKEDGLWSKPLNSFGPGEFLSSDIGNVSDMDWYNNSLYYSDTKGDVFVWLLNGTDISENYHLPSIAGAGALAFEWLGHFLYWAGKTYVIQRQSVLTGHTDIVTHVKLLVNDMVVDSVGGYLYWTTLYSVESTRLNGESSLVLQTQPWFSGKKVIALTLDLSDGLLYWLVQDSQCIHLYTAVLRGQRSTASLLRPVRPRTQ

SEQ ID NO: 116 - protein, 869 aa, Artificial Sequence
  Synthetic polypeptide
MALVLGSLLLLGLCGNSFSGGQPSSTDAPKAWNYELPATNYETQDSHKAGPIGILFELVHIFLYVVQPRDFPEDTLRKFLQKAYESKIDYDKIVYYEAGIILCCVLGLLFIILMPLVGYFFCMCRCCNKCGGEMHQRQKENGPFLRKCFAISLLVICIIISIGIFYGFVANHQVRTRIKRSRKLADSNFKDLRTLLNETPEQIKYILAQYNTTKDKAFTDLNSINSVLGGGILDRLRPNIIPVLDEIKSMATAIKETKEALENMNSTLKSLHQQSTQLSSSLTSVKTSLRSSLNDPLCLVHPSSETCNSIRLSLSQLNSNPELRQLPPVDAELDNVNNVLRTDLDGLVQQGYQSLNDIPDRVQRQTTTVVAGIKRVLNSIGSDIDNVTQRLPIQDILSAFSVYVNNTESYIHRNLPTLEEYDSYWWLGGLVICSLLTLIVIFYYLGLLCGVCGYDRHATPTTRGCVSNTGGVFLMVGVGLSFLFCWILMIIVVLTFVFGANVEKLICEPYTSKELFRVLDTPYLLNEDWEYYLSGKLFNKSKMKLTFEQVYSDCKKNRGTYGTLHLQNSFNISEHLNINEHTGSISSELESLKVNLNIFLLGAAGRKNLQDFAACGIDRMNYDSYLAQTGKSPAGVNLLSFAYDLEAKANSLPPGNLRNSLKRDAQTIKTIHQQRVLPIEQSLSTLYQSVKILQRTGNGLLERVTRILASLDFAQNFITNNTSSVIIEETKKYGRTIIGYFEHYLQWIEFSISEKVASCKPVATALDTAVDVFLCSYIIDPLNLFWFGIGKATVFLLPALIFAVKLAKYYRRMDSEDVYDDVETIPMKNMENGNNGYHKDHVYGIHNPVMTSPHQMPAPGSWTSWPSEL

SEQ ID NO: 117 - protein, 869 aa, Artificial Sequence; identical to SEQ ID NO: 116
  Synthetic polypeptide

SEQ ID NO: 118 - protein, 861 aa, Artificial Sequence
  Synthetic polypeptide
MGPWGWKLRWTVALLLAAAGTAVGDRCERNEFQCQDGKCISYKWVCDGSAECQDGSDESQETCLSVTCKSGDFSCGGRVNRCIPQFWRCDGQVDCDNGSDEQGCPPKTCSQDEFRCHDGKCISRQFVCDSDRDCLDGSDEASCPVLTCGPASFQCNSSTCIPQLWACDNDPDCEDGSDEWPQRCRGLYVFQGDSSPCSAFEFHCLSGECIHSSWRCDGGPDCKDKSDEENCAVATCRPDEFQCSDGNCIHGSRQCDREYDCKDMSDEVGCVNVTLCEGPNKFKCHSGECITLDKVCNMARDCRDWSDEPIKECGTNECLDNNGGCSHVCNDLKIGYECLCPDGFQLVAQRRCEDIDECQDPDTCSQLCVNLEGGYKCQCEEGFQLDPHTKACKAVGSIAYLFFTNRHEVRKMTLDRSEYTSLIPNLRNVVALDTEVASNRIYWSDLSQRMICSTQLDRAHGVSSYDTVISRDIQAPDGLAVDWIHSNIYWTDSVLGTVSVADTKGVKRKTLFRENGSKPRAIVVDPVHGFMYWTDWGTPAKIKKGGLNGVDIYSLVTENIQWPNGITLDLLSGRLYWVDSKLHSISSIDVNGGNRKTILEDEKRLAHPFSLAVFEDKVFWTDIINEAIFSANRLTGSDVNLLAENLLSPEDMVLFHNLTQPRGVNWCERTTLSNGGCQYLCLPAPQINPHSPKFTCACPDGMLLARDMRSCLTEAEAAVATQETSTVRLKVSSTAVRTQHTTTRPVPDTSRLPGATPGLTTVEIVTMSHQALGDVAGRGNEKKPSSVRALSIVLPIVLLVFLCLGVFLLWKNWRLKNINSINFDNPVYQKTTEDEVHICHNQDGYSYPSVPHACNPSTLGG

SEQ ID NO: 119 - protein, 861 aa, Artificial Sequence; identical to SEQ ID NO: 118
  Synthetic polypeptide

SEQ ID NO: 120 - protein, 859 aa, Artificial Sequence
  Synthetic polypeptide
MALRGFCSADGSDPLWDWNVTWNTSNPDFTKCFQNTVLVWVPCFYLWACFPFYFLYLSRHDRGYIQMTPLNKTKTALGFLLWIVCWADLFYSFWERSRGIFLAPVFLVSPTLLGITMLLATFLIQLERRKGVQSSGIMLTFWLVALVCALAILRSKIMTALKEDAQVDLFRDITFYVYFSLLLIQLVLSCFSDRSPLFSETIHDPNPCPESSASFLSRITFWWITGLIVRGYRQPLEGSDLWSLNKEDTSEQVVPVLVKNWKKECAKTRKQPVKVVYSSKDPAQPKESSKVDANEEVEALIVKSPQKEWNPSLFKVLYKTFGPYFLMSFFFKAIHDLMMFSGPQILKLLIKFVNDTKAPDWQGYFYTVLLFVTACLQTLVLHQYFHICFVSGMRIKTAVIGAVYRKALVITNSARKSSTVGEIVNLMSVDAQRFMDLATYINMIWSAPLQVILALYLLWLNLGPSVLAGVAVMVLMVPVNAVMAMKTKTYQVAHMKSKDNRIKLMNEILNGIKVLKLYAWELAFKDKVLAIRQEELKVLKKSAYLSAVGTFTWVCTPFLVALCTFAVYVTIDENNILDAQTAFVSLALFNILRFPLNILPMVISSIVQASVSLKRLRIFLSHEELEPDSIERRPVKDGGGTNSITVRNATFTWARSDPPTLNGITFSIPEGALVAVVGQVGCGKSSLLSALLAEMDKVEGHVAIKGSVAYVPQQAWIQNDSLRENILFGCQLEEPYYRSVIQACALLPDLEILPSGDRTEIGEKTRILVTHSMSYLPQVDVIIVMSGGKISEMGSYQELLARDGAFAEFLRTYASTEQEQDAEENGVTGVSGPGKEAKQMENGMLVTDSAGKQLQRYKN

SEQ ID NO: 121 - protein, 856 aa, Artificial Sequence
  Synthetic polypeptide
MALRGFCSADGSDPLWDWNVTWNTSNPDFTKCFQNTVLVWVPCFYLWACFPFYFLYLSRHDRGYIQMTPLNKTKTALGFLLWIVCWADLFYSFWERSRGIFLAPVFLVSPTLLGITMLLATFLIQLERRKGVQSSGIMLTFWLVALVCALAILRSKIMTALKEDAQVDLFRDITFYVYFSLLLIQLVLSCFSDRSPLFSETIHDPNPCPESSASFLSRITFWWITGLIVRGYRQPLEGSDLWSLNKEDTSEQVVPVLVKNWKKECAKTRKQPVKVVYSSKDPAQPKESSKVDANEEVEALIVKSPQKEWNPSLFKVLYKTFGPYFLMSFFFKAIHDLMMFSGPQILKLLIKFVNDTKAPDWQGYFYTVLLFVTACLQTLVLHQYFHICFVSGMRIKTAVIGAVYRKALVITNSARKSSTVGEIVNLMSVDAQRFMDLATYINMIWSAPLQVILALYLLWLNLGPSVLAGVAVMVLMVPVNAVMAMKTKTYQVAHMKSKDNRIKLMNEILNGIKVLKLYAWELAFKDKVLAIRQEELKVLKKSAYLSAVGTFTWVCTPFLVALCTFAVYVTIDENNILDAQTAFVSLALFNILRFPLNILPMVISSIVQASVSLKRLRIFLSHEELEPDSIERRPVKDGGGTNSITVRNATFTWARSDPPTLNGITFSIPEGALVAVVGQVGCGKSSLLSALLAEMDKVEGHVAIKGVNLSGGQKQRVSLARAVYSNADIYLFDDPLSAVDAHVGKHIFENVIGPKGMLKNKTRILVTHSMSYLPQVDVIIVMSGGKISEMGSYQELLARDGAFAEFLRTYASTEQEQDAEENGVTGVSGPGKEAKQMENGMLVTDSAGKQLQRYKN

SEQ ID NO: 122 - protein, 853 aa, Artificial Sequence
  Synthetic polypeptide
MCCSTHLFQPLQLAGGLEWPWSNLLCFLTPVKLHPEVWGLFPNQQSQEHAAFRFALSQLTEPPKLLPQIDIVNISDSFEMTYRFCSQFSKGVYAIFGFYERRTVNMLTSFCGALHVCFITPSFPVDTSNQFVLQLRPELQDALISIIDHYKWQKFVYIYDADRGLSVLQKVLDTAAEKNWQVTAVNILTTTEEGYRMLFQDLEKKKERLVVVDCESERLNAILGQIIKLEKNGIGYHYILANLGFMDIDLNKFKESGANVTGFQLVNYTDTIPAKIMQQWKNSDARDHTRVDWKRPKYTSALTYDGVKVMAEAFQSLRRQRIDISRRGNAGDCLANPAVPWGQGIDIQRALQQVRFEGLTGNVQFNEKGRRTNYTLHVIEMKHDGIRKIGYWNEDDKFVPAATDAQAGGDNSSVQNRTYIVTTILEDPYVMLKKNANQFEGNDRYEGYCVELAAEIAKHVGYSYRLEIVSDGKYGARDPDTKAWNGMVGELVYGRADVAVAPLTITLVREEVIDFSKPFMSLGISIMIKKPQKSKPGVFSFLDPLAYEIWMCIVFAYIGVSVVLFLVSRFSPYEWHSEEFEEGRDQTTSDQSNEFGIFNSLWFSLGAFMQQGCDISPRSLSGRIVGGVWWFFTLIIISSYTANLAAFLTVERMVSPIESAEDLAKQTEIAYGTLEAGSTKEFFRRSKIAVFEKMWTYMKSAEPSVFVRTTEEGMIRVRKSKGKYAYLLESTMNEYIEQRKPCDTMKVGGNLDSKGYGIATPKGSALRGPVNLAVLKLSEQGVLDKLKSKWWYDKGECGSKDSGSKDKTSALSLSNVAGVFYILIGGLGLAMLVALIEFCYKSRSESKRMKAPL

SEQ ID NO: 123 - protein, 853 aa, Artificial Sequence
  Synthetic polypeptide
MCCSTHLFQPLQLAGGLEWPWSNLLCFLTPVKLHPEVWGLFPNQQSQEHAAFRFALSQLTEPPKLLPQIDIVNISDSFEMTYRFCSQFSKGVYAIFGFYERRTVNMLTSFCGALHVCFITPSFPVDTSNQFVLQLRPELQDALISIIDHYKWQKFVYIYDADRGLSVLQKVLDTAAEKNWQVTAVNILTTTEEGYRMLFQDLEKKKERLVVVDCESERLNAILGQIIKLEKNGIGYHYILANLGFMDIDLNKFKESGANVTGFQLVNYTDTIPAKIMQQWKNSDARDHTRVDWKRPKYTSALTYDGVKVMAEAFQSLRRQRIDISRRGNAGDCLANPAVPWGQGIDIQRALQQVRFEGLTGNVQFNEKGRRTNYTLHVIEMKHDGIRKIGYWNEDDKFVPAATDAQAGGDNSSVQNRTYIVTTILEDPYVMLKKNANQFEGNDRYEGYCVELAAEIAKHVGYSYRLEIVSDGKYGARDPDTKAWNGMVGELVYGRADVAVAPLTITLVREEVIDFSKPFMSLGISIMIKKPQKSKPGVFSFLDPLAYEIWMCIVFAYIGVSVVLFLVSRFSPYEWHSEEFEEGRDQTTSDQSNEFGIFNSLWFSLGAFMQQGCDISPRSLSGRIVGGVWWFFTLIIISSYTANLAAFLTVERMVSPIESAEDLAKQTEIAYGTLEAGSTKEFFRRSKIAVFEKMWTYMKSAEPSVFVRTTEEGMIRVRKSKGKYAYLLESTMNEYIEQRKPCDTMKVGGNLDSKGYGIATPKGSALRNPVNLAVLKLNEQGLLDKLKNKWWYDKGECGSGGGDSKDKTSALSLSNVAGVFYILIGGLGLAMLVALIEFCYKSRSESKRMKAPL

SEQ ID NO: 124 - protein, 844 aa, Artificial Sequence
  Synthetic polypeptide
MGARSGARGALLLALLLCWDPRLSQAGTDSGSEVLPDSFPSAPAEPLPYFLQEPQDAYIVKNKPVELRCRAFPATQIYFKCNGEWVSQNDHVTQEGLDEATGLRVREVQIEVSRQQVEELFGLEDYWCQCVAWSSAGTTKSRRAYVRIAYLRKNFDQEPLGKEVPLDHEVLLQCRPPEGVPVAEVEWLKNEDVIDPTQDTNFLLTIDHNLIIRQARLSDTANYTCVAKNIVAKRRSTTATVIVYVNGGWSSWAEWSPCSNRCGRGWQKRTRTCTNPAPLNGGAFCEGQAFQKTACTTICPVDGAWTEWSKWSACSTECAHWRSRECMAPPPQNGGRDCSGTLLDSKNCTDGLCMQNKKTLSDPNSHLLEASGDAALYAGLVVAIFVVVAILMAVGVVVYRRNCRDFDTDITDSSAALTGGFHPVNFKTARPSNPQLLHPSVPPDLTASAGIYRGPVYALQDSTDKIPMTNSPLLDPLPSLKVKVYSSSTTGSGPGLADGADLLGVLPPGTYPSDFARDTHFLHLRSASLGSQQLLGLPRDPGSSVSGTFGCLGGRLSIPGTGVSLLVPNGAIPQGKFYEMYLLINKAESTLPLSEGTQTVLSPSVTCGPTGLLLCRPVILTMPHCAEVSARDWIFQLKTQAHQGHWEEVVTLDEETLNTPCYCQLEPRACHILLDQLGTYVFTGESYSRSAVKRLQLAVFAPALCTSLEYSLRVYCLEDTPVALKEVLELERTLGGYLVEEPKPLMFKDSYHNLRLSLHDLPHAHWRSKLLAKYQEIPFYHIWSGSQKALHCTFTLERHSLASTELTCKICVRQVEGEGQIFQLHTTLAETSLSTCTRGCMWIR

SEQ ID NO: 125 - protein, 843 aa, Artificial Sequence
  Synthetic polypeptide
MQHIFAFFCTGFLGAVVGANFPNNIQIGGLFPNQQSQEHAAFRFALSQLTEPPKLLPQIDIVNISDSFEMTYRFCSQFSKGVYAIFGFYERRTVNMLTSFCGALHVCFITPSFPVDTSNQFVLQLRPELQDALISIIDHYKWQKFVYIYDADRGLSVLQKVLDTAAEKNWQVTAVNILTTTEEGYRMLFQDLEKKKERLVVVDCESERLNAILGQIIKLEKNGIGYHYILANLGFMDIDLNKFKESGANVTGFQLVNYTDTIPAKIMQQWKNSDARDHTRVDWKRPKYTSALTYDGVKVMAEAFQSLRRQRIDISRRGNAGDCLANPAVPWGQGIDIQRALQQVRFEGLTGNVQFNEKGRRTNYTLHVIEMKHDGIRKIGYWNEDDKFVPAATDAQAGGDNSSVQNRTYIVTTILEDPYVMLKKNANQFEGNDRYEGYCVELAAEIAKHVGYSYRLEIVSDGKYGARDPDTKAWNGMVGELVYGRADVAVAPLTITLVREEVIDFSKPFMSLGISIMIKKPQKSKPGVFSFLDPLAYEIWMCIVFAYIGVSVVLFLVSRFSPYEWHSEEFEEGRDQTTSDQSNEFGIFNSLWFSLGAFMQQGCDISPRSLSGRIVGGVWWFFTLIIISSYTANLAAFLTVERMVSPIESAEDLAKQTEIAYGTLEAGSTKEFFRRSKIAVFEKMWTYMKSAEPSVFVRTTEEGMIRVRKSKGKYAYLLESTMNEYIEQRKPCDTMKVGGNLDSKGYGIATPKGSALRNPVNLAVLKLNEQGLLDKLKNKWWYDKGECGSGGGDSKDKTSALSLSNVAGVFYILIGGLGLAMLVALIEFCYKSRSESKRMKAPL

SEQ ID NO: 126 - protein, 843 aa, Artificial Sequence
  Synthetic polypeptide
MQHIFAFFCTGFLGAVVGANFPNNIQIGGLFPNQQSQEHAAFRFALSQLTEPPKLLPQIDIVNISDSFEMTYRFCSQFSKGVYAIFGFYERRTVNMLTSFCGALHVCFITPSFPVDTSNQFVLQLRPELQDALISIIDHYKWQKFVYIYDADRGLSVLQKVLDTAAEKNWQVTAVNILTTTEEGYRMLFQDLEKKKERLVVVDCESERLNAILGQIIKLEKNGIGYHYILANLGFMDIDLNKFKESGANVTGFQLVNYTDTIPAKIMQQWKNSDARDHTRVDWKRPKYTSALTYDGVKVMAEAFQSLRRQRIDISRRGNAGDCLANPAVPWGQGIDIQRALQQVRFEGLTGNVQFNEKGRRTNYTLHVIEMKHDGIRKIGYWNEDDKFVPAATDAQAGGDNSSVQNRTYIVTTILEDPYVMLKKNANQFEGNDRYEGYCVELAAEIAKHVGYSYRLEIVSDGKYGARDPDTKAWNGMVGELVYGRADVAVAPLTITLVREEVIDFSKPFMSLGISIMIKKPQKSKPGVFSFLDPLAYEIWMCIVFAYIGVSVVLFLVSRFSPYEWHSEEFEEGRDQTTSDQSNEFGIFNSLWFSLGAFMQQGCDISPRSLSGRIVGGVWWFFTLIIISSYTANLAAFLTVERMVSPIESAEDLAKQTEIAYGTLEAGSTKEFFRRSKIAVFEKMWTYMKSAEPSVFVRTTEEGMIRVRKSKGKYAYLLESTMNEYIEQRKPCDTMKVGGNLDSKGYGIATPKGSALRGPVNLAVLKLSEQGVLDKLKSKWWYDKGECGSKDSGSKDKTSALSLSNVAGVFYILIGGLGLAMLVALIEFCYKSRSESKRMKAPL

SEQ ID NO: 127 - protein, 835 aa, Artificial Sequence
  Synthetic polypeptide
MKIIFPILSNPVFRRTVKLLLCLLWIGYSQGTTHVLRFGGIFEYVESGPMGAEELAFRFAVNTINRNRTLLPNTTLTYDTQKINLYDSFEASKKACDQLSLGVAAIFGPSHSSSANAVQSICNALGVPHIQTRWKHQVSDNKDSFYVSLYPDFSSLSRAILDLVQFFKWKTVTVVYDDSTGLIRLQELIKAPSRYNLRLKIRQLPADTKDAKPLLKEMKRGKEFHVIFDCSHEMAAGILKQALAMGMMTEYYHYIFTTLDLFALDVEPYRYSGVNMTGFRILNTENTQVSSIIEKWSMERLQAPPKPDSGLLDGFMTTDAALMYDAVHVVSVAVQQFPQMTVSSLQCNRHKPWRFGTRFMSLIKEAHWEGLTGRITFNKTNGLRTDFDLDVISLKEEGLEKIGTWDPASGLNMTESQKGKPANITDSLSNRSLIVTTILEEPYVLFKKSDKPLYGNDRFEGYCIDLLRELSTILGFTYEIRLVEDGKYGAQDDANGQWNGMVRELIDHKADLAVAPLAITYVREKVIDFSKPFMTLGISILYRKPNGTNPGVFSFLNPLSPDIWMYILLAYLGVSCVLFVIARFSPYEWYNPHPCNPDSDVVENNFTLLNSFWFGVGALMQQGSELMPKALSTRIVGGIWWFFTLIIISSYTANLAAFLTVERMESPIDSADDLAKQTKIEYGAVEDGATMTFFKKSKISTYDKMWAFMSSRRQSVLVKSNEEGIQRVLTSDYAFLMESTTIEFVTQRNCNLTQIGGLIDSKGYGVGTPMGSVAYACNLSTLGGRAGWITRSGVRDQPGQHGETPSLLKIQKISWAWWCEPVIPATQEGEAGELL

SEQ ID NO: 128 - protein, 835 aa, Artificial Sequence; identical to SEQ ID NO: 127
  Synthetic polypeptide

SEQ ID NO: 129 - protein, 835 aa, Artificial Sequence; identical to SEQ ID NO: 127
  Synthetic polypeptide

SEQ ID NO: 130 - protein, 835 aa, Artificial Sequence; identical to SEQ ID NO: 127
  Synthetic polypeptide

SEQ ID NO: 131 - protein, 833 aa, Artificial Sequence
  Synthetic polypeptide
MGARSGARGALLLALLLCWDPRLSQAGTDSGSEVLPDSFPSAPAEPLPYFLQEPQDAYIVKNKPVELRCRAFPATQIYFKCNGEWVSQNDHVTQEGLDEATGLRVREVQIEVSRQQVEELFGLEDYWCQCVAWSSAGTTKSRRAYVRIAYLRKNFDQEPLGKEVPLDHEVLLQCRPPEGVPVAEVEWLKNEDVIDPTQDTNFLLTIDHNLIIRQARLSDTANYTCVAKNIVAKRRSTTATVIVYVNGGWSSWAEWSPCSNRCGRGWQKRTRTCTNPAPLNGGAFCEGQAFQKTACTTICPVDGAWTEWSKWSACSTECAHWRSRECMAPPPQNGGRDCSGTLLDSKNCTDGLCMQMLEASGDAALYAGLVVAIFVVVAILMAVGVVVYRRNCRDFDTDITDSSAALTGGFHPVNFKTARPSNPQLLHPSVPPDLTASAGIYRGPVYALQDSTDKIPMTNSPLLDPLPSLKVKVYSSSTTGSGPGLADGADLLGVLPPGTYPSDFARDTHFLHLRSASLGSQQLLGLPRDPGSSVSGTFGCLGGRLSIPGTGVSLLVPNGAIPQGKFYEMYLLINKAESTLPLSEGTQTVLSPSVTCGPTGLLLCRPVILTMPHCAEVSARDWIFQLKTQAHQGHWEEVVTLDEETLNTPCYCQLEPRACHILLDQLGTYVFTGESYSRSAVKRLQLAVFAPALCTSLEYSLRVYCLEDTPVALKEVLELERTLGGYLVEEPKPLMFKDSYHNLRLSLHDLPHAHWRSKLLAKYQEIPFYHIWSGSQKALHCTFTLERHSLASTELTCKICVRQVEGEGQIFQLHTTLAETSLSTCTRGCMWIR

SEQ ID NO: 132 - protein, 829 aa, Artificial Sequence
  Synthetic polypeptide
MARSPGRAYALLLLLICFNVGSGLHLQVLSTRNENKLLPKHPHLVRQKRAWITAPVALREGEDLSKKNPIAKIHSDLAEERGLKITYKYTGKGITEPPFGIFVFNKDTGELNVTSILDREETPFFLLTGYALDARGNNVEKPLELRIKVLDINDNEPVFTQDVFVGSVEELSAAHTLVMKINATDADEPNTLNSKISYRIVSLEPAYPPVFYLNKDTGEIYTTSVTLDREEHSSYTLTVEARDGNGEVTDKPVKQAQVQIRILDVNDNIPVVENKVLEGMVEENQVNVEVTRIKVFDADEIGSDNWLANFTFASGNEGGYFHIETDAQTNEGIVTLIKEVDYEEMKNLDFSVIVANKAAFHKSIRSKYKPTPIPIKVKVKNVKEGIHFKSSVISIYVSESMDRSSKGQIIGNFQAFDEDTGLPAHARYVKLEDRDNWISVDSVTSEIKLAKLPDFESRYVQNGTYTVKIVAISEDYPRKTITGTVLINVEDINDNCPTLIEPVQTICHDAEYVNVTAEDLDGHPNSGPFSFSVIDKPPGMAEKWKIARQESTSVLLQQSEKKLGRSEIQFLISDNQGFSCPEKQVLTLTVCECLHGSGCREAQHDSYVGLGPAAIALMILAFLLLLLVPLLLLMCHCGKGAKGFTPIPGTIEMLHPWNNEGAPPEDKVVPSFLPVDQGGSLVGRNGVGGMAKEATMKGSSSASIVKGQHEMSEMDGRWEEHRSLLSGRATQFTGATGAIMTTETTKTARATGASRDMAGAQAAAVALNEEFLRNYFTDKAASYTEEDENHTAKDCLLVYSQEETESLNASIGCCSEPRSHHCTPVWATE

SEQ ID NO: 133 - protein, 825 aa, Artificial Sequence
  Synthetic polypeptide
MNLQPIFWIGLISSVCCVFAQTDENRCLKANAKSCGECIQAGPNCGWCTNSTFLQEGMPTSARCDDLEALKKKGCPPDDIENPRGSKDIKKNKNVTNRSKGTAEKLKPEDITQIQPQQLVLRLRSGEPQTFTLKFKRAEDYPIDLYYLMDLSYSMKDDLENVKSLGTDLMNEMRRITSDFRIGFGSFVEKTVMPYISTTPAKLRNPCTSEQNCTSPFSYKNVLSLTNKGEVFNELVGKQRISGNLDSPEGGFDAIMQVAVCGSLIGWRNVTRLLVFSTDAGFHFAGDGKLGGIVLPNDGQCHLENNMYTMSHYYDYPSIAHLVQKLSENNIQTIFAVTEEFQPVYKELKNLIPKSAVGTLSANSSNVIQLIIDAYNSLSSEVILENGKLSEGVTISYKSYCKNGVNGTGENGRKCSNISIGDEVQFEISITSNKCPKKDSDSFKIRPLGFTEEVEVILQYICECECQSEGIPESPKCHEGNGTFECGACRCNEGRVGRHCECSTDEVNSEDMDAYCRKENSSEICSNNGECVCGQCVCRKRDNTNEIYSGKFCECDNFNCDRSNGLICGGNGVCKCRVCECNPNYTGSACDCSLDTSTCEASNGQICNGRGICECGVCKCTDPKFQGQTCEMCQTCLGVCAEHKECVQCRAFNKGEKKDTCTQECSYFNITKVESRDKLPQPVQPDPVSHCKEKDVDDCWFYFTYSVNGNNEVMVHVVENPECPTGPDIIPIVAGVVAGIVLIGLALLLIWKLLMIIHDRREFAKFEKEKMNAKWDTIYSPTFSSYCMFQRVNLQRVNQWACLLSGFQVNSASGTMAGDQREEIQ

SEQ ID NO: 134 - protein, 825 aa, Artificial Sequence; identical to SEQ ID NO: 133
  Synthetic polypeptide

SEQ ID NO: 135 - protein, 825 aa, Artificial Sequence; identical to SEQ ID NO: 133
  Synthetic polypeptide

SEQ ID NO: 136 - protein, 825 aa, Artificial Sequence; identical to SEQ ID NO: 133
  Synthetic polypeptide

SEQ ID NO: 137 - protein, 820 aa, Artificial Sequence
  Synthetic polypeptide
MGPWGWKLRWTVALLLAAAGTAVGDRCERNEFQCQDGKCISYKWVCDGSAECQDGSDESQETCSPKTCSQDEFRCHDGKCISRQFVCDSDRDCLDGSDEASCPVLTCGPASFQCNSSTCIPQLWACDNDPDCEDGSDEWPQRCRGLYVFQGDSSPCSAFEFHCLSGECIHSSWRCDGGPDCKDKSDEENCAVATCRPDEFQCSDGNCIHGSRQCDREYDCKDMSDEVGCVNVTLCEGPNKFKCHSGECITLDKVCNMARDCRDWSDEPIKECGTNECLDNNGGCSHVCNDLKIGYECLCPDGFQLVAQRRCEDIDECQDPDTCSQLCVNLEGGYKCQCEEGFQLDPHTKACKAVGSIAYLFFTNRHEVRKMTLDRSEYTSLIPNLRNVVALDTEVASNRIYWSDLSQRMICSTQLDRAHGVSSYDTVISRDIQAPDGLAVDWIHSNIYWTDSVLGTVSVADTKGVKRKTLFRENGSKPRAIVVDPVHGFMYWTDWGTPAKIKKGGLNGVDIYSLVTENIQWPNGITLDLLSGRLYWVDSKLHSISSIDVNGGNRKTILEDEKRLAHPFSLAVFEDKVFWTDIINEAIFSANRLTGSDVNLLAENLLSPEDMVLFHNLTQPRGVNWCERTTLSNGGCQYLCLPAPQINPHSPKFTCACPDGMLLARDMRSCLTEAEAAVATQETSTVRLKVSSTAVRTQHTTTRPVPDTSRLPGATPGLTTVEIVTMSHQALGDVAGRGNEKKPSSVRALSIVLPIVLLVFLCLGVFLLWKNWRLKNINSINFDNPVYQKTTEDEVHICHNQDGYSYPSVPHACNPSTLGG

SEQ ID NO: 138 - protein, 813 aa, Artificial Sequence
  Synthetic polypeptide
MAMRSGRHPSLLLLLVLLLWLLQVSIIDSVQQETDDLTKQTKEKIYQPLRRSKRRWVITTLELEEEDPGPFPKLIGELFNNMSYNMSLMYLISGPGVDEYPEIGLFSLEDHENGRIYVHRPVDREMTPSFTVYFDVVERSTGKIVDTSLIFNIRISDVNDHAPQFPEKEFNITVQENQSAGQPIFQMLAVDLDEENTPNSQVLYFLISQTPLLKESGFRVDRLSGEIRLSGCLDYETAPQFTLLIRARDCGEPSLSSTTTVHVDVQEGNNHRPAFTQENYKVQIPEGRASQGVLRLLVQDRDSPFTSAWRAKFNILHGNEEGHFDISTDPETNEGILNVIKPLDYETRPAQSLIIVVENEERLVFCERGKLQPPRKAAASATVSVQVTDANDPPAFHPQSFIVNKEEGARPGTLLGTFNAMDPDSQIRYELVHDPANWVSVDKNSGVVITVEPIDRESPHVNNSFYVIIIHAVDDGFPPQTATGTLMLFLSDINDNVPTLRPRSRYMEVCESAVHEPLHIEAEDPDLEPFSDPFTFELDNTWGNAEDTWKLGRNWGQSVELLTLRSLPRGNYLVPLFIGDKQGLSQKQTVHVRICPCASGLTCVELADAEVGLHVGALFPVCAAFVALAVALLFLLRCYFVLEPKRHGCSVSNDEGHQTLVMYNAESKGTSAQTWSDVEGQRPALLICTAAAGPTQGVKDLEEVPPSAASQSAQARCALGSWGYGKPFEPRSVKNIHSTPAYPDATMHRQLLAPVEGRMAETLNQAGCRPEGGLSAELGKGGIHSGILCWKEPESLTLAGQKGLDPQTFTKEK

SEQ ID NO: 139 - protein, 811 aa, Artificial Sequence
  Synthetic polypeptide
MLEGNYQVMLKSGTNILYWRTTGILMGSKAVKPVLVKNITIEGVAYTSECFPCKPGTFSNKPGSFNCQVCPRNTYSEKGAKECIRCKDDSQFSEEGSSECTERPPCTTKDYFQIHTPCDEEGKTQIMYKWIEPKICREDLTDAIRLPPSGEKKDCPPCNPGFYNNGSSSCHPCPPGTFSDGTKECRPCPAGTEPALGFEYKWWNVLPGNMKTSCFNVGNSKCDGMNGWEVAGDHIQSGAGGSDNDYLILNLHIPGFKPPTSMTGATGSELGRITFVFETLCSADCVLYFMVDINRKSTNVVESWGGTKEKQAYTHIIFKNATFTFTWAFQRTNQGQDNRRFINDMVKIYSITATNAVDGVASSCRACALGSEQSGSSCVPCPPGHYIEKETNQCKECPPDTYLSIHQVYGKEACIPCGPGSKNNQDHSVCYSDCFFYHEKENQSLHYDFSNLSSVGSLMNGPSFTSKGTKYFHFFNISLCGHEGKKMALCTNNITDFTVKEIVAGSDDYTNLVGAFVCQSTIIPSESKGFRAALSSQSIILADTFIGVTVETTLKNINIKEDMFPVPTSQIPDVHFFYKSSTATTSCINGRSTAVKMRCNPTKSGAGVISVPSKCPAGTCDGCTFYFLWESAEACPLCTEHDFHEIEGACKRGFQETLYVWNEPKWCIKGISLPEKKLATCETVDFWLKVGAGVGAFTAVLLVALTCYFWKKNQKLEYKYSKLVMTTNSKECELPAADSCAIMEGEDNEEEVVYSNKQSLLGKLKSLATKKLPQSPQSSATTTLISQQPSTLRQDRQSAKRVWLAKGWDDC

SEQ ID NO: 140 - protein, 800 aa, Artificial Sequence
  Synthetic polypeptide
MALRGFCSADGSDPLWDWNVTWNTSNPDFTKCFQNTVLVWVPCFYLWACFPFYFLYLSRHDRGYIQMTPLNKTKTALGFLLWIVCWADLFYSFWERSRGIFLAPVFLVSPTLLGITMLLATFLIQLERRKGVQSSGIMLTFWLVALVCALAILRSKIMTALKEDAQVDLFRDITFYVYFSLLLIQLVLSCFSDRSPLFSETIHDPNPCPESSASFLSRITFWWITGLIVRGYRQPLEGSDLWSLNKEDTSEQVVPVLVKNWKKECAKTRKQPVKVVYSSKDPAQPKESSKVDANEEVEALIVKSPQKEWNPSLFKVLYKTFGPYFLMSFFFKAIHDLMMFSGPQILKLLIKFVNDTKAPDWQGYFYTVLLFVTACLQTLVLHQYFHICFVSGMRIKTAVIGAVYRKALVITNSARKSSTVGEIVNLMSVDAQRFMDLATYINMIWSAPLQVILALYLLWLNLGPSVLAGVAVMVLMVPVNAVMAMKTKTYQVAHMKSKDNRIKLMNEILNGIKVLKLYAWELAFKDKVLAIRQEELKVLKKSAYLSAVGTFTWVCTPFLVALCTFAVYVTIDENNILDAQTAFVSLALFNILRFPLNILPMVISSIVQASVSLKRLRIFLSHEELEPDSIERRPVKDGGGTNSITVRNATFTWARSDPPTLNGITFSIPEGALVAVVGQVGCGKSSLLSALLAEMDKVEGHVAIKTRILVTHSMSYLPQVDVIIVMSGGKISEMGSYQELLARDGAFAEFLRTYASTEQEQDAEENGVTGVSGPGKEAKQMENGMLVTDSAGKQLQRYKN

SEQ ID NO: 141 - protein, 787 aa, Artificial Sequence
  Synthetic polypeptide
MGSGGSDSYRIATSQDKKDDKDSPKKNKGKERRDLDDLKKEVAMTEHKMSVEEVCRKYNTDCVQGLTHSKAQEILARDGPNALTPPPTTPEWVKFCRQLFGGFSILLWIGAILCFLAYGIQAGTEDDPSGDNLYLGIVLAAVVIITGCFSYYQEAKSSKIMESFKNMVPQQALVIREGEKMQVNAEEVVVGDLVEIKGGDRVPADLRIISAHGCKVDNSSLTGESEPQTRSPDCTHDNPLETRNITFFSTNCVEGTARGVVVATGDRTVMGRIATLASGLEVGKTPIAIEIEHFIQLITGVAVFLGVSFFILSLILGYTWLEAVIFLIGIIVANVPEGLLATVTVCLTLTAKRMARKNCLVKNLEAVETLGSTSTICSDKTGTLTQNRMTVAHMWFDNQIHEADTTEDQSGTSFDKSSHTWVALSHIAGLCNRAVFKGGQDNIPVLKRDVAGDASESALLKCIELSSGSVKLMRERNKKVAEIPFNSTNKYQLSIHETEDPNDNRYLLVMKGAPERILDRCSTILLQGKEQPLDEEMKEAFQNAYLELGGLGERVLGFCHYYLPEEQFPKGFAFDCDDVNFTTDNLCFVGLMSMIDPPRAAVPDAVGKCRSAGIKVIMVTGDHPITAKAIAKGVGIISEGNETVEDIAARLNIPVSQVNPRDAKACVIHGTDLKDFTSEQIDEILQNHTEIVFARTSPQQKLIIVEGCQRQGAIVAVTGDGVNDSPALKKADIGVAMGIAGSDVSKQAADMILLDDNFASIVTGAEEGRSRGQEIETMQANTVKPRL

SEQ ID NO: 142 - protein, 787 aa, Artificial Sequence
  Synthetic polypeptide
MDDVLPLMPWETLLAQGSPQGSPDLPAGQRKQQPQGDRAQGLASESWKLLEVPIIHITPSSDGESPACTPTPRRRQQQRMPDPQSLSQDSTTPHSGRSTPSSSPSLRKRLQLLPPSRPPPEPEPGTMVEKGSDSSSEKGGVPGTPSTQSLGSRNFIRNSKKMQSWYSMLSPTYKQRNEDFRKLFSKLPEAERLIVDYSCALQREILLQGRLYLSENWICFYSNIFRWETTISIQLKEVTCLKKEKTAKLIPNAIQICTESEKHFFTSFGARDRCFLLIFRLWQNALLEKTLSPRELWHLVHQCYGSELGLTSEDEDYVSPLQLNGLGTPKEVGDVIALSDITSSGAADRSQEPSPVGSRRGHVTPNLSRASSDADHGAEEDKEEQVDSQPDASSSQTVTPVAEPPSTEPTQPDGPTTLGPLDLLPSEELLTDTSNSSSSTGEEADLAALLPDLSGRLLINSVFHVGAERLQQMLFSDSPFLQGFLQQCKFTDVTLSPWSGDSKCHQRRVLTYTIPISNPLGPKSASVVETQTLFRRGPQAGGCVVDSEVLTQGIPYQDYFYTAHRYCILGLARNKARLRVSSEIRYRKQPWSLVKSLIEKNSWSGIEDYFHHLERELAKAEKLSLEEGGKDARGLLSGLRRRKRPLSWRAHGDGPQHPDPDPCARAGIHTSGSLSSRFSEPSVDQGPGAGIPSALVLISIVLIILIALNVLLFYRLWSLERTAHTFESWHSLALAKGKFPQTATEWAEILALQKQFHSVEVHKWRQILRASVELLDEHCRGKHGSMD

SEQ ID NO: 143 - protein, 786 aa, Artificial Sequence
  Synthetic polypeptide
MGAEELAFRFAVNTINRNRTLLPNTTLTYDTQKINLYDSFEASKKACDQLSLGVAAIFGPSHSSSANAVQSICNALGVPHIQTRWKHQVSDNKDSFYVSLYPDFSSLSRAILDLVQFFKWKTVTVVYDDSTGLIRLQELIKAPSRYNLRLKIRQLPADTKDAKPLLKEMKRGKEFHVIFDCSHEMAAGILKQALAMGMMTEYYHYIFTTLDLFALDVEPYRYSGVNMTGFRILNTENTQVSSIIEKWSMERLQAPPKPDSGLLDGFMTTDAALMYDAVHVVSVAVQQFPQMTVSSLQCNRHKPWRFGTRFMSLIKEAHWEGLTGRITFNKTNGLRTDFDLDVISLKEEGLEKIGTWDPASGLNMTESQKGKPANITDSLSNRSLIVTTILEEPYVLFKKSDKPLYGNDRFEGYCIDLLRELSTILGFTYEIRLVEDGKYGAQDDANGQWNGMVRELIDHKADLAVAPLAITYVREKVIDFSKPFMTLGISILYRKPNGTNPGVFSFLNPLSPDIWMYILLAYLGVSCVLFVIARFSPYEWYNPHPCNPDSDVVENNFTLLNSFWFGVGALMQQGSELMPKALSTRIVGGIWWFFTLIIISSYTANLAAFLTVERMESPIDSADDLAKQTKIEYGAVEDGATMTFFKKSKISTYDKMWAFMSSRRQSVLVKSNEEGIQRVLTSDYAFLMESTTIEFVTQRNCNLTQIGGLIDSKGYGVGTPMGSVAYACNLSTLGGRAGWITRSGVRDQPGQHGETPSLLKIQKISWAWWCEPVIPATQEGEAGELL

SEQ ID NO: 144 - protein, 785 aa, Artificial Sequence
  Synthetic polypeptide
MGGWEEERNRRATDKKDDKDSPKKNKGKERRDLDDLKKEVAMTEHKMSVEEVCRKYNTDCVQGLTHSKAQEILARDGPNALTPPPTTPEWVKFCRQLFGGFSILLWIGAILCFLAYGIQAGTEDDPSGDNLYLGIVLAAVVIITGCFSYYQEAKSSKIMESFKNMVPQQALVIREGEKMQVNAEEVVVGDLVEIKGGDRVPADLRIISAHGCKVDNSSLTGESEPQTRSPDCTHDNPLETRNITFFSTNCVEGTARGVVVATGDRTVMGRIATLASGLEVGKTPIAIEIEHFIQLITGVAVFLGVSFFILSLILGYTWLEAVIFLIGIIVANVPEGLLATVTVCLTLTAKRMARKNCLVKNLEAVETLGSTSTICSDKTGTLTQNRMTVAHMWFDNQIHEADTTEDQSGTSFDKSSHTWVALSHIAGLCNRAVFKGGQDNIPVLKRDVAGDASESALLKCIELSSGSVKLMRERNKKVAEIPFNSTNKYQLSIHETEDPNDNRYLLVMKGAPERILDRCSTILLQGKEQPLDEEMKEAFQNAYLELGGLGERVLGFCHYYLPEEQFPKGFAFDCDDVNFTTDNLCFVGLMSMIDPPRAAVPDAVGKCRSAGIKVIMVTGDHPITAKAIAKGVGIISEGNETVEDIAARLNIPVSQVNPRDAKACVIHGTDLKDFTSEQIDEILQNHTEIVFARTSPQQKLIIVEGCQRQGAIVAVTGDGVNDSPALKKADIGVAMGIAGSDVSKQAADMILLDDNFASIVTGAEEGRSRGQEIETMQANTVKPRL

SEQ ID NO: 145 - protein, 782 aa, Artificial Sequence
  Synthetic polypeptide
MWLVTFLLLLDSLHKARPEDVGTSLYFVNDSLQQLPCTASGYPIPAIRWLKDGRPLPADSRWTKRITGLTISDLRTEDSGTYICEVTNTFGSAEATGILMVIDPLHVTLTPKKLKTGIGSTVILSCALTGSPEFTIRWYRNTELVLPDEAISIRGLSNETLLITSAQKSHSGAYQCFATRKAQTAQDFAIIALEDGTPRIVSSFSEKVVNPGEQFSLMCAAKGAPPPTVTWALDDEPIVRDGSHRTNQYTMSDGTTISHMNVTGPQIRDGGVYRCTARNLVGSAEYQARINVRGPPSIRAMRNITAVAGRDTLINCRVIGYPYYSIKWYKDALLLPDNHRQVVFENGTLKLTDVQKGMDEGEYLCSVLIQPQLSISQSVHVAVKVPPLIQPFEFPPASIGQLLYIPCVVSSGDMPIRITWRKDGQVIISGSGVTIESKEFMSSLQISSVSLKHNGNYTCIASNAAATVSRERQLIVRVPPRFVVQPNNQDGIYGKAGVLNCSVDGYPPPKVMWKHAKGSGNPQQYHPVPLTGRIQILPNSSLLIRHVLEEDIGYYLCQASNGVGTDISKSMFLTVKIPAMITSHPNTTIAIKGHAKELNCTARGERPIIIRWEKGDTVIDPDRVMRYAIATKDNGDEVVSTLKLKPADRGDSVFFSCHAINSYGEDRGLIQLTVQEPPDPPELEIREVKARSMNLRWTQRFDGNSIITGFDIEYKNKSDSWDFKQSTRNISPTINQANIVDLHPASVYSIRMYSFNKIGRSEPSKELTISTEEAAGRGGACL

SEQ ID NO: 146 - protein, 779 aa, Artificial Sequence
  Synthetic polypeptide
MGLPRGPLASLLLLQVCWLQCAASEPCRAVFREAEVTLEAGGAEQEPGQALGKVFMGCPGQEPALFSTDNDDFTVRNGETVQERRSLKERNPLKIFPSKRILRRHKRDWVVAPISVPENGKGPFPQRLNQLKSNKDRDTKIFYSITGPGADSPPEGVFAVEKETGWLLLNKPLDREEIAKYELFGHAVSENGASVEDPMNISIIVTDQNDHKPKFTQDTFRGSVLEGVLPGTSVMQVTATDEDDAIYTYNGVVAYSIHSQEPKDPHDLMFTIHRSTGTISVISSGLDREKVPEYTLTIQATDMDGDGSTTTAVAVVEILDANDNAPMFDPQKYEAHVPENAVGHEVQRLTVTDLDAPNSPAWRATYLIMGGDDGDHFTITTHPESNQGILTTRKGLDFEAKNQHTLYVEVTNEAPFVLKLPTSTATIVVHVEDVNEAPVFVPPSKVVEVQEGIPTGEPVCVYTAEDPDKENQKISYRILRDPAGWLAMDPDSGQVTAVGTLDREDEQFVRNNIYEVMVLAMDNGSPPTTGTGTLLLTLIDVNDHGPVPEPRQITICNQSPVRQVLNITDKDLSPHTSPFQAQLTDDSDIYWTAEVNEEGDTVVLSLKKFLKQDTYDVHLSLSDHGNKEQLTVIRATVCDCHGHVETCPGPWKGGFILPVLGAVLALLFLLLVLLLLVRKKRKIKEPLLLPEDDTRDNVFYYGEEGGGEEDQDYDITQLHRGLEARPEVVLRNDVAPTIIPTPMYRPRPANPDEIGNFIIESWDTCLLPLNIRTPGSLAF

SEQ ID NO: 147 - protein, 779 aa, Artificial Sequence; identical to SEQ ID NO: 146
  Synthetic polypeptide

SEQ ID NO: 148 - protein, 774 aa, Artificial Sequence
  Synthetic polypeptide
MGDKKDDKDSPKKNKGKERRDLDDLKKEVAMTEHKMSVEEVCRKYNTDCVQGLTHSKAQEILARDGPNALTPPPTTPEWVKFCRQLFGGFSILLWIGAILCFLAYGIQAGTEDDPSGDNLYLGIVLAAVVIITGCFSYYQEAKSSKIMESFKNMVPQQALVIREGEKMQVNAEEVVVGDLVEIKGGDRVPADLRIISAHGCKVDNSSLTGESEPQTRSPDCTHDNPLETRNITFFSTNCVEGTARGVVVATGDRTVMGRIATLASGLEVGKTPIAIEIEHFIQLITGVAVFLGVSFFILSLILGYTWLEAVIFLIGIIVANVPEGLLATVTVCLTLTAKRMARKNCLVKNLEAVETLGSTSTICSDKTGTLTQNRMTVAHMWFDNQIHEADTTEDQSGTSFDKSSHTWVALSHIAGLCNRAVFKGGQDNIPVLKRDVAGDASESALLKCIELSSGSVKLMRERNKKVAEIPFNSTNKYQLSIHETEDPNDNRYLLVMKGAPERILDRCSTILLQGKEQPLDEEMKEAFQNAYLELGGLGERVLGFCHYYLPEEQFPKGFAFDCDDVNFTTDNLCFVGLMSMIDPPRAAVPDAVGKCRSAGIKVIMVTGDHPITAKAIAKGVGIISEGNETVEDIAARLNIPVSQVNPRDAKACVIHGTDLKDFTSEQIDEILQNHTEIVFARTSPQQKLIIVEGCQRQGAIVAVTGDGVNDSPALKKADIGVAMGIAGSDVSKQAADMILLDDNFASIVTGAEEGRSRGQEIETMQANTVKPRL

SEQ ID NO: 149 - protein, 774 aa, Artificial Sequence; identical to SEQ ID NO: 148
  Synthetic polypeptide

SEQ ID NO: 150 - protein, 774 aa, Artificial Sequence
  Synthetic polypeptide
MTYRFCSQFSKGVYAIFGFYERRTVNMLTSFCGALHVCFITPSFPVDTSNQFVLQLRPELQDALISIIDHYKWQKFVYIYDADRGLSVLQKVLDTAAEKNWQVTAVNILTTTEEGYRMLFQDLEKKKERLVVVDCESERLNAILGQIIKLEKNGIGYHYILANLGFMDIDLNKFKESGANVTGFQLVNYTDTIPAKIMQQWKNSDARDHTRVDWKRPKYTSALTYDGVKVMAEAFQSLRRQRIDISRRGNAGDCLANPAVPWGQGIDIQRALQQVRFEGLTGNVQFNEKGRRTNYTLHVIEMKHDGIRKIGYWNEDDKFVPAATDAQAGGDNSSVQNRTYIVTTILEDPYVMLKKNANQFEGNDRYEGYCVELAAEIAKHVGYSYRLEIVSDGKYGARDPDTKAWNGMVGELVYGRADVAVAPLTITLVREEVIDFSKPFMSLGISIMIKKPQKSKPGVFSFLDPLAYEIWMCIVFAYIGVSVVLFLVSRFSPYEWHSEEFEEGRDQTTSDQSNEFGIFNSLWFSLGAFMQQGCDISPRSLSGRIVGGVWWFFTLIIISSYTANLAAFLTVERMVSPIESAEDLAKQTEIAYGTLEAGSTKEFFRRSKIAVFEKMWTYMKSAEPSVFVRTTEEGMIRVRKSKGKYAYLLESTMNEYIEQRKPCDTMKVGGNLDSKGYGIATPKGSALRNPVNLAVLKLNEQGLLDKLKNKWWYDKGECGSGGGDSKDKTSALSLSNVAGVFYILIGGLGLAMLVALIEFCYKSRSESKRMKAPL

SEQ ID NO: 151 - protein, 772 aa, Artificial Sequence
  Synthetic polypeptide
MAMRSGRHPSLLLLLVLLLWLLQVSIIDSVQQETDDLTKQTKEKIYQPLRRSKRRWVITTLELEEEDPGPFPKLIGELFNNMSYNMSLMYLISGPGVDEYPEIGLFSLEDHENGRIYVHRPVDREMTPSFTVYFDVVERSTGKIVDTSLIFNIRISDVNDHAPQFPEKEFNITVQENQSAGQPIFQMLAVDLDEENTPNSQVLYFLISQTPLLKESGFRVDRLSGEIRLSGCLDYETAPQFTLLIRARDCGEPSLSSTTTVHVDVQEGNNHRPAFTQENYKVQIPEGRASQGVLRLLVQDRDSPFTSAWRAKFNILHGNEEGHFDISTDPETNEGILNVIKPLDYETRPAQSLIIVVENEERLVFCERGKLQPPRKAAASATVSVQVTDANDPPAFHPQSFIVNKEEGARPGTLLGTFNAMDPDSQIRYELVHDPANWVSVDKNSGVVITVEPIDRESPHVNNSFYVIIIHAVDDGFPPQTATGTLMLFLSDINDNVPTLRPRSRYMEVCESAVHEPLHIEAEDPDLEPFSDPFTFELDNTWGNAEDTWKLGRNWGQSVELLTLRSLPRGNYLVPLFIGDKQGLSQKQTVHVRICPCASGLTCVELADAEVGLHVGALFPVCAAFVALAVALLFLLRCYFVLEPKRHGCSVSNDEGHQTLVMYNAESKGTSAQTWSDVEGQRPALLICTAAAGPTQGVKAYPDATMHRQLLAPVEGRMAETLNQAGCRPEGGLSAELGKGGIHSGILCWKEPESLTLAGQKGLDPQTFTKEK

SEQ ID NO: 152 - protein, 771 aa, Artificial Sequence
  Synthetic polypeptide
MFRQFYLWTCLASGIILGSLFEICLGQYDDDCKLARGGPPATIVAIDEESRNGTILVDNMLIKGTAGGPDPTIELSLKDNVDYWVLMDPVKQMLFLNSTGRVLDRDPPMNIHSIVVQVQCINKKVGTIIYHEVRIVVRDRNDNSPTFKHESYYATVNELTPVGTTIFTGFSGDNGATDIDDGPNGQIEYVIQYNPDDPTSNDTFEIPLMLTGNIVLRKRLNYEDKTRYFVIIQANDRAQNLNERRTTTTTLTVDVLDGDDLGPMFLPCVLVPNTRDCRPLTYQAAIPELRTPEELNPIIVTPPIQAIDQDRNIQPPSDRPGILYSILVGTPEDYPRFFHMHPRTAELSLLEPVNRDFHQKFDLVIKAEQDNGHPLPAFAGLHIEILDENNQSPYFTMPSYQGYILESAPVGATISDSLNLTSPLRIVALDKDIEDVPPSGVPTKDPELHLFLNDYTSVFTVTQTGITRYLTLLQPVDREEQQTYTFSITAFDGVQESEPVIVNIQVMDANDNTPTFPEISYDVYVYTDMRPGDSVIQLTAVDADEGSNGEITYEILVGAQGDFIINKTTGLITIAPGVEMIVGRTYALTVQAADNAPPAERRNSICTVYIEVLPPNNQSPPRFPQLMYSLEISEAMRVGAVLLNLQATDREGDSITYAIENGDPQRVFNLSETTGILTLGKALDRESTDRYILIITASDGRPDGTSTATVNIVVTDVNDNAPVFDPYLPRNLSVVEEEANAFVGQVKAHRRKELAVSEIRLRTSTVELMLK

SEQ ID NO: 153 - protein, 771 aa, Artificial Sequence; identical to SEQ ID NO: 152
  Synthetic polypeptide

SEQ ID NO: 154 - protein, 770 aa, Artificial Sequence
  Synthetic polypeptide
MARGARPSAAGGGGGGAEPPERAGPGRPRGSPPGRARPSLAPRPGPEPSRPRAAPETSGGDTAGAGRCGGRRAAKLGPGRRGWWALLALQLHLLRALAQDDVAPYFKTEPGLPQIHLEGNRLVLTCLAEGSWPLEFKWMRDDSELTTYSSEYKYIIPSLQKLDAGFYRCVVRNRMGALLQRKSEVQVAYMGSFMDTDQRKTVSQGRAAILNLLPITSYPRPQVTWFREGHKIIPSNRIAITLENQLVILATTTSDAGAYYVQAVNEKNGENKTSPFIHLSIARDVGTPETMAPTIVVPPGNRSVVAGSSETTLECIASARPVEDLSVTWKRNGVRITSGLHSFGRRLTISNPTSADTGPYVCEAALPGSAFEPARATAFLFIIEPPYFTAEPESRISAEVEETVDIGCQAMGVPLPTLQWYKDAISISRLQNPRYKVLASGGLRIQKLRPEDSGIFQCFASNEGGEIQTHTYLDVTNIAPVFTQRPVDTTVTDGMTAILRCEVSGAPKPAITWKRENHILASGSVRIPRFMLLESGGLQIAPVFIQDAGNYTCYAANTEGSLNASATLTVWNRTSIVHPPEDHVVIKGTTATLHCGATHDPRVSLRYVWKKDNVALTPSSTSRIVVEKDGSLLISQTWSGDIGDYSCEIVSEGGNDSRMARLEVIELPHSPQNLLVSPNSSHSHAVVLSWVRPFDGNSPILYYIVELSENNHWYLSPGPLQQPSSRPCFLIQTIHLPAATLIFLRYTQTRPLPCPRPAGVPAACNIEAKC

SEQ ID NO: 155 - protein, 770 aa, Artificial Sequence; identical to SEQ ID NO: 154
  Synthetic polypeptide

SEQ ID NO: 156 - protein, 769 aa, Artificial Sequence
  Synthetic polypeptide
MFRQFYLWTCLASGIILGSLFEICLGQYDDGWRYMYCKLARGGPPATIVAIDEESRNGTILVDNMLIKGTAGGPDPTIELSLKDNVDYWVLMDPVKQMLFLNSTGRVLDRDPPMNIHSIVVQVQCINKKVGTIIYHEVRIVVRDRNDNSPTFKHESYYATVNELTPVGTTIFTGFSGDNGATDIDDGPNGQIEYVIQYNPDDPTSNDTFEIPLMLTGNIVLRKRLNYEDKTRYFVIIQANDRAQNLNERRTTTTTLTVDVLDGDDLGPMFLPCVLVPNTRDCRPLTYQAAIPELRTPEELNPIIVTPPIQAIDQDRNIQPPSDRPGILYSILVGTPEDYPRFFHMHPRTAELSLLEPVNRDFHQKFDLVIKAEQDNGHPLPAFAGLHIEILDENNQSPYFTMPSYQGYILESAPVGATISDSLNLTSPLRIVALDKDIEDTKDPELHLFLNDYTSVFTVTQTGITRYLTLLQPVDREEQQTYTFSITAFDGVQESEPVIVNIQVMDANDNTPTFPEISYDVYVYTDMRPGDSVIQLTAVDADEGSNGEITYEILVGAQGDFIINKTTGLITIAPGVEMIVGRTYALTVQAADNAPPAERRNSICTVYIEVLPPNNQSPPRFPQLMYSLEISEAMRVGAVLLNLQATDREGDSITYAIENGDPQRVFNLSETTGILTLGKALDRESTDRYILIITASDGRPDGTSTATVNIVVTDVNDNAPVFDPYLPRNLSVVEEEANAFVGQVKAHRRKELAVSEIRLRTSTVELMLK

SEQ ID NO: 157 - protein, 769 aa, Artificial Sequence
  Synthetic polypeptide
MLGLRPPLLALVGLLSLGCVLSQECTKFKVSSCRECIESGPGCTWCQKLNFTGPGDPDSIRCDTRPQLLMRGCAADDIMDPTSLAETQEDHNGGQKQLSPQKVTLYLRPGQAAAFNVTFRRAKGYPIDLYYLMDLSYSMLDDLRNVKKLGGDLLRALNEITESGRIGFGSFVDKTVLPFVNTHPDKLRNPCPNKEKECQPPFAFRHVLKLTNNSNQFQTEVGKQLISGNLDAPEGGLDAMMQVAACPEEIGWRNVTRLLVFATDDGFHFAGDGKLGAILTPNDGRCHLEDNLYKRSNEFDYPSVGQLAHKLAENNIQPIFAVTSRMVKTYEKLTEIIPKSAVGELSEDSSNVVQLIKNAYNKLSSRVFLDHNALPDTLKVTYDSFCSNGVTHRNQPRGDCDGVQINVPITFQVKVTATECIQEQSFVIRALGFTDIVTVQVLPQCECRCRDQSRDRSLCHGKGFLECGICRCDTGYIGKNCECQTQGRSSQELEGSCRKDNNSIICSGLGDCVCGQCLCHTSDVPGKLIYGQYCECDTINCERYNGQVCGGPGRGLCFCGKCRCHPGFEGSACQCERTTEGCLNPRRVECSGRGRCRCNVCECHSGYQLPLCQECPGCPSPCGKYISCAECLKFEKGPFGKNCSAACPGLQLSNNPVKGRTCKERDSEGCWVAYTLEQQDGMDRYLIYVDESRECVAGPNIAAIVGGTVAGIVLIGILLLVIWKALIHLSDLREYRRFEKEKLKSQWNNVESLSLDLLSQELLKVFPTP

SEQ ID NO: 158 - protein, 769 aa, Artificial Sequence; identical to SEQ ID NO: 157
  Synthetic polypeptide

SEQ ID NO: 159 - protein, 769 aa, Artificial Sequence; identical to SEQ ID NO: 157
  Synthetic polypeptide

SEQ ID NO: 160 - protein, 769 aa, Artificial Sequence; identical to SEQ ID NO: 157
  Synthetic polypeptide

SEQ ID NO: 161 - protein, 769 aa, Artificial Sequence; identical to SEQ ID NO: 157
  Synthetic polypeptide

SEQ ID NO: 162 - protein, 764 aa, Artificial Sequence
  Synthetic polypeptide
MFRQFYLWTCLASGIILGSLFEICLGQYDDDCKLARGGPPATIVAIDEESRNGTILVDNMLIKGTAGGPDPTIELSLKDNVDYWVLMDPVKQMLFLNSTGRVLDRDPPMNIHSIVVQVQCINKKVGTIIYHEVRIVVRDRNDNSPTFKHESYYATVNELTPVGTTIFTGFSGDNGATDIDDGPNGQIEYVIQYNPDDPTSNDTFEIPLMLTGNIVLRKRLNYEDKTRYFVIIQANDRAQNLNERRTTTTTLTVDVLDGDDLGPMFLPCVLVPNTRDCRPLTYQAAIPELRTPEELNPIIVTPPIQAIDQDRNIQPPSDRPGILYSILVGTPEDYPRFFHMHPRTAELSLLEPVNRDFHQKFDLVIKAEQDNGHPLPAFAGLHIEILDENNQSPYFTMPSYQGYILESAPVGATISDSLNLTSPLRIVALDKDIEDTKDPELHLFLNDYTSVFTVTQTGITRYLTLLQPVDREEQQTYTFSITAFDGVQESEPVIVNIQVMDANDNTPTFPEISYDVYVYTDMRPGDSVIQLTAVDADEGSNGEITYEILVGAQGDFIINKTTGLITIAPGVEMIVGRTYALTVQAADNAPPAERRNSICTVYIEVLPPNNQSPPRFPQLMYSLEISEAMRVGAVLLNLQATDREGDSITYAIENGDPQRVFNLSETTGILTLGKALDRESTDRYILIITASDGRPDGTSTATVNIVVTDVNDNAPVFDPYLPRNLSVVEEEANAFVGQVKAHRRKELAVSEIRLRTSTVELMLK

SEQ ID NO: 163 - protein, 764 aa, Artificial Sequence; identical to SEQ ID NO: 162
  Synthetic polypeptide

SEQ ID NO: 164 - protein, 764 aa, Artificial Sequence; identical to SEQ ID NO: 162
  Synthetic polypeptide

SEQ ID NO: 165 - protein, 764 aa, Artificial Sequence; identical to SEQ ID NO: 162
  Synthetic polypeptide

SEQ ID NO: 166 - protein, 764 aa, Artificial Sequence; identical to SEQ ID NO: 162
  Synthetic polypeptide

SEQ ID NO: 167 - protein, 763 aa, Artificial Sequence
  Synthetic polypeptide
MQHIFAFFCTGFLGAVVGANFPNNIQIGGLFPNQQSQEHAAFRFALSQLTEPPKLLPQIDIVNISDSFEMTYRCLSVLQKVLDTAAEKNWQVTAVNILTTTEEGYRMLFQDLEKKKERLVVVDCESERLNAILGQIIKLEKNGIGYHYILANLGFMDIDLNKFKESGANVTGFQLVNYTDTIPAKIMQQWKNSDARDHTRVDWKRPKYTSALTYDGVKVMAEAFQSLRRQRIDISRRGNAGDCLANPAVPWGQGIDIQRALQQVRFEGLTGNVQFNEKGRRTNYTLHVIEMKHDGIRKIGYWNEDDKFVPAATDAQAGGDNSSVQNRTYIVTTILEDPYVMLKKNANQFEGNDRYEGYCVELAAEIAKHVGYSYRLEIVSDGKYGARDPDTKAWNGMVGELVYGRADVAVAPLTITLVREEVIDFSKPFMSLGISIMIKKPQKSKPGVFSFLDPLAYEIWMCIVFAYIGVSVVLFLVSRFSPYEWHSEEFEEGRDQTTSDQSNEFGIFNSLWFSLGAFMQQGCDISPRSLSGRIVGGVWWFFTLIIISSYTANLAAFLTVERMVSPIESAEDLAKQTEIAYGTLEAGSTKEFFRRSKIAVFEKMWTYMKSAEPSVFVRTTEEGMIRVRKSKGKYAYLLESTMNEYIEQRKPCDTMKVGGNLDSKGYGIATPKGSALRNPVNLAVLKLNEQGLLDKLKNKWWYDKGECGSGGGDSKDKTSALSLSNVAGVFYILIGGLGLAMLVALIEFCYKSRSESKRMKAPL

SEQ ID NO: 168 - protein, 759 aa, Artificial Sequence
  Synthetic polypeptide
MKIIFPILSNPVFRRTVKLLLCLLWIGYSQGTTHVLRFGGIFEYVESGPMGAEELAFRFAVNTINRNRTLLPNTTLTYDTQKINLYDSFEASKKACDQLSLGVAAIFGPSHSSSANAVQSICNALGVPHIQTRWKHQVSDNKDSFYVSLYPDFSSLSRAILDLVQFFKWKTVTVVYDDSTGLIRLQELIKAPSRYNLRLKIRQLPADTKDAKPLLKEMKRGKEFHVIFDCSHEMAAGILKQALAMGMMTEYYHYIFTTLDLFALDVEPYRYSGVNMTGFRILNTENTQVSSIIEKWSMERLQAPPKPDSGLLDGFMTTDAALMYDAVHVVSVAVQQFPQMTVSSLQCNRHKPWRFGTRFMSLIKEAHWEGLTGRITFNKTNGLRTDFDLDVISLKEEGLEKIGTWDPASGLNMTESQKGKPANITDSLSNRSLIVTTILEEPYVLFKKSDKPLYGNDRFEGYCIDLLRELSTILGFTYEIRLVEDGKYGAQDDANGQWNGMVRELIDHKADLAVAPLAITYVREKVIDFSKPFMTLGISILYRKPNGSELMPKALSTRIVGGIWWFFTLIIISSYTANLAAFLTVERMESPIDSADDLAKQTKIEYGAVEDGATMTFFKKSKISTYDKMWAFMSSRRQSVLVKSNEEGIQRVLTSDYAFLMESTTIEFVTQRNCNLTQIGGLIDSKGYGVGTPMGSVAYACNLSTLGGRAGWITRSGVRDQPGQHGETPSLLKIQKISWAWWCEPVIPATQEGEAGELL

SEQ ID NO: 169 - protein, 751 aa, Artificial Sequence
  Synthetic polypeptide
MAGPRPSPWARLLLAALISVSLSGTLANRCKKAPVKSCTECVRVDKDCAYCTDEMFRDRRCNTQAELLAAGCQRESIVVMESSFQITEETQIDTTLRRSQMSPQGLRVRLRPGEERHFELEVFEPLESPVDLYILMDFSNSMSDDLDNLKKMGQNLARVLSQLTSDYTIGFGKFVDKVSVPQTDMRPEKLKEPWPNSDPPFSFKNVISLTEDVDEFRNKLQGERISGNLDAPEGGFDAILQTAVCTRDIGWRPDSTHLLVFSTESAFHYEADGANVLAGIMSRNDERCHLDTTGTYTQYRTQDYPSVPTLVRLLAKHNIIPIFAVTNYSYSYYEKLHTYFPVSSLGVLQEDSSNIVELLEEAFNRIRSNLDIRALDSPRGLRTEVTSKMFQKTRTGSFHIRRGEVGIYQVQLRALEHVDGTHVCQLPEDQKGNIHLKPSFSDGLKMDAGIICDVCTCELQKEVRSARCSFNGDFVCGQCVCSEGWSGQTCNCSTGSLSDIQPCLREGEDKPCSGRGECQCGHCVCYGEGRYEGQFCEYDNFQCPRTSGFLCNDRGRCSMGQCVCEPGWTGPSCDCPLSNATCIDSNGGICNGRGHCECGRCHCHQQSLYTDTICEINYSAIHPGLCEDLRSCVQCQAWGTGEKKGRTCEECNFKVKMVDELKRAEEVVVRCSFRDEDDDCTYSYTMEGDGAPGPNSTVLVHKKKDCPPGSFWWLIPLLLLLLPLLALLLLLCWKYCACCKDFSEALIKSCA

SEQ ID NO: 170 - protein, 751 aa, Artificial Sequence; identical to SEQ ID NO: 169
  Synthetic polypeptide

SEQ ID NO: 171 - protein, 751 aa, Artificial Sequence; identical to SEQ ID NO: 169
  Synthetic polypeptide

SEQ ID NO: 172 - protein, 751 aa, Artificial Sequence; identical to SEQ ID NO: 169
  Synthetic polypeptide

SEQ ID NO: 173 - protein, 751 aa, Artificial Sequence; identical to SEQ ID NO: 169
  Synthetic polypeptide

SEQ ID NO: 174 - protein, 744 aa, Artificial Sequence
  Synthetic polypeptide
MTEHKMSVEEVCRKYNTDCVQGLTHSKAQEILARDGPNALTPPPTTPEWVKFCRQLFGGFSILLWIGAILCFLAYGIQAGTEDDPSGDNLYLGIVLAAVVIITGCFSYYQEAKSSKIMESFKNMVPQQALVIREGEKMQVNAEEVVVGDLVEIKGGDRVPADLRIISAHGCKVDNSSLTGESEPQTRSPDCTHDNPLETRNITFFSTNCVEGTARGVVVATGDRTVMGRIATLASGLEVGKTPIAIEIEHFIQLITGVAVFLGVSFFILSLILGYTWLEAVIFLIGIIVANVPEGLLATVTVCLTLTAKRMARKNCLVKNLEAVETLGSTSTICSDKTGTLTQNRMTVAHMWFDNQIHEADTTEDQSGTSFDKSSHTWVALSHIAGLCNRAVFKGGQDNIPVLKRDVAGDASESALLKCIELSSGSVKLMRERNKKVAEIPFNSTNKYQLSIHETEDPNDNRYLLVMKGAPERILDRCSTILLQGKEQPLDEEMKEAFQNAYLELGGLGERVLGFCHYYLPEEQFPKGFAFDCDDVNFTTDNLCFVGLMSMIDPPRAAVPDAVGKCRSAGIKVIMVTGDHPITAKAIAKGVGIISEGNETVEDIAARLNIPVSQVNPRDAKACVIHGTDLKDFTSEQIDEILQNHTEIVFARTSPQQKLIIVEGCQRQGAIVAVTGDGVNDSPALKKADIGVAMGIAGSDVSKQAADMILLDDNFASIVTGAEEGRSRGQEIETMQANTVKPRL

SEQ ID NO: 175 - protein, 742 aa, Artificial Sequence
  Synthetic polypeptide
MKTLLLDLALWSLLFQPGWLSFSSQVSQNCHNGSYEISVLMMGNSAFAEPLKNLEDAVNEGLEIVRGRLQNAGLNVTVNATFMYSDGLIHNSGDCRSSTCEGLDLLRKISNAQRMGCVLIGPSCTYSTFQMYLDTELSYPMISAGSFGLSCDYKETLTRLMSPARKLMYFLVNFWKTNDLPFKTYSWSTSYVYKNGTETEDCFWYLNALEASVSYFSHELGFKVVLRQDKEFQDILMDHNRKSNVIIMCGGPEFLYKLKGDRAVAEDIVIILVDLFNDQYFEDNVTAPDYMKNVLVLTLSPGNSLLNSSFSRNLSPTKRDFALAYLNGILLFGHMLKIFLENGENITTPKFAHAFRNLTFEGYDGPVTLDDWGDVDSTMVLLYTSVDTKKYKVLLTYDTHVNKTYPVDMSPTFTWKNSKLPNDITGRGPQILMIAVFTLTGAVVLLLLVALLMLRKYRKDYELRQKKWSHIPPENIFPLETNETNHVSLKIDDDKRRDTIQRLRQCKYDKKRVILKDLKHNDGNFTEKQKIELNKLLQIDYYNLTKFYGTVKLDTMIFGVIEYCERGSLREVLNDTISYPDGTFMDWEFKISVLYDIAKGMSYLHSSKTEVHGRLKSTNCVVDSRMVVKITDFGCNSILPPKKDLWTAPEHLRQANISQKGDVYSYGIIAQEIILRKETFYTLSCRDRNEKIFRVENSNGMKPFRPDLFLETAEEKELEVELNNENTWTQEGEHHTLGTVMG

SEQ ID NO: 176 - protein, 742 aa, Artificial Sequence
  Synthetic polypeptide
MFRQFYLWTCLASGIILGSLFEICLGQYDDGTILVDNMLIKGTAGGPDPTIELSLKDNVDYWVLMDPVKQMLFLNSTGRVLDRDPPMNIHSIVVQVQCINKKVGTIIYHEVRIVVRDRNDNSPTFKHESYYATVNELTPVGTTIFTGFSGDNGATDIDDGPNGQIEYVIQYNPDDPTSNDTFEIPLMLTGNIVLRKRLNYEDKTRYFVIIQANDRAQNLNERRTTTTTLTVDVLDGDDLGPMFLPCVLVPNTRDCRPLTYQAAIPELRTPEELNPIIVTPPIQAIDQDRNIQPPSDRPGILYSILVGTPEDYPRFFHMHPRTAELSLLEPVNRDFHQKFDLVIKAEQDNGHPLPAFAGLHIEILDENNQSPYFTMPSYQGYILESAPVGATISDSLNLTSPLRIVALDKDIEDTKDPELHLFLNDYTSVFTVTQTGITRYLTLLQPVDREEQQTYTFSITAFDGVQESEPVIVNIQVMDANDNTPTFPEISYDVYVYTDMRPGDSVIQLTAVDADEGSNGEITYEILVGAQGDFIINKTTGLITIAPGVEMIVGRTYALTVQAADNAPPAERRNSICTVYIEVLPPNNQSPPRFPQLMYSLEISEAMRVGAVLLNLQATDREGDSITYAIENGDPQRVFNLSETTGILTLGKALDRESTDRYILIITASDGRPDGTSTATVNIVVTDVNDNAPVFDPYLPRNLSVVEEEANAFVGQVKAHRRKELAVSEIRLRTSTVELMLK

SEQ ID NO: 177 - protein, 742 aa, Artificial Sequence; identical to SEQ ID NO: 176
  Synthetic polypeptide

SEQ ID NO: 178 - protein, 727 aa, Artificial Sequence
  Synthetic polypeptide
MFRQFYLWTCLASGIILGSLFEICLGQYDDDCKLARGGPPATIVAIDEESRNGTILVDNMLIKGTAGGPDPTIELSLKDNVDYWVLMDPVKQMLFLNSTGRVLDRDPPMNIHSIVVQVQCINKKVGTIIYHEVRIVVRDRNDNSPTFKHESYYATVNELTPVGTTIFTGFSGDNGATDIDDGPNGQIEYVIQYNPDDPDRAQNLNERRTTTTTLTVDVLDGDDLGPMFLPCVLVPNTRDCRPLTYQAAIPELRTPEELNPIIVTPPIQAIDQDRNIQPPSDRPGILYSILVGTPEDYPRFFHMHPRTAELSLLEPVNRDFHQKFDLVIKAEQDNGHPLPAFAGLHIEILDENNQSPYFTMPSYQGYILESAPVGATISDSLNLTSPLRIVALDKDIEDTKDPELHLFLNDYTSVFTVTQTGITRYLTLLQPVDREEQQTYTFSITAFDGVQESEPVIVNIQVMDANDNTPTFPEISYDVYVYTDMRPGDSVIQLTAVDADEGSNGEITYEILVGAQGDFIINKTTGLITIAPGVEMIVGRTYALTVQAADNAPPAERRNSICTVYIEVLPPNNQSPPRFPQLMYSLEISEAMRVGAVLLNLQATDREGDSITYAIENGDPQRVFNLSETTGILTLGKALDRESTDRYILIITASDGRPDGTSTATVNIVVTDVNDNAPVFDPYLPRNLSVVEEEANAFVGQVKAHRRKELAVSEIRLRTSTVELMLK

SEQ ID NO: 179 - protein, 724 aa, Artificial Sequence
  Synthetic polypeptide
MGCPGQEPALFSTDNDDFTVRNGETVQERRSLKERNPLKIFPSKRILRRHKRDWVVAPISVPENGKGPFPQRLNQLKSNKDRDTKIFYSITGPGADSPPEGVFAVEKETGWLLLNKPLDREEIAKYELFGHAVSENGASVEDPMNISIIVTDQNDHKPKFTQDTFRGSVLEGVLPGTSVMQVTATDEDDAIYTYNGVVAYSIHSQEPKDPHDLMFTIHRSTGTISVISSGLDREKVPEYTLTIQATDMDGDGSTTTAVAVVEILDANDNAPMFDPQKYEAHVPENAVGHEVQRLTVTDLDAPNSPAWRATYLIMGGDDGDHFTITTHPESNQGILTTRKGLDFEAKNQHTLYVEVTNEAPFVLKLPTSTATIVVHVEDVNEAPVFVPPSKVVEVQEGIPTGEPVCVYTAEDPDKENQKISYRILRDPAGWLAMDPDSGQVTAVGTLDREDEQFVRNNIYEVMVLAMDNGSPPTTGTGTLLLTLIDVNDHGPVPEPRQITICNQSPVRQVLNITDKDLSPHTSPFQAQLTDDSDIYWTAEVNEEGDTVVLSLKKFLKQDTYDVHLSLSDHGNKEQLTVIRATVCDCHGHVETCPGPWKGGFILPVLGAVLALLFLLLVLLLLVRKKRKIKEPLLLPEDDTRDNVFYYGEEGGGEEDQDYDITQLHRGLEARPEVVLRNDVAPTIIPTPMYRPRPANPDEIGNFIIESWDTCLLPLNIRTPGSLAF

SEQ ID NO: 180 - protein, 716 aa, Artificial Sequence
  Synthetic polypeptide
MQPRRAQAPGAQLLPALALLLLLLGAGPRGSSLANPVPAAPLSAPGPCAAQPCRNGGVCTSRPEPDPQHPAPAGEPGYSCTCPAGISGANCQLVADPCASNPCHHGNCSSSSSSSSDGYLCICNEGYEGPNCEQALPSLPATGWTESMAPRQLQPVPATQEPDKILPRSQATVTLPTWQPKTGQKVVEMKWDQVEVIPDIACGNASSNSSAGGRLVSFEVPQNTSVKIRQDATASLILLWKVTATGFQQCSLIDGRSVTPLQASGGLVLLEEMLALGNNHFIGFVNDSVTKSIVALRLTLVVKVSTCVPGESHANDLECSGKGKCTTKPSEATFSCTCEEQYVGTFCEEYDACQRKPCQNNASCIDANEKQDGSNFTCVCLPGYTGELCQSKIDYCILDPCRNGATCISSLSGFTCQCPEGYFGSACEEKVDPCASSPCQNNGTCYVDGVHFTCNCSPGFTGPTCAQLIDFCALSPCAHGTCRSVGTSYKCLCDPGYHGLYCEEEYNECLSAPCLNAATCRDLVNGYECVCLAEYKGTHCELYKDPCANVSCLNGATCDSDGLNGTCICAPGFTGEECDIDINECDSNPCHHGGSCLDQPNGYNCHCPHGWVGANCEIHLQWKSGHMAESLTNMPRHSLYIIIGALCVAFILMLIILIVGICRISRIEYQGSSRPAYEEFYNCRSIDSEFSNAIASIRHARINEMYSLHEVVMMMR

SEQ ID NO: 181 - protein, 715 aa, Artificial Sequence
  Synthetic polypeptide
MGVLKVWLGLALALAEFAVLPHHSEGACVYQDSLLADATIWKPDSCQSCRCHGDIVICKPAVCRNPQCAFEKGEVLQIAANQCCPECVLRTPGSCHHEKKIHEHGTEWASSPCSVCSCNHGEVRCTPQPCPPLSCGHQELAFIPEGSCCPVCVGLGKPCSYEGHVFQDGEDWRLSRCAKCLCRNGVAQCFTAQCQPLFCNQDETVVRVPGKCCPQCSARSCSAAGQVYEHGEQWSENACTTCICDRGEVRCHKQACLPLRCGKGQSRARRHGQCCEECVSPAGSCSYDGVVRYQDEMWKGSACEFCMCDHGQVTCQTGECAKVECARDEELIHLDGKCCPECISRNGYCVYEETGEFMSSNASEVKRIPEGEKWEDGPCKVCECRGAQVTCYEPSCPPCPVGTLALEVKGQCCPDCTSVHCHPDCLTCSQSPDHCDLCQDPTKLLQNGWCVHSCGLGFYQAGSLCLACQPQCSTCTSGLECSSCQPPLLMRHGQCVPTCGDGFYQDRHSCAVCHESCAGCWGPTEKHCLACRDPLHVLRDGGCESSCGKGFYNRQGTCSACDQSCDSCGPSSPRCLTCTEKTVLHDGKCMSECPGGYYADATGRCKVCHNSCASCSGPTPSHCTACSPPKALRQGHCLPRCGEGFYSDHGVCKACHSSCLACMGPAPSHCTGCKKPEEGLQVEQLSDVGIPSGECLAQCRAHFYLESTGICEACF

SEQ ID NO: 182 - protein, 715 aa, Artificial Sequence; identical to SEQ ID NO: 181
  Synthetic polypeptide

SEQ ID NO: 183 - protein, 715 aa, Artificial Sequence; identical to SEQ ID NO: 181
  Synthetic polypeptide

SEQ ID NO: 184 - protein, 712 aa, Artificial Sequence
  Synthetic polypeptide
MLGLRPPLLALVGLLSLGCVLSQECTKFKVSSCRECIESGPGCTWCQKLNFTGPGDPDSIRCDTRPQLLMRGCAADDIMDPTSLAETQEDHNGGQKQLSPQKVTLYLRPGFGSFVDKTVLPFVNTHPDKLRNPCPNKEKECQPPFAFRHVLKLTNNSNQFQTEVGKQLISGNLDAPEGGLDAMMQVAACPEEIGWRNVTRLLVFATDDGFHFAGDGKLGAILTPNDGRCHLEDNLYKRSNEFDYPSVGQLAHKLAENNIQPIFAVTSRMVKTYEKLTEIIPKSAVGELSEDSSNVVQLIKNAYNKLSSRVFLDHNALPDTLKVTYDSFCSNGVTHRNQPRGDCDGVQINVPITFQVKVTATECIQEQSFVIRALGFTDIVTVQVLPQCECRCRDQSRDRSLCHGKGFLECGICRCDTGYIGKNCECQTQGRSSQELEGSCRKDNNSIICSGLGDCVCGQCLCHTSDVPGKLIYGQYCECDTINCERYNGQVCGGPGRGLCFCGKCRCHPGFEGSACQCERTTEGCLNPRRVECSGRGRCRCNVCECHSGYQLPLCQECPGCPSPCGKYISCAECLKFEKGPFGKNCSAACPGLQLSNNPVKGRTCKERDSEGCWVAYTLEQQDGMDRYLIYVDESRECVAGPNIAAIVGGTVAGIVLIGILLLVIWKALIHLSDLREYRRFEKEKLKSQWNNVESLSLDLLSQELLKVFPTP

SEQ ID NO: 185 - protein, 704 aa, Artificial Sequence
  Synthetic polypeptide
MFDTTPHSGRSTPSSSPSLRKRLQLLPPSRPPPEPEPGTMVEKGSDSSSEKGGVPGTPSTQSLGSRNFIRNSKKMQSWYSMLSPTYKQRNEDFRKLFSKLPEAERLIVDYSCALQREILLQGRLYLSENWICFYSNIFRWETTISIQLKEVTCLKKEKTAKLIPNAIQICTESEKHFFTSFGARDRCFLLIFRLWQNALLEKTLSPRELWHLVHQCYGSELGLTSEDEDYVSPLQLNGLGTPKEVGDVIALSDITSSGAADRSQEPSPVGSRRGHVTPNLSRASSDADHGAEEDKEEQVDSQPDASSSQTVTPVAEPPSTEPTQPDGPTTLGPLDLLPSEELLTDTSNSSSSTGEEADLAALLPDLSGRLLINSVFHVGAERLQQMLFSDSPFLQGFLQQCKFTDVTLSPWSGDSKCHQRRVLTYTIPISNPLGPKSASVVETQTLFRRGPQAGGCVVDSEVLTQGIPYQDYFYTAHRYCILGLARNKARLRVSSEIRYRKQPWSLVKSLIEKNSWSGIEDYFHHLERELAKAEKLSLEEGGKDARGLLSGLRRRKRPLSWRAHGDGPQHPDPDPCARAGIHTSGSLSSRFSEPSVDQGPGAGIPSALVLISIVICVSLIILIALNVLLFYRLWSLERTAHTFESWHSLALAKGKFPQTATEWAEILALQKQFHSVEVHKWRQILRASVELLDEHCRGKHGSMD

SEQ ID NO: 186 - protein, 698 aa, Artificial Sequence
  Synthetic polypeptide
MPLHQLGDKPLTFPSPNSAMENGLDHTPPSRRASPGTPLSPGSLRSAAHSPLDTSKQPLCQLWAEKHGARGTHEVRYVSAGQSVACGWWAFAPPCLQVLNTPKGILFFLCAAAFLQGMTVNGFINTVITSLERRYDLHSYQSGLIASSYDIAACLCLTFVSYFGGSGHKPRWLGWGVLLMGTGSLVFALPHFTAGRYEVELDAGVRTCPANPGAVCADSTSGLSRYQLVFMLGQFLHGVGATPLYTLGVTYLDENVKSSCSPVYIAIFYTAAILGPAAGYLIGGALLNIYTEMGRRTELTTESPLWVGAWWVGFLGSGAAAFFTAVPILGYPRQLPGSQRYAVMRAAEMHQLKDSSRGEASNPDFGKTIRDLPLSIWLLLKNPTFILLCLAGATEATLITGMSTFSPKFLESQFSLSASEAATLFGYLVVPAGGGGTFLGGFFVNKLRLRGSAVIKFCLFCTVVSLLGILVFSLHCPSVPMAGVTASYGGSLLPEGHLNLTAPCNAACSCQPEHYSPVCGSDGLMYFSLCHAGCPAATETNVDGQKVYRDCSCIPQNLSSGFGHATAGKCTSTCQRKPLLLVFIFVVIFFTFLSSIPALTATLRCVRDPQRSFALGIQWIVVRILGGIPGPIAFGWVIDKACLLWQDQCGQQGSCLVYQNSAMSRYILIMGLLYKLPEVHHSLNVLNRKFQKQTVHNL

SEQ ID NO: 187 - protein, 698 aa, Artificial Sequence; identical to SEQ ID NO: 186
  Synthetic polypeptide

SEQ ID NO: 188 - protein, 693 aa, Artificial Sequence
  Synthetic polypeptide
MFDTTPHSGRSTPSSSPSLRKRLQLLPPSRPPPEPEPGTMVEKGSDSSSEKGGVPGTPSTQSLGSRNFIRNSKMLSPTYKQRNEDFRKLFSKLPEAERLIVDYSCALQREILLQGRLYLSENWICFYSNIFRWETTISIQLKEVTCLKKEKTAKLIPNAIQICTESEKHFFTSFGARDRCFLLIFRLWQNALLEKTLSPRELWHLVHQCYGSELGLTSEDEDYVSPLQLNGLGTPKEVGDVIALSDITSSGAADRSQEPSPVGSRRGHVTPNLSRASSDADHGAEEDKEEQVDSQPDASSSQTVTPVAEPPSTEPTQPDGPTTLGPLDLLPSEELLTDTSNSSSSTGEEADLAALLPDLSGRLLINSVFHVGAERLQQMLFSDSPFLQGFLQQCKFTDVTLSPWSGDSKCHQRRVLTYTIPISNPLGPKSASVVETQTLFRRGPQAGGCVVDSEVLTQGIPYQDYFYTAHRYCILGLARNKARLRVSSEIRYRKQPWSLVKSLIEKNSWSGIEDYFHHLERELAKAEKLSLEEGGKDARGLLSGLRRRKRPLSWRAHGDGPQHPDPDPCARAGIHTSGSLSSRFSEPSVDQGPGAGIPSALVLISIVLIILIALNVLLFYRLWSLERTAHTFESWHSLALAKGKFPQTATEWAEILALQKQFHSVEVHKWRQILRASVELLDEHCRGKHGSMD

SEQ ID NO: 189 - protein, 693 aa, Artificial Sequence
  Synthetic polypeptide
MGPWGWKLRWTVALLLAAAGTAVGDRCERNEFQCQDGKCISYKWVCDGSAECQDGSDESQETCLSVTCKSGDFSCGGRVNRCIPQFWRCDGQVDCDNGSDEQGCLTLCEGPNKFKCHSGECITLDKVCNMARDCRDWSDEPIKECGTNECLDNNGGCSHVCNDLKIGYECLCPDGFQLVAQRRCEDIDECQDPDTCSQLCVNLEGGYKCQCEEGFQLDPHTKACKAVGSIAYLFFTNRHEVRKMTLDRSEYTSLIPNLRNVVALDTEVASNRIYWSDLSQRMICSTQLDRAHGVSSYDTVISRDIQAPDGLAVDWIHSNIYWTDSVLGTVSVADTKGVKRKTLFRENGSKPRAIVVDPVHGFMYWTDWGTPAKIKKGGLNGVDIYSLVTENIQWPNGITLDLLSGRLYWVDSKLHSISSIDVNGGNRKTILEDEKRLAHPFSLAVFEDKVFWTDIINEAIFSANRLTGSDVNLLAENLLSPEDMVLFHNLTQPRGVNWCERTTLSNGGCQYLCLPAPQINPHSPKFTCACPDGMLLARDMRSCLTEAEAAVATQETSTVRLKVSSTAVRTQHTTTRPVPDTSRLPGATPGLTTVEIVTMSHQALGDVAGRGNEKKPSSVRALSIVLPIVLLVFLCLGVFLLWKNWRLKNINSINFDNPVYQKTTEDEVHICHNQDGYSYPSVPHACNPSTLGG

SEQ ID NO: 190 - protein, 693 aa, Artificial Sequence
  Synthetic polypeptide
MFRQFYLWTCLASGIILGSLFEICLGQYDDDCKLARGGPPATIVAIDEESRNGTILVDNMLIKGTAGGPDPTIELSLKDNVDYWVLMDPVKQMLFLNSTGRVLDRDPPMNIHSIVVQVQCINKKVGTIIYHEVRIVVRDRNDNSPTFKHESYYATVNELTPVGTTIFTGFSGDNGATDIDDGPNGQIEYVIQYNPDDPTSNDTFEIPLMLTGNIVLRKRLNYEDKTRYFVIIQANDRAQNLNERRTTTTTLTVDVLDGDDLGPMFLPCVLVPNTRDCRPLTYQAAIPELRTPEELNPIIVTPPIQAIDQDRNIQPPSDRPGILYSILVGTPEDYPRFFHMHPRTAELSLLEPVNRDFHQKFDLVIKAEQDNGHPLPAFAGLHIEILDENNQSPYFTMPSYQGYILESAPVGATISDSLNLTSPLRIVALDKDIEDTKDPELHLFLNDYTSVFTVTQTGITRYLTLLQPVDREEQQTYTFSITAFDGVQESEPVIVNIQVMDANDNTPTFPEISYDVYVYTDMRPGDSVIQLTAVDADEGSNGEITYEILVGAQGDFIINKTTGLITIAPGVEMIVGRTYALTVQAADNAPPAERSTGILTLGKALDRESTDRYILIITASDGRPDGTSTATVNIVVTDVNDNAPVFDPYLPRNLSVVEEEANAFVGQVKAHRRKELAVSEIRLRTSTVELMLK

SEQ ID NO: 191 - protein, 687 aa, Artificial Sequence
  Synthetic polypeptide
MDARGGGGRPGESPGATPAPGPPPPPPPAPPQQQPPPPPPPAPPPGPGPAPPQHPPRAEALPPEAADEGGPRGRLRSRDSSCGRPGTPGAASTAKGSPNGECGRGEPQCSPAGPEGPARGPKVSFSCRGAASGPAPGPGPAEEAGSEEAGPAGEPRGSQASFMQRQFGALLQPGVNKFSLRMFGSQKAVEREQERVKSAGAWIIHPYSDFRFYWDFTMLLFMVGNLIIIPVGITFFKDETTAPWIVFNVVSDTFFLMDLVLNFRTGIVIEDNTEIILDPEKIKKKYLRTWFVVDFVSSIPVDYIFLIVEKGIDSEVYKTARALRIVRFTKILSLLRLLRLSRLIRYIHQWEEIFHMTYDLASAVMRICNLISMMLLLCHWDGCLQFLVPMLQDFPRNCWVSINGMVNHSWSELYSFALFKAMSHMLCIGYGRQAPESMTDIWLTMLSMIVGATCYAMFIGHATALIQSLDSSRRQYQEKYKQVEQYMSFHKLPADFRQKIHDYYEHRYQGKMFDEDSILGELNGPLREEIVNFNCRKLVASMPLFANADPNFVTAMLTKLKFEVFQPGDYIIREGTIGKKMYFIQHGVVSVLTKGNKEMKLSDGSYFGEICLLTRGRRTASVRADTYCRLYSLSVDNFNEVLEEYPMMRRAFETVAIDRLDRIGAVAHACSPSTFGGQGGWITRSGD

SEQ ID NO: 192 - protein, 687 aa, Artificial Sequence
  Synthetic polypeptide
MGGALGPALLLTSLFGAWAGLGPGQGEQGMTVAVVFSSSGPPQAQFRARLTPQSFLDLPLEIQPLTVGVNTTNPSSLLTQICGLLGAAHVHGIVFEDNVDTEAVAQILDFISSQTHVPILSISGGSAVVLTPKEPGSAFLQLGVSLEQQLQVLFKVLEEYDWSAFAVITSLHPGHALFLEGVRAVADASHVSWRLLDVVTLELGPGGPRARTQRLLRQLDAPVFVAYCSREEAEVLFAEAAQAGLVGPGHVWLVPNLALGSTDAPPATFPVGLISVVTESWRLSLRQKVRDGVAILALGAHSYWRQHGTLPAPAGDCRVHPGPVSPAREAFYRHLLNVTWEGRDFSFSPGGYLVQPTMVVIALNRHRLWEMVGRWEHGVLYMKYPVWPRYSASLQPVVDSRHLTVATLEERPFVIVESPDPGTGGCVPNTVPCRRQSNHTFSSGDVAPYTKLCCKGFCIDILKKLARVVKFSYDLYLVTNGKHGKRVRGVWNGMIGEVYYKRADMAIGSLTINEERSEIVDFSVPFVETGISVMVARSNGTVSPSAFLEPYSPAVWVMMFVMCLTVVAITVFMFEYFSPVSYNQNLTRGKKSGGPAFTIGKSVWLLWALVFNNSVPIENPRGTTSKIMVLVWAFFAVIFLASYTANLAAFMIQEQYIDTVSGLSDKKSLHLENTGVAWTAFKTFCSD

SEQ ID NO: 193 - protein, 687 aa, Artificial Sequence; identical to SEQ ID NO: 192
  Synthetic polypeptide

SEQ ID NO: 194 - protein, 683 aa, Artificial Sequence
  Synthetic polypeptide
MGPWGWKLRWTVALLLAAAGTAVGDRCERNEFQCQDGKCISYKWVCDGSAECQDGSDESQETCLSVTCKSGDFSCGGRVNRCIPQFWRCDGQVDCDNGSDEQGCPVATCRPDEFQCSDGNCIHGSRQCDREYDCKDMSDEVGCVNVTLCEGPNKFKCHSGECITLDKVCNMARDCRDWSDEPIKECGTNECLDNNGGCSHVCNDLKIGYECLCPDGFQLVAQRRCEDIDECQDPDTCSQLCVNLEGGYKCQCEEGFQLDPHTKACKAVGSIAYLFFTNRHEVRKMTLDRSEYTSLIPNLRNVVALDTEVASNRIYWSDLSQRMICSTQLDRAHGVSSYDTVISRDIQAPDGLAVDWIHSNIYWTDSVLGTVSVADTKGVKRKTLFRENGSKPRAIVVDPVHGFMYWTDWGTPAKIKKGGLNGVDIYSLVTENIQWPNGITLDLLSGRLYWVDSKLHSISSIDVNGGNRKTILEDEKRLAHPFSLAVFEDKVFWTDIINEAIFSANRLTGSDVNLLAENLLSPEDMVLFHNLTQPREAEAAVATQETSTVRLKVSSTAVRTQHTTTRPVPDTSRLPGATPGLTTVEIVTMSHQALGDVAGRGNEKKPSSVRALSIVLPIVLLVFLCLGVFLLWKNWRLKNINSINFDNPVYQKTTEDEVHICHNQDGYSYPSVPHACNPSTLGG

SEQ ID NO: 195 - protein, 683 aa, Artificial Sequence
  Synthetic polypeptide
MPLHQLGDKPLTFPSPNSAMENGLDHTPPSRRASPGTPLSPGSLRSAAHSPLDTSKQPLCQLWAEKHGARGTHEVRYVSAGQSVACGWWAFAPPCLQVLNTPKGILFFLCAAAFLQGMTVNGFINTVITSLERRYDLHSYQSGLIASSYDIAACLCLTFVSYFGGSGHKPRWLGWGVLLMGTGSLVFALPHFTAGRYEVELDAGVRTCPANPGAVCADSTSGLSRYQLVFMLGQFLHGVGATPLYTLGVTYLDENVKSSCSPVYIAIFYTAAILGPAAGYLIGGALLNIYTEMGRRTELTTESPLWVGAWWVGFLGSGAAAFFTAVPILGYPRQLPGSQRYAVMRAAEMHQLKDSSRGEASNPDFGKTIRDLPLSIWLLLKNPTFILLCLAGATEATLITGMSTFSPKFLESQFSLSASEAATLFGYLVVPAGGGGTFLGGFFVNKLRLRGSAVIKFCLFCTVVSLLGILVFSLHCPSVPMAGVTASYGGSLLPEGHLNLTAPCNAACSCQPEHYSPVCGSDGLMYFSLCHAGCPAATETNVDGQKVYRDCSCIPQNLSSGFGHATAGKCTSTCQRKPLLLVFIFVVIFFTFLSSIPALTATLRCVRDPQRSFALGIQWIVVRILGGIPGPIAFGWVIDKACLLWQDQCGQQGSCLVYQNSAMSRYILIMGLLYKDSDSPFVQ

SEQ ID NO: 196 - protein, 683 aa, Artificial Sequence; identical to SEQ ID NO: 195
  Synthetic polypeptide

SEQ ID NO: 197 - protein, 673 aa, Artificial Sequence
  Synthetic polypeptide
MMDQARSAFSNLFGGEPLSYTRFSLARQVDGDNSHVEMKLAVDEEENADNNTKANVTKPKRCSGSICYGTIAVIVFFLIGFMIGYLGYCKGVEPKTECERLAGTESPVREEPGEDFPAARRLYWDDLKRKLSEKLDSTDFTGTIKLLNENSYVPREAGSQKDENLALYVENQFREFKLSKVWRDQHFVKIQVKDSAQNSVIIVDKNGRLVYLVENPGGYVAYSKAATVTGKLVHANFGTKKDFEDLYTPVNGSIVIVRAGKITFAEKVANAESLNAIGVLIYMDQTKFPIVNAELSFFGHAHLGTGDPYTPGFPSFNHTQFPPSRSSGLPNIPVQTISRAAAEKLFGNMEGDCPSDWKTDSTCRMVTSESKNVKLTVSNVLKEIKILNIFGVIKGFVEPDHYVVVGAQRDAWGPGAAKSGVGTALLLKLAQMFSDMVLKDGFQPSRSIIFASWSAGDFGSVGATEWLEGYLSSLHLKAFTYINLDKAVLGTSNFKVSASPLLYTLIEKTMQNVKHPVTGQFLYQDSNWASKVEKLTLDNAAFPFLAYSGIPAVSFCFCEDTDYPYLGTTMDTYKELIERIPELNKVARAAAEVAGQFVIKLTHDVELNLDYERYNSQLLSFVRDLNQYRADIKEMGLSLQWLYSARGGCSELRSRHCTPAWATRAKLCLNNNK

SEQ ID NO: 198 - protein, 673 aa, Artificial Sequence; identical to SEQ ID NO: 197
  Synthetic polypeptide

SEQ ID NO: 199 - protein, 672 aa, Artificial Sequence
  Synthetic polypeptide
MWNLLHETDSAVATARRPRWLCAGALVLAGGFFLLGFLFGWFIKSSNEATNITPKHNMKAFLDELKAENIKKFLYNFTQIPHLAGTEQNFQLAKQIQSQWKEFGLDSVELAHYDVLLSYPNKTHPNYISIINEDGNEIFNTSLFEPPPPGYENVSDIVPPFSAFSPQGMPEGDLVYVNYARTEDFFKLERDMKINCSGKIVIARYGKVFRGNKVKNAQLAGAKGVILYSDPADYFAPGVKSYPDGWNLPGGGVQRGNILNLNGAGDPLTPGYPANEYAYRRGIAEAVGLPSIPVHPIGYYDAQKLLEKMGGSAPPDSSWRGSLKVPYNVGPGFTGNFSTQKVKMHIHSTNEVTRIYNVIGTLRGAVEPDRYVILGGHRDSWVFGGIDPQSGAAVVHEIVRSFGTLKKEGWRPRRTILFASWDAEEFGLLGSTEWAEENSRLLQERGVAYINADSSIEGNYTLRVDCTPLMYSLVHNLTKELKSPDEGFEGKSLYESWTKKSPSPEFSGMPRISKLGSGNDFEVFFQRLGIASGRARYTKNWETNKFSGYPLYHSVYETYELVEKFYDPMFKYHLTVAQVRGGMVFELANSIVLPFDCRDYAVVLRKYADKIYSISMKHPQEMKTYSVSFDSLFSAVKNFTEIASKFSERLQDFDKSKKKSQFWKRKAAWRKI

SEQ ID NO: 200 - protein, 672 aa, Artificial Sequence; identical to SEQ ID NO: 199
  Synthetic polypeptide

SEQ ID NO: 201 - protein, 670 aa, Artificial Sequence
  Synthetic polypeptide
MPRNQGFSEPEYSAEYSAEYSVSLPSDPDRGVGRTHEISVRNSGSCLCLPRFMRLTFVPESLENLYQTYFKRQRHETLLVLVVFAALFDCYVVVMCAVVFSSDKLASLAVAGIGLVLDIILFVLCKKGLLPDRVTRRVLPYVLWLLITAQIFSYLGLNFARAHAASDTVGWQVFFVFSFFITLPLSLSPIVIISVVSCVVHTLVLGVTVAQQQQEELKGMQLLREILANVFLYLCAIAVGIMSYYMADRKHRKAFLEARQSLEVKMNLEEQSQQQENLMLSILPKHVADEMLKDMKKDESQKDQQQFNTMYMYRHENVSILFADIVGFTQLSSACSAQELVKLLNELFARFDKLAAKYHQLRIKILGDCYYCICGLPDYREDHAVCSILMGLAMVEAISYVREKTKTGVDMRVGVHTGTVLGGVLGQKRWQYDVWSTDVTVANKMEAGGIPGRVHISQSTMDCLKGEFDVEPGDGGSRCDYLEEKGIETYLIIASKPEVKKTATQNGLNGSALPNGAPASSKSSSPALIETKEPNGSAHSSGSTSEKPEEQDAQADNPSFPNPRRRLRLQDLADRVVDASEDEHELNQLLNEALLERESAQVVKKRNTFLLSMRFMDPEMETRYSVEKEKQSGAAFSCSCVVLLCTALVEILIDPWPLQAPAASVSSSVK

SEQ ID NO: 202 - protein, 664 aa, Artificial Sequence
  Synthetic polypeptide
MDDAVQITKISMDSWFILVLLGSGLICVSANNATTVAPSVGITRLINSSTAEPVKEEAKTSNPTSSLTSLSVAPTFSPNITLGPTYLTTVNSSDSDNGTTRTASTNSIGITISPNGTWLPDNQFTDARTEPWEGNSSTAATTPETFPPSGNSDSKDRRDETPIIAVMVALSSLLVIVFIIIVLYMLRFKKYKQAGSHSNSFRLSNGRTEDVEPQSVPLLARSPSTNRKYPPLPVDKLEEEINRRMADDNKLFREEFNALPACPIQATCEAASKEENKEKNRYVNILPYDHSRVHLTPVEGVPDSDYINASFINGYQEKNKFIAAQGPKEETVNDFWRMIWEQNTATIVMVTNLKERKECKCAQYWPDQGCWTYGNIRVSVEDVTVLVDYTVRKFCIQQVGDMTNRKPQRLITQFHFTSWPDFGVPFTPIGMLKFLKKVKACNPQYAGAIVVHCSAGVGRTGTFVVIDAMLDMMHTERKVDVYGFVSRIRAQRCQMVQTDMQYVFIYQALLEHYLYGDTELEVTSLETHLQKIYNKIPGTSNNGLEEEFKKLTSIKIQNDKMRTGNLPANMKKNRVLQIIPYEFNRVIIPVKRGEENTDYVNASFIDGYRQKDSYIASQGPLLHTIEDFWRMIWEWKSCSIVMLTELEERGQAWPHWDCFSQDHQ

SEQ ID NO: 203 - protein, 661 aa, Artificial Sequence
  Synthetic polypeptide
MLPGLALLLLAAWTARALEVPTDGNAGLLAEPQIAMFCGRLNMHMNVQNGKWDSDPSGTKTCIDTKEGILQYCQEVYPELQITNVVEANQPVTIQNWCKRGRKQCKTHPHFVIPYRCLVGEFVSDALLVPDKCKFLHQERMDVCETHLHWHTVAKETCSEKSTNLHDYGMLLPCGIDKFRGVEFVCCPLAEESDNVDSADAEEDDSDVWWGGADTDYADGSEDKVVEVAEEEEVAEVEEEEADDDEDDEDGDEVEEEAEEPYEEATERTTSIATTTTTTTESVEEVVREVCSEQAETGPCRAMISRWYFDVTEGKCAPFFYGGCGGNRNNFDTEEYCMAVCGSAMSQSLLKTTQEPLARDPVKLPTTAASTPDAVDKYLETPGDENEHAHFQKAKERLEAKHRERMSQVMREWEEAERQAKNLPKADKKAVIQHFQEKVESLEQEAANERQQLVETHMARVEAMLNDRRRLALENYITALQAVPPRPRHVFNMLKKYVRAEQKDRQHTLKHFEHVRMVDPKKAAQIRSQVMTHLRVIYERMNQSLSLLYNVPAVAEEIQDEVDELLQKEQNYSDDVLANMISEPRISYGNDALMPSLTETKTTVELLPVNGEFSLDDLQPWHSFGADSVPANTENEVEPVDARPAADRGLTTRPGYQVEAF

SEQ ID NO: 204 - protein, 660 aa, Artificial Sequence
  Synthetic polypeptide
MKENYCLQAALVCLGMLCHSHAFAPERRGHLRPSFHGHHEKGKEGQVLQRSKRGWVWNQFFVIEEYTGPDPVLVGRLHSDIDSGDGNIKYILSGEGAGTIFVIDDKSGNIHATKTLDREERAQYTLMAQAVDRDTNRPLEPPSEFIVKVQDINDNPPEFLHETYHANVPERSNVGTSVIQVTASDADDPTYGNSAKLVYSILEGQPYFSVEAQTGIIRTALPNMDREAKEEYHVVIQAKDMGGHMGGLSGTTKVTITLTDVNDNPPKFPQSVYQMSVSEAAVPGEEVGRVKAKDPDIGENGLVTYNIVDGDGMESFEITTDYETQEGVIKLKKPVDFETKRAYSLKVEAANVHIDPKFISNGPFKDTVTVKISVEDADEPPMFLAPSYIHEVQENAAAGTVVGRVHAKDPDAANSPIRYSIDRHTDLDRFFTINPEDGFIKTTKPLDREETAWLNITVFAAEIHNRHQEAKVPVAIRVLDVNDNAPKFAAPYEGFICESDQTKPLSNQPIVTISADDKDDTANGPRFIFSLPPEIIHNPNFTVRDNRDNTAGVYARRGGFSRQKQDLYLLPIVISDGGIPPMSSTNTLTIKVCGCDVNGALLSCNAEAYILNAGLSTGALIAILACIVILLGPCEPLQCHSTPSSFQCTMLQPHWPSFGS

SEQ ID NO: 205 - protein, 660 aa, Artificial Sequence; identical to SEQ ID NO: 204
  Synthetic polypeptide

SEQ ID NO: 206 - protein, 659 aa, Artificial Sequence
  Synthetic polypeptide
MDQNQHLNKTAEAQPSENKKTRYCNGLKMFLAALSLSFIAKTLGAIIMKSSIIHIERRFEISSSLVGFIDGSFEIGNLLVIVFVSYFGSKLHRPKLIGIGCFIMGIGGVLTALPHFFMGYYRYSKETNINSSENSTSTLSTCLINQILSLNRASPEIVGKGCLKESGSYMWIYVFMGNMLRGIGETPIVPLGLSYIDDFAKEGHSSLYLGILNAIAMIGPIIGFTLGSLFSKMYVDIGYVDLSTIRITPTDSRWVGAWWLNFLVSGLFSIISSIPFFFLPQTPNKPQKERKASLSLHVLETNDEKDQTANLTNQGKNITKNVTGFFQSFKSILTNPLYVMFVLLTLLQVSSYIGAFTYVFKYVEQQYGQPSSKANILLGVITIPIFASGMFLGGYIIKKFKLNTVGIAKFSCFTAVMSLSFYLLYFFILCENKSVAGLTMTYDGNNPVTSHRDVPLSYCNSDCNCDESQWEPVCGNNGITYISPCLAGCKSSSGNKKPIVFYNCSCLEVTGLQNRNYSAHLGECPRDDACTRKFYFFVAIQVLNLFFSALGGTSHVMLIVKIVQPELKSLALGFHSMVIRALGGILAPIYFGALIDTTCIKWSTNNCGTRGSCRTYNSTSFSSDSSSEMSILFTIAHSAKSDSPETFSCSGCLLFLAAL

SEQ ID NO: 207 - protein, 657 aa, Artificial Sequence
  Synthetic polypeptide
MTAGSSYPLFLAAYACTGCLAERLGWFIKSSNEATNITPKHNMKAFLDELKAENIKKFLYNFTQIPHLAGTEQNFQLAKQIQSQWKEFGLDSVELAHYDVLLSYPNKTHPNYISIINEDGNEIFNTSLFEPPPPGYENVSDIVPPFSAFSPQGMPEGDLVYVNYARTEDFFKLERDMKINCSGKIVIARYGKVFRGNKVKNAQLAGAKGVILYSDPADYFAPGVKSYPDGWNLPGGGVQRGNILNLNGAGDPLTPGYPANEYAYRRGIAEAVGLPSIPVHPIGYYDAQKLLEKMGGSAPPDSSWRGSLKVPYNVGPGFTGNFSTQKVKMHIHSTNEVTRIYNVIGTLRGAVEPDRYVILGGHRDSWVFGGIDPQSGAAVVHEIVRSFGTLKKEGWRPRRTILFASWDAEEFGLLGSTEWAEENSRLLQERGVAYINADSSIEGNYTLRVDCTPLMYSLVHNLTKELKSPDEGFEGKSLYESWTKKSPSPEFSGMPRISKLGSGNDFEVFFQRLGIASGRARYTKNWETNKFSGYPLYHSVYETYELVEKFYDPMFKYHLTVAQVRGGMVFELANSIVLPFDCRDYAVVLRKYADKIYSISMKHPQEMKTYSVSFDSLFSAVKNFTEIASKFSERLQDFDKSKKKSQFWKRKAAWRKI

SEQ ID NO: 208 - protein, 657 aa, Artificial Sequence; identical to SEQ ID NO: 207
  Synthetic polypeptide

SEQ ID NO: 209 - protein, 656 aa, Artificial Sequence
  Synthetic polypeptide
MAVESEYSLLRTEASFPTMKMFCVSHTLPRVEVMFVSGPQTRERTEPVDPRWQCLVQMWAGCLLEEGLCGASEACVNDGVFGRCQKVPAMDFYRYEVSPVALQRLRVALQKLSGTGFTWQDDYTQYVMDQELADLPKTYLRRPEASSPARPSKHSVGSERRYSREGGAALANALRRHLPFLEALSQAPASDVLARTHTAQDRPPAEGDDRFSESILTYVAHTSALTYPPGSRTQLREDLLPRTLGQLQPDELSPKVDSGVDRHHLMAALSAYAAQRPPAPPGEGSLEPQYLLRAPSRMPRPLLAPAAPQKWPSPLGDSEDPSSTGDGARIHTLLKDLQRQPAEVRGLSGLELDGMAELMAGLMQGVDHGVARGSPGRAALGESGEQADGPKATLRGDSFPDDGVQDDDDRLYQEVHRLSATLGGLLQDHGSRLLPGALPFARPLDMERKKSEHPESSLSSEEETAGVENVKSQTYSKDLLGQQPHSEPGAAAFGELQNQMPGPSKEEQSLPAGAQEALSDGLQLEVQPSEEEARGYIVTDRDPLRPEEGRRLVEDVARLLQVPSSAFADVEVLGPAVTFKVSANVQNVTTEDVEKATVDNKDKLEETSGLKILQTGVGSKDMLKSWTSAAQNGTFRGHRTVADTVRLVKEAPCCSR

SEQ ID NO: 210 - protein, 655 aa, Artificial Sequence
  Synthetic polypeptide
MMGLFPRTTGALAIFVVVILVHGELRIETKGQYDEEEMTMQQAKRRQKREWVKFAKPCREGEDNSKRNPIAKITSDYQATQKITYRISGVGIDQPPFGIFVVDKNTGDINITAIVDREETPSFLITCRALNAQGLDVEKPLILTVKILDINDNPPVFSQQIFMGEIEENSASNSLVMILNATDADEPNHLNSKIAFKIVSQEPAGTPMFLLSRNTGEVRTLTNSLDREQASSYRLVVSGADKDGEGLSTQCECNIKVKDVNDNFPMFRDSQYSARIEENILSSELLRFQVTDLDEEYTDNWLAVYFFTSGNEGNWFEIQTDPRTNEGILKVVKALDYEQLQSVKLSIAVKNKAEFHQSVISRYRVQSTPVTIQVINVREGIAFRPASKTFTVQKGISSKKLVDYILGTYQAIDEDTNKAASNVKYVMGRNDGGYLMIDSKTAEIKFVKNMNRDSTFIVNKTITAEVLAIDEYTGKTSTGTVYVRVPDFNDNCPTAVLEKDAVCSSSPSVVVSARTLNNRYTGPYTFALEDQPVKLPAVWSITTLNATSALLRAQEQIPPGVYHISLVLTDSQNNRCEMPRSLTLEVCQCDNRGICGTSYPTTSPGTRYGRPHSGRLGPAAIGLLLLGLLLLLLAPLLLLTCDCGAGSTGGVTGGS

SEQ ID NO: 211 - protein, 654 aa, Artificial Sequence
  Synthetic polypeptide
MVQKSRNGGVYPGPSGEKKLKVGFVGLDPGAPDSTRDGALLIAGSEAPKRGSILSKPRAGGAGAGKPPKRNAFYRKLQNFLYNVLERPRGWAFIYHAYVFLLVFSCLVLSVFSTIKEYEKSSEGALYILEIVTIVVFGVEYFVRIWAAGCCCRYRGWRGRLKFARKPFCVIDIMVLIASIAVLAAGSQGNVFATSALRSLRFLQILRMIRMDRRGGTWKLLGSVVYAHSKELVTAWYIGFLCLILASFLVYLAEKGENDHFDTYADALWWGLITLTTIGYGDKYPQTWNGRLLAATFTLIGVSFFALPAGILGSGFALKVQEQHRQKHFEKRRNPAAGLIQSAWRFYATNLSRTDLHSTWQYYERTVTVPMYRLIPPLNQLELLRNLKSKSGLAFRKDPPPEPSPSQKVSLKDRVFSSPRGVAAKGKGSPQAQTVRRSPSADQSLEDSPSKVPKSWSFGDRSRARQAFRIKGAASRQNSEEASLPGEDIVDDKSCPCEFVTEDLTPGLKVSIRAVCVMRFLVSKRKFKESLRPYDVMDVIEQYSAGHLDMLSRIKSLQTGIDMIVGPPPPSTPRHKKYPTKGPTAPPRESPQYSPRVDQIVGRGPAITDKDRTKGPAEAELPEDPSMMGRLGKVEKQEPPQRTLVLGPASESRA

SEQ ID NO: 212 - protein, 654 aa, Artificial Sequence
  Synthetic polypeptide
MVQKSRNGGVYPGPSGEKKLKVGFVGLDPGAPDSTRDGALLIAGSEAPKRGSILSKPRAGGAGAGKPPKRNAFYRKLQNFLYNVLERPRGWAFIYHAYVFLLVFSCLVLSVFSTIKEYEKSSEGALYILEIVTIVVFGVEYFVRIWAAGCCCRYRGWRGRLKFARKPFCVIDIMVLIASIAVLAAGSQGNVFATSALRSLRFLQILRMIRMDRRGGTWKLLGSVVYAHSKELVTAWYIGFLCLILASFLVYLAEKGENDHFDTYADALWWGLITLTTIGYGDKYPQTWNGRLLAATFTLIGVSFFALPAGILGSGFALKVQEQHRQKHFEKRRNPAAGLIQSAWRFYATNLSRTDLHSTWQYYERTVTVPMYRLIPPLNQLELLRNLKSKSGLAFRKDPPPEPSPSQKVSLKDRVFSSPRGVAAKGKGSPQAQTVRRSPSADQSLEDSPSKVPKSWSFGDRSRARQAFRIKGAASRQNSEEASLPGEDIVDDKSCPCEFVTEDLTPGLKVSIRAVCVMRFLVSKRKFKESLRPYDVMDVIEQYSAGHLDMLSRIKSLQSRIDMIVGPPPPSTPRHKKYPTKGPTAPPRESPQYSPRVDQIVGRGPAITDKDRTKGPAEAELPEDPSMMGRLGKVEKQEPPQRTLVLGPASESRA

SEQ ID NO: 213 - protein, 653 aa, Artificial Sequence
  Synthetic polypeptide
MASPPHQQLLHHHSTEVSCDSSGDSNSVRVKINPKQLSSNSHPKHCKYSISSSCSSSGDSGGVPRRVGGGGRLRRQKKLPQLFERASSRWWDPKFDSVNLEEACLERCFPQTQRRFRYALFYIGFACLLWSIYFAVHMRSRLIVMVAPALCFLLVCVGFFLFTFTKLYARHYAWTSLALTLLVFALTLAAQFQVLTPVSGRGDSSNLTATARPTDTCLSQVGSFSMCIEVLFLLYTVMHLPLYLSLCLGVAYSVLFETFGYHFRDEACFPSPGAGALHWELLSRGLLHGCIHAIGVHLFVMSQVRSRSTFLKVGQSIMHGKDLEVEKALKERMIHSVMPRIIADDLMKQGDEESENSVKRHATSSPKNRKKKSSIQKAPIAFRPFKMQQIEEVSILFADIVGFTKMSANKSAHALVGLLNDLFGRFDRLCEETKCEKISTLGDCYYCVAGCPEPRADHAYCCIEMGLGMIKAIEQFCQEKKEMVNMRVGVHTGTVLCGILGMRRFKFDVWSNDVNLANLMEQLGVAGKVHISEATAKYLDDRYEMEDGKVIERLGQSVVADQLKGLKTYLISGQRAKESRCSCAEALLSGFEVIDGSQVSSGPRGQGTASSGNVSDLAQTVKTFDNLKCGGDKEETSRDCWEMSRNGACGRQG

SEQ ID NO: 214 - protein, 653 aa, Artificial Sequence
  Synthetic polypeptide
MDSWFILVLLGSGLICVSANNATTVAPSVGITRLINSSTAEPVKEEAKTSNPTSSLTSLSVAPTFSPNITLGPTYLTTVNSSDSDNGTTRTASTNSIGITISPNGTWLPDNQFTDARTEPWEGNSSTAATTPETFPPSGNSDSKDRRDETPIIAVMVALSSLLVIVFIIIVLYMLRFKKYKQAGSHSNSFRLSNGRTEDVEPQSVPLLARSPSTNRKYPPLPVDKLEEEINRRMADDNKLFREEFNALPACPIQATCEAASKEENKEKNRYVNILPYDHSRVHLTPVEGVPDSDYINASFINGYQEKNKFIAAQGPKEETVNDFWRMIWEQNTATIVMVTNLKERKECKCAQYWPDQGCWTYGNIRVSVEDVTVLVDYTVRKFCIQQVGDMTNRKPQRLITQFHFTSWPDFGVPFTPIGMLKFLKKVKACNPQYAGAIVVHCSAGVGRTGTFVVIDAMLDMMHTERKVDVYGFVSRIRAQRCQMVQTDMQYVFIYQALLEHYLYGDTELEVTSLETHLQKIYNKIPGTSNNGLEEEFKKLTSIKIQNDKMRTGNLPANMKKNRVLQIIPYEFNRVIIPVKRGEENTDYVNASFIDGYRQKDSYIASQGPLLHTIEDFWRMIWEWKSCSIVMLTELEERGQAWPHWDCFSQDHQ

SEQ ID NO: 215 - protein, 653 aa, Artificial Sequence; identical to SEQ ID NO: 214
  Synthetic polypeptide

SEQ ID NO: 216 - protein, 646 aa, Artificial Sequence
  Synthetic polypeptide
MVQKSRNGGVYPGPSGEKKLKVGFVGLDPGAPDSTRDGALLIAGSEAPKRGSILSKPRAGGAGAGKPPKRNAFYRKLQNFLYNVLERPRGWAFIYHAYVFLLVFSCLVLSVFSTIKEYEKSSEGALYILEIVTIVVFGVEYFVRIWAAGCCCRYRGWRGRLKFARKPFCVIDIMVLIASIAVLAAGSQGNVFATSALRSLRFLQILRMIRMDRRGGTWKLLGSVVYAHSKELVTAWYIGFLCLILASFLVYLAEKGENDHFDTYADALWWGLITLTTIGYGDKYPQTWNGRLLAATFTLIGVSFFALPAGILGSGFALKVQEQHRQKHFEKRRNPAAGLIQSAWRFYATNLSRTDLHSTWQYYERTVTVPMYSSQTQTYGASRLIPPLNQLELLRNLKSKSGLAFRKDPPPEPSPSKGSPCRGPLCGCCPGRSSQKVSLKDRVFSSPRGVAAKGKGSPQAQTVRRSPSADQSLEDSPSKVPKSWSFGDRSRARQAFRIKGAASRQNSEEASLPGEDIVDDKSCPCEFVTEDLTPGLKVSIRAVCVMRFLVSKRKFKESLRPYDVMDVIEQYSAGHLDMLSRIKSLQSRVDQIVGRGPAITDKDRTKGPAEAELPEDPSMMGRLGKVEKQEPPQRTLVLGPASESRA

SEQ ID NO: 217 - protein, 646 aa, Artificial Sequence
  Synthetic polypeptide
MVQKSRNGGVYPGPSGEKKLKVGFVGLDPGAPDSTRDGALLIAGSEAPKRGSILSKPRAGGAGAGKPPKRNAFYRKLQNFLYNVLERPRGWAFIYHAYVFLLVFSCLVLSVFSTIKEYEKSSEGALYILEIVTIVVFGVEYFVRIWAAGCCCRYRGWRGRLKFARKPFCVIDIMVLIASIAVLAAGSQGNVFATSALRSLRFLQILRMIRMDRRGGTWKLLGSVVYAHSKELVTAWYIGFLCLILASFLVYLAEKGENDHFDTYADALWWGLITLTTIGYGDKYPQTWNGRLLAATFTLIGVSFFALPAGILGSGFALKVQEQHRQKHFEKRRNPAAGLIQSAWRFYATNLSRTDLHSTWQYYERTVTVPMYSSQTQTYGASRLIPPLNQLELLRNLKSKSGLAFRKDPPPEPSPSKGSPCRGPLCGCCPGRSSQKVSLKDRVFSSPRGVAAKGKGSPQAQTVRRSPSADQSLEDSPSKVPKSWSFGDRSRARQAFRIKGAASRQNSEEASLPGEDIVDDKSCPCEFVTEDLTPGLKVSIRAVCVMRFLVSKRKFKESLRPYDVMDVIEQYSAGHLDMLSRIKSLQSQVDQIVGRGPAITDKDRTKGPAEAELPEDPSMMGRLGKVEKQEPPQRTLVLGPASESRA

SEQ ID NO: 218 - protein, 644 aa, Artificial Sequence
  Synthetic polypeptide
MDSWFILVLLGSGLICVSANNATTVAPSVGITRLINSSTAEPVKEEAKTSNPTSSLTSLSVAPTFSPNITLGPTYLTTVNSSDSDNGTTRTASTNSIGITISPNGTWLPDNQFTDARTEPWEGNSSTAATTPETFPPSDETPIIAVMVALSSLLVIVFIIIVLYMLRFKKYKQAGSHSNSFRLSNGRTEDVEPQSVPLLARSPSTNRKYPPLPVDKLEEEINRRMADDNKLFREEFNALPACPIQATCEAASKEENKEKNRYVNILPYDHSRVHLTPVEGVPDSDYINASFINGYQEKNKFIAAQGPKEETVNDFWRMIWEQNTATIVMVTNLKERKECKCAQYWPDQGCWTYGNIRVSVEDVTVLVDYTVRKFCIQQVGDMTNRKPQRLITQFHFTSWPDFGVPFTPIGMLKFLKKVKACNPQYAGAIVVHCSAGVGRTGTFVVIDAMLDMMHTERKVDVYGFVSRIRAQRCQMVQTDMQYVFIYQALLEHYLYGDTELEVTSLETHLQKIYNKIPGTSNNGLEEEFKKLTSIKIQNDKMRTGNLPANMKKNRVLQIIPYEFNRVIIPVKRGEENTDYVNASFIDGYRQKDSYIASQGPLLHTIEDFWRMIWEWKSCSIVMLTELEERGQAWPHWDCFSQDHQ

SEQ ID NO: 219 - protein, 644 aa, Artificial Sequence; identical to SEQ ID NO: 218
  Synthetic polypeptide

SEQ ID NO: 220 - protein, 644 aa, Artificial Sequence; identical to SEQ ID NO: 218
  Synthetic polypeptide

SEQ ID NO: 221 - protein, 642 aa, Artificial Sequence
  Synthetic polypeptide
MLPGLALLLLAAWTARALEVPTDGNAGLLAEPQIAMFCGRLNMHMNVQNGKWDSDPSGTKTCIDTKEGILQYCQEVYPELQITNVVEANQPVTIQNWCKRGRKQCKTHPHFVIPYRCLVGEFVSDALLVPDKCKFLHQERMDVCETHLHWHTVAKETCSEKSTNLHDYGMLLPCGIDKFRGVEFVCCPLAEESDNVDSADAEEDDSDVWWGGADTDYADGSEDKVVEVAEEEEVAEVEEEEADDDEDDEDGDEVEEEAEEPYEEATERTTSIATTTTTTTESVEEVVREVCSEQAETGPCRAMISRWYFDVTEGKCAPFFYGGCGGNRNNFDTEEYCMAVCGSAIPTTAASTPDAVDKYLETPGDENEHAHFQKAKERLEAKHRERMSQVMREWEEAERQAKNLPKADKKAVIQHFQEKVESLEQEAANERQQLVETHMARVEAMLNDRRRLALENYITALQAVPPRPRHVFNMLKKYVRAEQKDRQHTLKHFEHVRMVDPKKAAQIRSQVMTHLRVIYERMNQSLSLLYNVPAVAEEIQDEVDELLQKEQNYSDDVLANMISEPRISYGNDALMPSLTETKTTVELLPVNGEFSLDDLQPWHSFGADSVPANTENEVEPVDARPAADRGLTTRPGYQVEAF

SEQ ID NO: 222 - protein, 637 aa, Artificial Sequence
  Synthetic polypeptide
MDQLEDLLVLFINYVPTDGNAGLLAEPQIAMFCGRLNMHMNVQNGKWDSDPSGTKTCIDTKEGILQYCQEVYPELQITNVVEANQPVTIQNWCKRGRKQCKTHPHFVIPYRCLVGEFVSDALLVPDKCKFLHQERMDVCETHLHWHTVAKETCSEKSTNLHDYGMLLPCGIDKFRGVEFVCCPLAEESDNVDSADAEEDDSDVWWGGADTDYADGSEDKVVEVAEEEEVAEVEEEEADDDEDDEDGDEVEEEAEEPYEEATERTTSIATTTTTTTESVEEVVREVCSEQAETGPCRAMISRWYFDVTEGKCAPFFYGGCGGNRNNFDTEEYCMAVCGSAIPTTAASTPDAVDKYLETPGDENEHAHFQKAKERLEAKHRERMSQVMREWEEAERQAKNLPKADKKAVIQHFQEKVESLEQEAANERQQLVETHMARVEAMLNDRRRLALENYITALQAVPPRPRHVFNMLKKYVRAEQKDRQHTLKHFEHVRMVDPKKAAQIRSQVMTHLRVIYERMNQSLSLLYNVPAVAEEIQDEVDELLQKEQNYSDDVLANMISEPRISYGNDALMPSLTETKTTVELLPVNGEFSLDDLQPWHSFGADSVPANTENEVEPVDARPAADRGLTTRPGYQVEAF

SEQ ID NO: 223 - protein, 637 aa, Artificial Sequence
  Synthetic polypeptide
MELAALCRWGLLLALLPPGAASTQVCTGTDMKLRLPASPETHLDMLRHLYQGCQVVQGNLELTYLPTNASLSFLQDIQEVQGYVLIAHNQVRQVPLQRLRIVRGTQLFEDNYALAVLDNGDPLNNTTPVTGASPGGLRELQLRSLTEILKGGVLIQRNPQLCYQDTILWKDIFHKNNQLALTLIDTNRSRACHPCSPMCKGSRCWGESSEDCQSLTRTVCAGGCARCKGPLPTDCCHEQCAAGCTGPKHSDCLACLHFNHSGICELHCPALVTYNTDTFESMPNPEGRYTFGASCVTACPYNYLSTDVGSCTLVCPLHNQEVTAEDGTQRCEKCSKPCARVCYGLGMEHLREVRAVTSANIQEFAGCKKIFGSLAFLPESFDGDPASNTAPLQPEQLQVFETLEEITGYLYISAWPDSLPDLSVFQNLQVIRGRILHNGAYSLTLQGLGISWLGLRSLRELGSGLALIHHNTHLCFVHTVPWDQLFRNPHQALLHTANRPEDECVGEGLACHQLCARGHCWGPGPTQCVNCSQFLRGQECVEECRVLQGLPREYVNARHCLPCHPECQPQNGSVTCFGPEADQCVACAHYKDPPFCVARCPSGVKPDLSYMPIWKFPDEEGACQPCPINCTHSVVVR

SEQ ID NO: 224 - protein, 637 aa, Artificial Sequence; identical to SEQ ID NO: 223
  Synthetic polypeptide

SEQ ID NO: 225 - protein, 637 aa, Artificial Sequence
  Synthetic polypeptide
MENDPSRRRESISLTPVAKGLENMGADFLESLEEGQLPRSDLSPAEIRSSWSEAAPKPFSRWRNLQPALRARSFCREHMQLFRWIGTGLLCTGLSAFLLVACLLDFQRALALFVLTCVVLTFLGHRLLKRLLGPKLRRFLKPQGHPRLLLWFKRGLALAAFLGLVLWLSLDTSQRPEQLVSFAGICVFVALLFACSKHHCAVSWRAVSWGLGLQFVLGLLVIRTEPGFIAFEWLGEQIRIFLSYTKAGSSFVFGEALVKDVFAFQVLPIIVFFSCVISVLYHVGLMQWVILKIAWLMQVTMGTTATETLSVAGNIFVSQTEAPLLIRPYLADMTLSEVHVVMTGGYATIAGSLLGAYISFGIDATSLIAASVMAAPCALALSKLVYPEVEESKFRREEGVKLTYGDAQNLIEAASTGAAISVKVVANIAANLIAFLAVLDFINAALSWLGDMVDIQGLSFQLICSYILRPVAFLMGVAWEDCPVVAELLGIKLFLNEFVAYQDLSKYKQRRLAGAEEWVGDRKQWISVRAEVLTTFALCGFANFSSIGIMLGGLTSMVPQRKSDFSQIVLRALFTGACVSLVNACMAGILYMPRGAEVDCMSLLNTTLSSSSFEIYQCCREAFQSWNADGKVSKLGP

SEQ ID NO: 226 - protein, 637 aa, Artificial Sequence; identical to SEQ ID NO: 225
  Synthetic polypeptide

SEQ ID NO: 227 - protein, 637 aa, Artificial Sequence; identical to SEQ ID NO: 225
  Synthetic polypeptide

SEQ ID NO: 228 - protein, 634 aa, Artificial Sequence
  Synthetic polypeptide
MEPLLLGRGLIVYLMFLLLKFSKAIEIPSSVQQVPTIIKQSKVQVAFPFDEYFQIECEAKGNPEPTFSWTKDGNPFYFTDHRIIPSNNSGTFRIPNEGHISHFQGKYRCFASNKLGIAMSEEIEFIVPSVPKFPKEKIDPLEVEEGDPIVLPCNPPKGLPPLHIYWMNIELEHIEQDERVYMSQKGDLYFANVEEKDSRNDYCCFAAFPRLRTIVQKMPMKLTVNSLKHANDSSSSTEIGSKANSIKQRKPKLLLPPTESGSESSITILKGEILLLECFAEGLPTPQVDWNKIGGDLPKGRETKENYGKTLKIENVSYQDKGNYRCTASNFLGTATHDFHVIVEEPPRWTKKPQSAVYSTGSNGILLCEAEGEPQPTIKWRVNGSPVDNHPFAGDVVFPREISFTNLQPNHTAVYQCEASNVHGTILANANIDVVDVRPLIQTKDGENYATVVGYSAFLHCEFFASPEAVVSWQKVEEVKPLEGRRYHIYENGTLQINRTTEEDAGSYSCWVENAIGKTAVTANLDIRNATKLRVSPKNPRIPKLHMLELHCESKCDSHLKHSLKLSWSKDGEAFEINGTEDGRIIIDGANLTISNVTLEDQGIYCCSAHTALDSAADITQVTVLDSLSTSSLT

SEQ ID NO: 229 - protein, 634 aa, Artificial Sequence
  Synthetic polypeptide
MAAAGARLSPGPGSGLRGRPRLCFHPGPPPLLPLLLLFLLLLPPPPLLAGATAAASREPDSPCRLKTVTVSTLPALRESDIGWSGARAGAGAGTGAGAAAAAASPGSPGSAGTAAESRLLLFVRNELPGRIAVQDDLDNTELPFFTLEMSGTAADISLVHWRQQWLENGTLYFHVSMSSSGQLAQATAPTLQEPSEIVEEQMHILHISVMGGLIALLLLLLVFTVALYAQRRWQKRRRIPQKSASTEATHEIHYIPSVLLGPQARESFRSSRLQTHNSVIGVPIRETPILDDYDCEEDEEPPRRANHVSREDEFGSQVTHTLDSLGHPGEEKVDFEKKAAAEATQETVESLMQKFKESFRANTPIEIGQLQPPLRSTSAGKRKRRSKSRGGISFGRAKGTSGSEADDETQLTFYTEQYRSRRRSKGLLKSPVNKTALTLIAVSSCILAMVCGSQMSCPLTVKVTLHVPEHFIADGSSFVVSEGSYLDISDWLNPAKLSLYYQINATSPWVRDLCGQRTTDACEQLCDPETGECSCHEGYAPDPVHRHLCVRSDWGQSEGPWPYTTLERGYDLVTGEQAPEKILRSTFSLGQGLWLPVSKSFVVPPVELSINPLASCKTDVLVTEDPADVRSETP

SEQ ID NO: 230 - protein, 633 aa, Artificial Sequence
  Synthetic polypeptide
MLLPLLLSSLLGGSQAMDGRFWIRVQESVMVPEGLCISVPCSFSYPRQDWTGSTPAYGYWFKAVTETTKGAPVATNHQSREVEMSTRGRFQLTGDPAKGNCSLVIRDAQMQDESQYFFRVERGSYVRYNFMNDGFFLKVTALTQKPDVYIPETLEPGQPVTVICVFNWAFEECPPPSFSWTGAALSSQGTKPTTSHFSVLSFTPRPQDHNTDLTCHVDFSRKGVSAQRTVRLRVAYAPRDLVISISRDNTPALEPQPQGNVPYLEAQKGQFLRLLCAADSQPPATLSWVLQNRVLSSSHPWGPRPLGLELPGVKAGDSGRYTCRAENRLGSQQRALDLSVQYPPENLRVMVSQANRTVLENLGNGTSLPVLEGQSLCLVCVTHSSPPARLSWTQRGQVLSPSQPSDPGVLELPRVQVEHEGEFTCHARHPLGSQHVSLSLSVHYSPKLLGPSCSWEAEGLHCSCSSQASPAPSLRWWLGEELLEGNSSQDSFEVTPSSAGPWANSSLSLHGGLSSGLRLRCEAWNVHGAQSGSILQLPDKKGLISTAFSNGAFLGIGITALLFLCLALIIMKILPKRRTQTETPRPRFSRHSTILDYINVVPTAGPLAQKRNQKATPNSPRTPLPPGHSGSRL

SEQ ID NO: 231 - protein, 633 aa, Artificial Sequence; identical to SEQ ID NO: 230
  Synthetic polypeptide

SEQ ID NO: 232 - protein, 633 aa, Artificial Sequence
  Synthetic polypeptide
MGPPLPLLLLLLLLLPPRVLPAAPSSVPRGRQLPGRLGCLLEEGLCGASEACVNDGVFGRCQKVPAMDFYRYEVSPVALQRLRVALQKLSGTGFTWQDDYTQYVMDQELADLPKTYLRRPEASSPARPSKHSVGSERRYSREGGAALANALRRHLPFLEALSQAPASDVLARTHTAQDRPPAEGDDRFSESILTYVAHTSALTYPPGSRTQLREDLLPRTLGQLQPDELSPKVDSGVDRHHLMAALSAYAAQRPPAPPGEGSLEPQYLLRAPSRMPRPLLAPAAPQKWPSPLGDSEDPSSTGDGARIHTLLKDLQRQPAEVRGLSGLELDGMAELMAGLMQGVDHGVARGSPGRAALGESGEQADGPKATLRGDSFPDDGVQDDDDRLYQEVHRLSATLGGLLQDHGSRLLPGALPFARPLDMERKKSEHPESSLSSEEETAGVENVKSQTYSKDLLGQQPHSEPGAAAFGELQNQMPGPSKEEQSLPAGAQEALSDGLQLEVQPSEEEARGYIVTDRDPLRPEEGRRLVEDVARLLQVPSSAFADVEVLGPAVTFKVSANVQNVTTEDVEKATVDNKDKLEETSGLKILQTGVGSKDMLKSWTSAAQNGTFRGHRTVADTVRLVKEAPCCSR

SEQ ID NO: 233 - protein, 630 aa, Artificial Sequence
  Synthetic polypeptide
MAAAGARLSPGPGSGLRGRPRLCFHPGPPPLLPLLLLFLLLLPPPPLLAGATAAASREPDSPCRLKTVTVSTLPALRESDIGWSGARAGAGAGTGAGAAAAAASPGSPGSAGTAAESRLLLFVRNELPGRIAVQDDLDNTELPFFTLEMSGTAADISLVHWRQQWLENGTLYFHVSMSSSGQLAQATAPTLQEPSEIVEEQMHILHISVMGGLIALLLLLLVFTVALYAQRRWQKRRRIPQKSASTEATHEIHYIPSVLLGPQARESFRSSRLQTHNSVIGVPIRETPILDDYDCEEDEEPPRRANHVSREDEFGSQVTHTLDSLGHPGEEKVDFEKKAAAEATQETVESLMQKFKESFRANTPIEIGQLQPPLRSTSAGKRKRRSKSRGGISFGRAKGTSGSEADDETQLTFYTEQYRSRRRSKGLLKSPVNKTALTLIAVSSCILAMVCGSQMSCPLTVKVTLHVPEHFIADGSSFVVSEGSYLDISDWLNPAKLSLYYQINATSPWVRDLCGQRTTDACEQLCDPETGECSCHEGYAPDPVHRHLCVRSDWGQSEGPWPYTTLERGYDLVTGEQAPEKILSLGQGLWLPVSKSFVVPPVELSINPLASCKTDVLVTEDPADVRSETP

SEQ ID NO: 234 - protein, 628 aa, Artificial Sequence
  Synthetic polypeptide
MVQKSRNGGVYPGPSGEKKLKVGFVGLDPGAPDSTRDGALLIAGSEAPKRGSILSKPRAGGAGAGKPPKRNAFYRKLQNFLYNVLERPRGWAFIYHAYVFLLVFSCLVLSVFSTIKEYEKSSEGALYILEIVTIVVFGVEYFVRIWAAGCCCRYRGWRGRLKFARKPFCVIDIMVLIASIAVLAAGSQGNVFATSALRSLRFLQILRMIRMDRRGGTWKLLGSVVYAHSKELVTAWYIGFLCLILASFLVYLAEKGENDHFDTYADALWWGLITLTTIGYGDKYPQTWNGRLLAATFTLIGVSFFALPAGILGSGFALKVQEQHRQKHFEKRRNPAAGLIQSAWRFYATNLSRTDLHSTWQYYERTVTVPMYSSQTQTYGASRLIPPLNQLELLRNLKSKSGLAFRKDPPPEPSPSQKVSLKDRVFSSPRGVAAKGKGSPQAQTVRRSPSADQSLEDSPSKVPKSWSFGDRSRARQAFRIKGAASRQNSEEASLPGEDIVDDKSCPCEFVTEDLTPGLKVSIRAVCVMRFLVSKRKFKESLRPYDVMDVIEQYSAGHLDMLSRIKSLQSRVDQIVGRGPAITDKDRTKGPAEAELPEDPSMMGRLGKVEKQEPPQRTLVLGPASESRA

SEQ ID NO: 235 - protein, 626 aa, Artificial Sequence
  Synthetic polypeptide
MTMYLWLKLLAFGFAFLDTEVFVTGQSPTPSPTGLTTAKMPSVPLSSDPLPTHTTAFSPASTFERENDFSETTTSLSPDNTSTQVSPDSLDNASAFNTTGVSSVQTPHLPTHADSQTPSAGTDTQTFSGSAANAKLNPTPGSNAISDVPGERSTASTFPTDPVSPLTTTLSLAHHSSAALPARTSNTTITANTSDAYLNASETTTLSPSGSAVISTTTIATTPSKPTCDEKYANITVDYLYNKETKLFTAKLNVNENVECGNNTCTNNEVHNLTECKNASVSISHNSCTAPDKTLILDVPPGVEKFQLHDCTQVEKADTTICLKWKNIETFTCDTQNITYRFQCGNMIFDNKEIKLENLEPEHEYKCDSEILYNNHKFTNASKIIKTDFGSPGEPQIIFCRSEAAHQGVITWNPPQRSFHNFTLCYIKETEKDCLNLDKNLIKYDLQNLKPYTKYVLSLHAYIIAKVQRNGSAAMCHFTTKSAPPSQVWNMTVSMTSDNSMHVKCRPPRDRNGPHERYHLEVEAGNTLVRNESHKNCDFRVKDLQYSTDYTFKAYFHNGDYPGEPFILHHSTSYNSKALIAFLAFLIIVTSIALLVVLYKIYDLHKKRSCNLDEQQELVERECNTI

SEQ ID NO: 236 - protein, 624 aa, Artificial Sequence
  Synthetic polypeptide
MYLWLKLLAFGFAFLDTEVFVTGQSPTPSPTGLTTAKMPSVPLSSDPLPTHTTAFSPASTFERENDFSETTTSLSPDNTSTQVSPDSLDNASAFNTTGVSSVQTPHLPTHADSQTPSAGTDTQTFSGSAANAKLNPTPGSNAISDVPGERSTASTFPTDPVSPLTTTLSLAHHSSAALPARTSNTTITANTSDAYLNASETTTLSPSGSAVISTTTIATTPSKPTCDEKYANITVDYLYNKETKLFTAKLNVNENVECGNNTCTNNEVHNLTECKNASVSISHNSCTAPDKTLILDVPPGVEKFQLHDCTQVEKADTTICLKWKNIETFTCDTQNITYRFQCGNMIFDNKEIKLENLEPEHEYKCDSEILYNNHKFTNASKIIKTDFGSPGEPQIIFCRSEAAHQGVITWNPPQRSFHNFTLCYIKETEKDCLNLDKNLIKYDLQNLKPYTKYVLSLHAYIIAKVQRNGSAAMCHFTTKSAPPSQVWNMTVSMTSDNSMHVKCRPPRDRNGPHERYHLEVEAGNTLVRNESHKNCDFRVKDLQYSTDYTFKAYFHNGDYPGEPFILHHSTSYNSKALIAFLAFLIIVTSIALLVVLYKIYDLHKKRSCNLDEQQELVERECNTI

SEQ ID NO: 237 - protein, 623 aa, Artificial Sequence
  Synthetic polypeptide
MPAVDKLLLEEALQDSPQTRSLLSVFEEDAGTLTDYTNQLLQAMQRVYGAQNEMCLATQQLSKQLLAYEKQNFALGKGDEEVISTLHYFSKVVDELNLLHTELAKQLADTMVLPIIQFREKDLTEVSTLKDLFGLASNDVCLFLEHDLSMAKYSRLPKKKENEKVKTEVGKEVAAARRKQHLSSLQYYCALNALQYRKQMAMMEPMIGFAHGQINFFKKGAEMFSKRMDSFLSSVADMVQSIQVELEAEAEKMRVSQQELLSVDESVYTPDSDVAAPQINRNLIQKAGYLNLRNKTGLVTTTWERLYFFTQGGNLMCQPRGAVAGGLIQDLDNCSVMAVDCEDRRYCFQITTPNGKSGIILQAESRKENEEWICAINNISRQIYLTDNPEAVAIKLNQTALQAVTPITSFGKKQESSCPSQNLKNSEMENENDKIVPKATASLPEAEELIAPGTPIQFDIVLPATEFLDQNRGSRRTNPFGETEDESFPEAEDSLLQQMFIVRFLGSMAVKTDSTTEVIYEAMRQVLAARAIHNIFRMTESHLMVTSQSLRNRQTPHTGEFQLASGGCPSGMKLPEEGAGSSLCYSAASTGDTQAKRVRSVPSANCSRPAEEGPEGKLTNRKL

SEQ ID NO: 238 - protein, 623 aa, Artificial Sequence
  Synthetic polypeptide
MKFAEHLSAHITPEWRKQYIQYEAFKDMLYSAQDQAPSVEVTDEDTVKRYFAKFEEKFFQTCEKELAKINTFYSEKLAEAQRRFATLQNELQSSLDAQKESTGVTTLRQRRKPVFHLSHEERVQHRNIKDLKLAFSEFYLSLILLQNYQNLNFTGFRKILKKHDKILETSRGADWRVAHVEVAPFYTCKKINQLISETEAVVTNELEDGDRQKAMKRLRVPPLGAAQPAPAWTTFRVGLFCGIFIVLNITLVLAAVFKLETDRSIWPLIRIYRGGFLLIEFLFLLGINTYGWRQAGVNHVLIFELNPRSNLSHQHLFEIAGFLGILWCLSLLACFFAPISVIPTYVYPLALYGFMVFFLINPTKTFYYKSRFWLLKLLFRVFTAPFHKVGFADFWLADQLNSLSVILMDLEYMICFYSLELKWDESKGLLPNNSEESGICHKYTYGVRAIVQCIPAWLRFIQCLRRYRDTKRAFPHLVNAGKYSTTFFMVTFAALYSTHKERGHSDTMVFFYLWIVFYIISSCYTLIWDLKMDWGLFDKNAGENTFLREEIVYPQKAYYYCAIIEDVILRFAWTIQISITSTTLLPHSGDIIATVFAPLEVFRWIVELSMKSKSMNSLEVNIG

SEQ ID NO: 239 - protein, 622 aa, Artificial Sequence
  Synthetic polypeptide
MPRGSWKPQVCTGTDMKLRLPASPETHLDMLRHLYQGCQVVQGNLELTYLPTNASLSFLQDIQEVQGYVLIAHNQVRQVPLQRLRIVRGTQLFEDNYALAVLDNGDPLNNTTPVTGASPGGLRELQLRSLTEILKGGVLIQRNPQLCYQDTILWKDIFHKNNQLALTLIDTNRSRACHPCSPMCKGSRCWGESSEDCQSLTRTVCAGGCARCKGPLPTDCCHEQCAAGCTGPKHSDCLACLHFNHSGICELHCPALVTYNTDTFESMPNPEGRYTFGASCVTACPYNYLSTDVGSCTLVCPLHNQEVTAEDGTQRCEKCSKPCARVCYGLGMEHLREVRAVTSANIQEFAGCKKIFGSLAFLPESFDGDPASNTAPLQPEQLQVFETLEEITGYLYISAWPDSLPDLSVFQNLQVIRGRILHNGAYSLTLQGLGISWLGLRSLRELGSGLALIHHNTHLCFVHTVPWDQLFRNPHQALLHTANRPEDECVGEGLACHQLCARGHCWGPGPTQCVNCSQFLRGQECVEECRVLQGLPREYVNARHCLPCHPECQPQNGSVTCFGPEADQCVACAHYKDPPFCVARCPSGVKPDLSYMPIWKFPDEEGACQPCPINCTHSVVVR

SEQ ID NO: 240 - protein, 619 aa, Artificial Sequence
  Synthetic polypeptide
MGGKQRDEDDEAYGKPVKYDPSFRGPIKNRSCTDVICCVLFLLFILGYIVVGIVAWLYGDPRQVLYPRNSTGAYCGMGENKDKPYLLYFNIFSCILSSNIISVAENGLQCPTPQVCVSSCPEDPWTVGKNEFSQTVGEVFYTKNRNFCLPGVPWNMTVITSLQQELCPSFLLPSAPALGRCFPWTNVTPPALPGITNDTTIQQGISGLIDSLNARDISVKIFEDFAQSWYWILVALGVALVLSLLFILLLRLVAGPLVLVLILGVLGVLAYGIYYCWEEYRVLRDKGASISQLGFTTNLSAYQSVQETWLAALIVLAVLEAILLLMLIFLRQRIRIAIALLKEASKAVGQMMSTMFYPLVTFVLLLICIAYWAMTALYLATSGQPQYVLWASNISSPGCEKVPINTSCNPTAHLVNSSCPGLMCVFQGYSSKGLIQRSVFNLQIYGVLGLFWTLNWVLALGQCVLAGAFASFYWAFHKPQDIPTFPLISAFIRTLRYHTGSLAFGALILTLVQIARVILEYIDHKLRGVQNPVARCIMCCFKCCLWCLEKFIKFLNRNAYIMIAIYGKNFCVSAKNAFMLLMRNIVRVVVLDKVTDLLLFFGKLLVAGESLEPGRQRLQ

SEQ ID NO: 241 - protein, 619 aa, Artificial Sequence
  Synthetic polypeptide
MMGLFPRTTGALAIFVVVILVHGELRIETKGQYDEEEMTMQQAKRRQKREWVKFAKPCREGEDNSKRNPIAKITSDYQATQKITYRISGVGIDQPPFGIFVVDKNTGDINITAIVDREETPSFLITCRALNAQGLDVEKPLILTVKILDINDNPPVFSQQIFMGEIEENSASNSLVMILNATDADEPNHLNSKIAFKIVSQEPAGTPMFLLSRNTGEVRTLTNSLDREQASSYRLVVSGADKDGEGLSTQCECNIKVKDVNDNFPMFRDSQYSARIEENILSSELLRFQVTDLDEEYTDNWLAVYFFTSGNEGNWFEIQTDPRTNEGILKVVKALDYEQLQSVKLSIAVKNKAEFHQSVISRYRVQSTPVTIQVINVREGIAFRPASKTFTVQKGISSKKLVDYILGTYQAIDEDTNKAASNVKYVMGRNDGGYLMIDSKTAEIKFVKNMNRDSTFIVNKTITAEVLAIDEYTGKTSTGTVYVRVPDFNDNCPTAVLEKDAVCSSSPSVVVSARTLNNRYTGPYTFALEDQPVKLPAVWSITTLNATSALLRAQEQIPPGVYHISLVLTDSQNNRCEMPRSLTLEVCQCDNRGICGTSYPTTSPGTRWIMRSGDRDHPG

SEQ ID NO: 242 - protein, 618 aa, Artificial Sequence
  Synthetic polypeptide
MEPLLLGRGLIVYLMFLLLKFSKAIEIPSSVQQVPTIIKQSKVQVAFPFDEYFQIECEAKGNPEPTFSWTKDGNPFYFTDHRIIPSNNSGTFRIPNEGHISHFQGKYRCFASNKLGIAMSEEIEFIVPSVPKFPKEKIDPLEVEEGDPIVLPCNPPKGLPPLHIYWMNIELEHIEQDERVYMSQKGDLYFANVEEKDSRNDYCCFAAFPRLRTIVQKMPMKLTVNSSNSIKQRKPKLLLPPTESGSESSITILKGEILLLECFAEGLPTPQVDWNKIGGDLPKGRETKENYGKTLKIENVSYQDKGNYRCTASNFLGTATHDFHVIVEEPPRWTKKPQSAVYSTGSNGILLCEAEGEPQPTIKWRVNGSPVDNHPFAGDVVFPREISFTNLQPNHTAVYQCEASNVHGTILANANIDVVDVRPLIQTKDGENYATVVGYSAFLHCEFFASPEAVVSWQKVEEVKPLEGRRYHIYENGTLQINRTTEEDAGSYSCWVENAIGKTAVTANLDIRNATKLRVSPKNPRIPKLHMLELHCESKCDSHLKHSLKLSWSKDGEAFEINGTEDGRIIIDGANLTISNVTLEDQGIYCCSAHTALDSAADITQVTVLDSLSTSSLT

SEQ ID NO: 243 - protein, 618 aa, Artificial Sequence
  Synthetic polypeptide
MVQKSRNGGVYPGPSGEKKLKVGFVGLDPGAPDSTRDGALLIAGSEAPKRGSILSKPRAGGAGAGKPPKRNAFYRKLQNFLYNVLERPRGWAFIYHAYVFLLVFSCLVLSVFSTIKEYEKSSEGALYILEIVTIVVFGVEYFVRIWAAGCCCRYRGWRGRLKFARKPFCVIDIMVLIASIAVLAAGSQGNVFATSALRSLRFLQILRMIRMDRRGGTWKLLGSVVYAHSKELVTAWYIGFLCLILASFLVYLAEKGENDHFDTYADALWWGLITLTTIGYGDKYPQTWNGRLLAATFTLIGVSFFALPAGILGSGFALKVQEQHRQKHFEKRRNPAAGLIQSAWRFYATNLSRTDLHSTWQYYERTVTVPMYRLIPPLNQLELLRNLKSKSGLAFRKDPPPEPSPSQKVSLKDRVFSSPRGVAAKGKGSPQAQTVRRSPSADQSLEDSPSKVPKSWSFGDRSRARQAFRIKGAASRQNSEEASLPGEDIVDDKSCPCEFVTEDLTPGLKVSIRAVCVMRFLVSKRKFKESLRPYDVMDVIEQYSAGHLDMLSRIKSLQSRVDQIVGRGPAITDKDRTKGPAEAELPEDPSMMGRLGKVEKQEPPQRTLVLGPASESRA

SEQ ID NO: 244 - protein, 617 aa, Artificial Sequence
  Synthetic polypeptide
MPAVDKLLLEEALQDSPQTRSLLSVFEEDAGTLTDYTNQLLQAMQRVYGAQNEMCLATQQLSKQLLAYEKQNFALGKGDEEVISTLHYFSKVVDELNLLHTELAKQLADTMVLPIIQFREKDLTEVSTLKDLFGLASNEHDLSMAKYSRLPKKKENEKVKTEVGKEVAAARRKQHLSSLQYYCALNALQYRKQMAMMEPMIGFAHGQINFFKKGAEMFSKRMDSFLSSVADMVQSIQVELEAEAEKMRVSQQELLSVDESVYTPDSDVAAPQINRNLIQKAGYLNLRNKTGLVTTTWERLYFFTQGGNLMCQPRGAVAGGLIQDLDNCSVMAVDCEDRRYCFQITTPNGKSGIILQAESRKENEEWICAINNISRQIYLTDNPEAVAIKLNQTALQAVTPITSFGKKQESSCPSQNLKNSEMENENDKIVPKATASLPEAEELIAPGTPIQFDIVLPATEFLDQNRGSRRTNPFGETEDESFPEAEDSLLQQMFIVRFLGSMAVKTDSTTEVIYEAMRQVLAARAIHNIFRMTESHLMVTSQSLRNRQTPHTGEFQLASGGCPSGMKLPEEGAGSSLCYSAASTGDTQAKRVRSVPSANCSRPAEEGPEGKLTNRKL

SEQ ID NO: 245 - protein, 617 aa, Artificial Sequence
  Synthetic polypeptide
MGETEKRIETHRIRCLSKLKMFLLAITCAFVSKTLSGSYMNSMLTQIERQFNIPTSLVGFINGSFEIGNLLLIIFVSYFGTKLHRPIMIGIGCVVMGLGCFLKSLPHFLMNQYEYESTVSVSGNLSSNSFLCMENGTQILRPTQDPSECTKEVKSLMWVYVLVGNIVRGMGETPILPLGISYIEDFAKFENSPLYIGLVETGAIIGPLIGLLLASFCANVYVDTGFVNTDDLIITPTDTRWVGAWWFGFLICAGVNVLTAIPFFFLPNTLPKEGLETNADIIKNENEDKQKEEVKKEKYGITKDFLPFMKSLSCNPIYMLFILVSVIQFNAFVNMISFMPKYLEQQYGISSSDAIFLMGIYNLPPICIGYIIGGLIMKKFKITVKQAAHIGCWLSLLEYLLYFLSFLMTCENSSVVGINTSYEGIPQDLYVENDIFADCNVDCNCPSKIWDPVCGNNGLSYLSACLAGCETSIGTGINMVFQNCSCIQTSGNSSAVLGLCDKGPDCSLMLQYFLILSAMSSFIYSLAAIPGYMVLLRCMKSEEKSLGVGLHTFCTRVFAGIPAPIYFGALMDSTCLHWGTLKCGESGACRIYDSTTFSRDTESIFSGLYFQGCWNSK

SEQ ID NO: 246 - protein, 617 aa, Artificial Sequence; identical to SEQ ID NO: 245
  Synthetic polypeptide

SEQ ID NO: 247 - protein, 616 aa, Artificial Sequence
  Synthetic polypeptide
MAVESEYSLLRTEASFPTMKMFCVSHTLPRVEVMFVSGPQTRERTEPVDPRWQCLVQMWAGCLLEEGLCGASEACVNDGVFGRCQKVPAMDFYRYEVSPVALQRLRVALQKLSGTGFTWQDDYTQYVMDQELADLPKTYLRRPEASSPARPSKHSVGSERRYSREGGAALANALRRHLPFLEALSQAPASDVLARTHTAQDRPPAEGDDRFSESILTYVAHTSALTYPPGSRTQLREDLLPRTLGQLQPDELSPKVDSGVDRHHLMAALSAYAAQRPPAPPGEGSLEPQYLLRAPSRMPRPLLAPAAPQKWPSPLGDSEDPSSTGDGARIHTLLKDLQRQPAEVRGLSGLELDGMAELMAGLMQGVDHGVARGSPGRAALGESGEQADGPKATLRGDSFPDDGVQDDDDRLYQEVHRLSATLGGLLQDHGSRLLPGALPFARPLDMERKKSEHPESSLSSEEETAGVENVKSQTYSKDLLGQQPHSEPGAAAFGELQNQMPGPSKEEQSLPAGAQEALSDGLQLEVQPSEEEARGYIVTDRDPLRPEEGRRLVEDVARLLQVPSSAFADVDSIQTTQRVRKNLHDLYIRQKTNIQTLQRTHISKKQTVPSNNGLKT

SEQ ID NO: 248 - protein, 616 aa, Artificial Sequence
  Synthetic polypeptide
MGPPLPLLLLLLLLLPPRVLPAAPSSVPRGRQLPGRLDGVFGRCQKVPAMDFYRYEVSPVALQRLRVALQKLSGTGFTWQDDYTQYVMDQELADLPKTYLRRPEASSPARPSKHSVGSERRYSREGGAALANALRRHLPFLEALSQAPASDVLARTHTAQDRPPAEGDDRFSESILTYVAHTSALTYPPGSRTQLREDLLPRTLGQLQPDELSPKVDSGVDRHHLMAALSAYAAQRPPAPPGEGSLEPQYLLRAPSRMPRPLLAPAAPQKWPSPLGDSEDPSSTGDGARIHTLLKDLQRQPAEVRGLSGLELDGMAELMAGLMQGVDHGVARGSPGRAALGESGEQADGPKATLRGDSFPDDGVQDDDDRLYQEVHRLSATLGGLLQDHGSRLLPGALPFARPLDMERKKSEHPESSLSSEEETAGVENVKSQTYSKDLLGQQPHSEPGAAAFGELQNQMPGPSKEEQSLPAGAQEALSDGLQLEVQPSEEEARGYIVTDRDPLRPEEGRRLVEDVARLLQVPSSAFADVEVLGPAVTFKVSANVQNVTTEDVEKATVDNKDKLEETSGLKILQTGVGSKDMLKSWTSAAQNGTFRGHRTVADTVRLVKEAPCCSR

SEQ ID NO: 249 - protein, 615 aa, Artificial Sequence
  Synthetic polypeptide
MAVESEYSLLRTEASFPTMKMFCVSHTLPRVEVMFVSGPQTRERTEPVDPRWQCLVQMWAGCLLEEGLCGASEACVNDGVFGRCQKVPAMDFYRYEVSPVALQRLRVALQKLSGTGFTWQDDYTQYVMDQELADLPKTYLRRPEASSPARPSKHSVGSERRYSREGGAALANALRRHLPFLEALSQAPASDVLARTHTAQDRPPAEGDDRFSESILTYVAHTSALTYPPGSRTQLREDLLPRTLGQLQPDELSPKVDSGVDRHHLMAALSAYAAQRPPAPPGEGSLEPQYLLRAPSRMPRPLLAPAAPQKWPSPLGDSEDPSSTGDGARIHTLLKDLQRQPAEVRGLSGLELDGMAELMAGLMQGVDHGVARGSPGRAALGESGEQADGPKATLRGDSFPDDGVQDDDDRLYQEVHRLSATLGGLLQDHGSRLLPGALPFARPLDMERKKSEHPESSLSSEEETAGVENVKSQTYSKDLLGQQPHSEPGAAAFGELQNQMPGPSKEEQSLPAGAQEALSDGLQLEVQPSEEEARGYIVTDRDPLRPEEGRRLVEDVARLLQVPSSAFADVDIQTTQRVRKNLHDLYIRQKTNIQTLQRTHISKKQTVPSNNGLKT

SEQ ID NO: 250 - protein, 615 aa, Artificial Sequence
  Synthetic polypeptide
MVQKSRNGGVYPGPSGEKKLKVGFVGLDPGAPDSTRDGALLIAGSEAPKRGSILSKPRAGGAGAGKPPKRNAFYRKLQNFLYNVLERPRGWAFIYHAYVFLLVFSCLVLSVFSTIKEYEKSSEGALYILEIVTIVVFGVEYFVRIWAAGCCCRYRGWRGRLKFARKPFCVIDIMVLIASIAVLAAGSQGNVFATSALRSLRFLQILRMIRMDRRGGTWKLLGSVVYAHSKELVTAWYIGFLCLILASFLVYLAEKGENDHFDTYADALWWGLITLTTIGYGDKYPQTWNGRLLAATFTLIGVSFFALPAGILGSGFALKVQEQHRQKHFEKRRNPAAGLIQSAWRFYATNLSRTDLHSTWQYYERTVTVPMYSSQTQTYGASRLIPPLNQLELLRNLKSKSGLAFRKDPPPEPSPSPRGVAAKGKGSPQAQTVRRSPSADQSLEDSPSKVPKSWSFGDRSRARQAFRIKGAASRQNSEASLPGEDIVDDKSCPCEFVTEDLTPGLKVSIRAVCVMRFLVSKRKFKESLRPYDVMDVIEQYSAGHLDMLSRIKSLQSRVDQIVGRGPAITDKDRTKGPAEAELPEDPSMMGRLGKVEKQEPPQRTLVLGPASESRA

SEQ ID NO: 251 - protein, 611 aa, Artificial Sequence
  Synthetic polypeptide
MLCCLLVRASNLPSAKKDRRSDPVASLTFRGVKKRTKVIKNSVNPVWNEGFEWDLKGIPLDQGSELHVVVKDHETMGRNRFLGEAKVPLREVLATPSLSASFNAPLLDTKKQPTGASLVLQVSYTPLPGAVPLFPPPTPLEPSPTLPDLDVVAGGGQSRAETWSLLSDSTMDTRYSGKKWPAPTDTGGEEDTEDQGLTGDEAEPFLDQSGGPGAPTTPRKLPSRPPPHYPGIKRKRSAPTSRKLLSDKPQDFQIRVQVIEGRQLPGVNIKPVVKVTAAGQTKRTRIHKGNSPLFNETLFFNLFDSPGELFDEPIFITVVDSRSLRTDALLGEFRMDVGTIYREPRHAYLRKWLLLSDPDDFSAGARGYLKTSLCVLGPGDEAPLERKDPSEDKEDIESNLLRPTGVALRGAHFCLKVFRAEDLPQMDDAVMDNVKQIFGFESNKKNLVDPFVEVSFAGKMLCSKILEKTANPQWNQNITLPAMFPSMCEKMRIRIIDWDRLTHNDIVATTYLSMSKISAPGGEIEEEPAGAVKPSKASDLDDYLGFLPTFGPCYINLYGSPREFTGFPDPYTELNTGKAELASGTVHLGGLSYPPNSLGHAFLTCRGDEVG

SEQ ID NO: 252 - protein, 610 aa, Artificial Sequence
  Synthetic polypeptide
MLRVFILYAENVHTPDTDISDAYCSAVFAGVKKRTKVIKNSVNPVWNEGFEWDLKGIPLDQGSELHVVVKDHETMGRNRFLGEAKVPLREVLATPSLSASFNAPLLDTKKQPTGASLVLQVSYTPLPGAVPLFPPPTPLEPSPTLPDLDVVAGGGQSRAETWSLLSDSTMDTRYSGKKWPAPTDTGGEEDTEDQGLTGDEAEPFLDQSGGPGAPTTPRKLPSRPPPHYPGIKRKRSAPTSRKLLSDKPQDFQIRVQVIEGRQLPGVNIKPVVKVTAAGQTKRTRIHKGNSPLFNETLFFNLFDSPGELFDEPIFITVVDSRSLRTDALLGEFRMDVGTIYREPRHAYLRKWLLLSDPDDFSAGARGYLKTSLCVLGPGDEAPLERKDPSEDKEDIESNLLRPTGVALRGAHFCLKVFRAEDLPQMDDAVMDNVKQIFGFESNKKNLVDPFVEVSFAGKMLCSKILEKTANPQWNQNITLPAMFPSMCEKMRIRIIDWDRLTHNDIVATTYLSMSKISAPGGEIEEEPAGAVKPSKASDLDDYLGFLPTFGPCYINLYGSPREFTGFPDPYTELNTGKAELASGTVHLGGLSYPPNSLGHAFLTCRGDEVG

SEQ ID NO: 253 - protein, 609 aa, Artificial Sequence
  Synthetic polypeptide
MENSERAEEMQENYQRNGTAEEQPKLRKEAVGSIEIFRFADGLDITLMILGILASLVNGACLPLMPLVLGEMSDNLISGCLVQTNTTNYQNCTQSQEKLNEDMTLLTLYYVGIGVAALIFGYIQISLWIITAARQTKRIRKQFFHSVLAQDIGWFDSCDIGELNTRMTDDIDKISDGIGDKIALLFQNMSTFSIGLAVGLVKGWKLTLVTLSTSPLIMASAAACSRMVISLTSKELSAYSKAGAVAEEVLSSIRTVIAFRAQEKELQRYTQNLKDAKDFGIKRTIASKVSLGAVYFFMNGTYGLAFWYGTSLILNGEPGYTIGTVLAVFFSVIHSSYCIGAAVPHFETFAIARGAAFHIFQVIDKKPSIDNFSTAGYKPESIEGTVEFKNVSFNYPSRPSIKILKGLNLRIKSGETVALVGLNGSGKSTVVQLLQRLYDPDDGFIMVDENDIRALNVRHYRDHIGVVSQEPVLFGTTISNNIKYGRDDVTDEEMERAAREANAYDFIMEFPNKFNTLVGEKGAQMSGGQKQRIAIARALVRNPKILILDEATSALDSESKSAVQAALEKEARSASSPPPSHLGSEERLCPAAHRLRCGEHLCPAALSGM

SEQ ID NO: 254 - protein, 607 aa, Artificial Sequence
  Synthetic polypeptide
MKLRLPASPETHLDMLRHLYQGCQVVQGNLELTYLPTNASLSFLQDIQEVQGYVLIAHNQVRQVPLQRLRIVRGTQLFEDNYALAVLDNGDPLNNTTPVTGASPGGLRELQLRSLTEILKGGVLIQRNPQLCYQDTILWKDIFHKNNQLALTLIDTNRSRACHPCSPMCKGSRCWGESSEDCQSLTRTVCAGGCARCKGPLPTDCCHEQCAAGCTGPKHSDCLACLHFNHSGICELHCPALVTYNTDTFESMPNPEGRYTFGASCVTACPYNYLSTDVGSCTLVCPLHNQEVTAEDGTQRCEKCSKPCARVCYGLGMEHLREVRAVTSANIQEFAGCKKIFGSLAFLPESFDGDPASNTAPLQPEQLQVFETLEEITGYLYISAWPDSLPDLSVFQNLQVIRGRILHNGAYSLTLQGLGISWLGLRSLRELGSGLALIHHNTHLCFVHTVPWDQLFRNPHQALLHTANRPEDECVGEGLACHQLCARGHCWGPGPTQCVNCSQFLRGQECVEECRVLQGLPREYVNARHCLPCHPECQPQNGSVTCFGPEADQCVACAHYKDPPFCVARCPSGVKPDLSYMPIWKFPDEEGACQPCPINCTHSVVVR

SEQ ID NO: 255 - protein, 607 aa, Artificial Sequence; identical to SEQ ID NO: 254
  Synthetic polypeptide

SEQ ID NO: 256 - protein, 607 aa, Artificial Sequence; identical to SEQ ID NO: 254
  Synthetic polypeptide

SEQ ID NO: 257 - protein, 607 aa, Artificial Sequence; identical to SEQ ID NO: 254
  Synthetic polypeptide

SEQ ID NO: 258 - protein, 607 aa, Artificial Sequence; identical to SEQ ID NO: 254
  Synthetic polypeptide

SEQ ID NO: 259 - protein, 605 aa, Artificial Sequence
  Synthetic polypeptide
MLPGLALLLLAAWTARALEVPTDGNAGLLAEPQIAMFCGRLNMHMNVQNGKWDSDPSGTKTCIDTKEGILQYCQEVYPELQITNVVEANQPVTIQNWCKRGRKQCKTHPHFVIPYRCLVGEFVSDALLVPDKCKFLHQERMDVCETHLHWHTVAKETCSEKSTNLHDYGMLLPCGIDKFRGVEFVCCPLAEESDNVDSADAEEDDSDVWWGGADTDYADGSEDKVVEVAEEEEVAEVEEEEADDDEDDEDGDEVEEEAEEPYEEATERTTSIATTTTTTTESVEEVVRVSQSLLKTTQEPLARDPVKLPTTAASTPDAVDKYLETPGDENEHAHFQKAKERLEAKHRERMSQVMREWEEAERQAKNLPKADKKAVIQHFQEKVESLEQEAANERQQLVETHMARVEAMLNDRRRLALENYITALQAVPPRPRHVFNMLKKYVRAEQKDRQHTLKHFEHVRMVDPKKAAQIRSQVMTHLRVIYERMNQSLSLLYNVPAVAEEIQDEVDELLQKEQNYSDDVLANMISEPRISYGNDALMPSLTETKTTVELLPVNGEFSLDDLQPWHSFGADSVPANTENEVEPVDARPAADRGLTTRPGYQVEAF

SEQ ID NO: 260 - protein, 605 aa, Artificial Sequence
  Synthetic polypeptide
MLPGLALLLLAAWTARALEVYPELQITNVVEANQPVTIQNWCKRGRKQCKTHPHFVIPYRCLVGEFVSDALLVPDKCKFLHQERMDVCETHLHWHTVAKETCSEKSTNLHDYGMLLPCGIDKFRGVEFVCCPLAEESDNVDSADAEEDDSDVWWGGADTDYADGSEDKVVEVAEEEEVAEVEEEEADDDEDDEDGDEVEEEAEEPYEEATERTTSIATTTTTTTESVEEVVREVCSEQAETGPCRAMISRWYFDVTEGKCAPFFYGGCGGNRNNFDTEEYCMAVCGSAMSQSLLKTTQEPLARDPVKLPTTAASTPDAVDKYLETPGDENEHAHFQKAKERLEAKHRERMSQVMREWEEAERQAKNLPKADKKAVIQHFQEKVESLEQEAANERQQLVETHMARVEAMLNDRRRLALENYITALQAVPPRPRHVFNMLKKYVRAEQKDRQHTLKHFEHVRMVDPKKAAQIRSQVMTHLRVIYERMNQSLSLLYNVPAVAEEIQDEVDELLQKEQNYSDDVLANMISEPRISYGNDALMPSLTETKTTVELLPVNGEFSLDDLQPWHSFGADSVPANTENEVEPVDARPAADRGLTTRPGYQVEAF

SEQ ID NO: 261 - protein, 604 aa, Artificial Sequence
  Synthetic polypeptide
MGPPLPLLLLLLLLLPPRVLPAAPSSVPRGRQLPGRLGCLLEEGLCGASEACVNDGVFGRCQKVPAMDFYRYEVSPVALQRLRVALQKLSGTGFTWQDDYTQYVMDQELADLPKTYLRRPEASSPARPSKHSVGSERRYSREGGAALANALRRHLPFLEALSQAPASDVLARTHTAQDRPPAEGDDRFSESILTYVAHTSALTYPPGSRTQLREDLLPRTLGQLQPDELSPKVDSGVDRHHLMAALSAYAAQRPPAPPGEGSLEPQYLLRAPSRMPRPLLAPAAPQKWPSPLGDSEDPSSTGDGARIHTLLKDLQRQPAEVRGLSGLELDGMAELMAGLMQGVDHGVARGSPGRAALGESGEQADGPKATLRGDSFPDDGVQDDDDRLYQEVHRLSATLGGLLQDHGSRLLPGALPFARPLDMERKKSEHPESSLSSEEETAGVENVKSQTYSKDLLGQQPHSEPGAAAFGELQNQMPGPSKEEQSLPAGAQEALSDGLQLEVQPSEEEARGYIVTDREVLGPAVTFKVSANVQNVTTEDVEKATVDNKDKLEETSGLKILQTGVGSKDMLKSWTSAAQNGTFRGHRTVADTVRLVKEAPCCSR

SEQ ID NO: 262 - protein, 601 aa, Artificial Sequence
  Synthetic polypeptide
MILQAHLHSLCLLMLYLATGYGQEGKFSGPLKPMTFSIYEGQEPSQIIFQFKANPPAVTFELTGETDNIFVIEREGLLYYNRALDRETRSTHNLQVAALDANGIIVEGPVPITIKVKDINDNRPTFLQSKYEGSVRQNSRPGKPFLYVNATDLDDPATPNGQLYYQIVIQLPMINNVMYFQINNKTGAISLTREGSQELNPAKNPSYNLVISVKDMGGQSENSFSDTTSVDIIVTENIWKAPKPVEMVENSTDPHPIKITQVRWNDPGAQYSLVDKEKLPRFPFSIDQEGDIYVTQPLDREEKDAYVFYAVAKDEYGKPLSYPLEIHVKVKDINDNPPTCPSPVTVFEVQENERLGNSIGTLTAHDRDEENTANSFLNYRIVEQTPKLPMDGLFLIQTYAGMLQLAKQSLKKQDTPQYNLTIEVSDKDFKTLCFVQINVIDINDQIPIFEKSDYGNLTLAEDTNIGSTILTIQATDADEPFTGSSKILYHIIKGDSEGRLGVDTDPHTNTGYVIIKKPLDFETAAVSNIVFKAENPEPLVFGVKYNASSFAKFTLIVTDVNEAPQFSQHVFQAKVSEDVAIGTKVGNVTAKDPEGLDISTQ

SEQ ID NO: 263 - protein, 601 aa, Artificial Sequence; identical to SEQ ID NO: 262
  Synthetic polypeptide

SEQ ID NO: 264 - protein, 597 aa, Artificial Sequence
  Synthetic polypeptide
MLCCLLVRASNLPSAKKDRRSDPVASLTFRGVKKRTKVIKNSVNPVWNEGFEWDLKGIPLDQGSELHVVVKDHETMGRNRFLGEAKVPLREVLATPSLSASFNAPLLDTKKQPTGASLVLQVSYTPLPGAVPLFPPPTPLEPSPTLPDLDVVAGGGQSRAETWSLLSDSTMDTRYSGKKWPAPTDTGGEEDTEDQGLTGDEAEPFLDQSGGPGAPTTPRKLPSRPPPHYPGIKRKRSAPTSRKLLSDKPQDFQIRVQVIEGRQLPGVNIKPVVKVTAAGQTKRTRIHKGNSPLFNETLFFNLFDSPGELFDEPIFITVVDSRSLRTDALLGEFRMDVGTIYREPRHAYLRKWLLLSDPDDFSAGARGYLKTSLCVLGPGDEAPLERKDPSEDKEDIESNLLRPTGVALRGAHFCLKVFRAEDLPQMDDAVMDNVKQIFGFESNKKNLVDPFVEVSFAGKMLCSKILEKTANPQWNQNITLPAMFPSMCEKMRIRIIDWDRLTHNDIVATTYLSMSKISAPGGEIEVDDYLGFLPTFGPCYINLYGSPREFTGFPDPYTELNTGKAELASGTVHLGGLSYPPNSLGHAFLTCRGDEVG

SEQ ID NO: 265 - protein, 597 aa, Artificial Sequence; identical to SEQ ID NO: 264
  Synthetic polypeptide

SEQ ID NO: 266 - protein, 597 aa, Artificial Sequence
  Synthetic polypeptide
MGSGARFPSGTLRVRWLLLLGLVGPVLGAARPGFQQTSHLSSYEIITPWRLTRERREAPRPYSKQVSYVIQAEGKEHIIHLERNKDLLPEDFVVYTYNKEGTLITDHPNIQNHCHYRGYVEGVHNSSIALSDCFGLRGLLHLENASYGIEPLQNSSHFEHIIYRMDDVYKEPLKCGVSNKDIEKETAKDEEEEPPSMTQLLRRRRAVLPQTRYVELFIVVDKERYDMMGRNQTAVREEMILLANYLDSMYIMLNIRIVLVGLEIWTNGNLINIVGGAGDVLGNFVQWREKFLITRRRHDSAQLVLKKGFGGTAGMAFVGTVCSRSHAGGINVFGQITVETFASIVAHELGHNLGMNHDDGRDCSCGAKSCIMNSGASGSRNFSSCSAEDFEKLTLNKGGNCLLNIPKPDEAYSAPSCGNKLVDAGEECDCGTPKECELDPCCEGSTCKLKSFAECAYGDCCKDCRFLPGGTLCRGKTSECDVPEYCNGSSQFCQPDVFIQNGYPCQNNKAYCYNGMCQYYDAQCQVIFGSKAKAAPKDCFIEVNSKGDRFGNCGFSGNEYKKCATGLLSSSSSRSQVKCGFLTEDFFHFLNRTSSPS

SEQ ID NO: 267 - protein, 597 aa, Artificial Sequence; identical to SEQ ID NO: 266
  Synthetic polypeptide

SEQ ID NO: 268 - protein, 597 aa, Artificial Sequence; identical to SEQ ID NO: 266
  Synthetic polypeptide

SEQ ID NO: 269 - protein, 597 aa, Artificial Sequence; identical to SEQ ID NO: 266
  Synthetic polypeptide

SEQ ID NO: 270 - protein, 597 aa, Artificial Sequence
  Synthetic polypeptide
MEEDIYTNLSKMETVLGQSMSSLPLSYREALERLEQSKALVSNLISTKEELMKLRQILRLLRLRCTENDGICLLKIVSALWEKWLSLLEAAKEWEMWCEELKQEWKFVSEEIEREAIILDNLQEELPEISKTKEAATTEELSELLDCLCQYGENVEKQQLLLTLLLQRIRSIQNVPESSGAVETVPAFQEITSMKERCNKLLQKVQKNKELVQTEIQERHSFTKEIIALKNFFQQTTTSFQNMAFQDHPEKSEQFEELQSILKKGKLTFENIMEKLRIKYSEMYTIVPAEIESQVEECRKALEDIDEKISNEVLKSSPSYAMRRKIEEINNGLHNVEKMLQQKSKNIEKAQEIQKKMWDELDLWHSKLNELDSEVQDIVEQDPGQAQEWMDNLMIPFQQYQQVSQRAECRTSQLNKATVKMEEYSDLLKSTEAWIENTSHLLANPADYDSLRTLSHHASTVQMALEDSEQKHNLLHSIFMDLEDLSIIFETDELTQSIQELSNQVTALQQKIMESLPQIQRMADERWLTPVIPALWEAEAGGSPAVRSWRPAWPTWRNSVSTKNIKINWAWWHVPVIPAIQEAEAGESLEPGRRRLQ

SEQ ID NO: 271 - protein, 596 aa, Artificial Sequence
  Synthetic polypeptide
MLRVFILYAENVHTPDTDISDAYCSAVFAGVKKRTKVIKNSVNPVWNEGFEWDLKGIPLDQGSELHVVVKDHETMGRNRFLGEAKVPLREVLATPSLSASFNAPLLDTKKQPTGASLVLQVSYTPLPGAVPLFPPPTPLEPSPTLPDLDVVAGGGQSRAETWSLLSDSTMDTRYSGKKWPAPTDTGGEEDTEDQGLTGDEAEPFLDQSGGPGAPTTPRKLPSRPPPHYPGIKRKRSAPTSRKLLSDKPQDFQIRVQVIEGRQLPGVNIKPVVKVTAAGQTKRTRIHKGNSPLFNETLFFNLFDSPGELFDEPIFITVVDSRSLRTDALLGEFRMDVGTIYREPRHAYLRKWLLLSDPDDFSAGARGYLKTSLCVLGPGDEAPLERKDPSEDKEDIESNLLRPTGVALRGAHFCLKVFRAEDLPQMDDAVMDNVKQIFGFESNKKNLVDPFVEVSFAGKMLCSKILEKTANPQWNQNITLPAMFPSMCEKMRIRIIDWDRLTHNDIVATTYLSMSKISAPGGEIEVDDYLGFLPTFGPCYINLYGSPREFTGFPDPYTELNTGKAELASGTVHLGGLSYPPNSLGHAFLTCRGDEVG

SEQ ID NO: 272 - protein, 596 aa, Artificial Sequence; identical to SEQ ID NO: 271
  Synthetic polypeptide

SEQ ID NO: 273 - protein, 595 aa, Artificial Sequence
  Synthetic polypeptide
MGPPLPLLLLLLLLLPPRVLPAAPSSVPRGRQLPGRLGCLLEEGLCGASEACVNGFTWQDDYTQYVMDQELADLPKTYLRRPEASSPARPSKHSVGSERRYSREGGAALANALRRHLPFLEALSQAPASDVLARTHTAQDRPPAEGDDRFSESILTYVAHTSALTYPPGSRTQLREDLLPRTLGQLQPDELSPKVDSGVDRHHLMAALSAYAAQRPPAPPGEGSLEPQYLLRAPSRMPRPLLAPAAPQKWPSPLGDSEDPSSTGDGARIHTLLKDLQRQPAEVRGLSGLELDGMAELMAGLMQGVDHGVARGSPGRAALGESGEQADGPKATLRGDSFPDDGVQDDDDRLYQEVHRLSATLGGLLQDHGSRLLPGALPFARPLDMERKKSEHPESSLSSEEETAGVENVKSQTYSKDLLGQQPHSEPGAAAFGELQNQMPGPSKEEQSLPAGAQEALSDGLQLEVQPSEEEARGYIVTDRDPLRPEEGRRLVEDVARLLQVPSSAFADVEVLGPAVTFKVSANVQNVTTEDVEKATVDNKDKLEETSGLKILQTGVGSKDMLKSWTSAAQNGTFRGHRTVADTVRLVKEAPCCSR

SEQ ID NO: 274 - protein, 594 aa, Artificial Sequence
  Synthetic polypeptide
MGGKQRDEDDEAYGKPVKYDPSFRGPIKNRSCTDVICCVLFLLFILGYIVVGIVAWLYGDPRQVLYPRNSTGAYCGMGENKDKPYLLYFNIFSCILSSNIISVAENGLQCPTPQVCVSSCPEDPWTVGKNEFSQTVGEVFYTKNRNFCLPGVPWNMTVITSLQQELCPSFLLPSAPALGRCFPWTNVTPPALPGITNDTTIQQGISGLIDSLNARDISVKIFEDFAQSWYWILVALGVALVLSLLFILLLRLVAGPLVLVLILGVLGVLAYGIYYCWEEYRVLRDKGASISQLGFTTNLSAYQSVQETWLAALIVLAVLEAILLLMLIFLRQRIRIAIALLKEASKAVGQMMSTMFYPLVTFVLLLICIAYWAMTALYLATSGQPQYVLWASNISSPGCEKVPINTSCNPTAHLVNSSCPGLMCVFQGYSSKGLIQRSVFNLQIYGVLGLFWTLNWVLALGQCVLAGAFASFYWAFHKPQDIPTFPLISAFIRTLRYHTGSLAFGALILTLVQIARVILEYIDHKLRGVQNPVARCIMCCFKCCLWCLEKFIKFLNRNAYIMIAIYGKNFCVSAKNAFMLLMRNIVSPHKLRSQ

SEQ ID NO: 275 - protein, 593 aa, Artificial Sequence
  Synthetic polypeptide
MGPPLPLLLLLLLLLPPRVLPAAPSSVPRGRQLPGRLGCLLEEGLCGASEACVNDGVFGRCQKVPAMDFYRYEVSPVALQRLRVALQKLSGTGFTWQDDYTQYVMDQELADLPKTYLRRPEASSPARPSKHSVGSERRYSREGGAALANALRRHLPFLEALSQAPASDVLARTHTAQDRPPAEGDDRFSESILTYVAHTSALTYPPGSRTQLREDLLPRTLGQLQPDELSPKVDSGVDRHHLMAALSAYAAQRPPAPPGEGSLEPQYLLRAPSRMPRPLLAPAAPQKWPSPLGDSEDPSSTGDGARIHTLLKDLQRQPAEVRGLSGLELDGMAELMAGLMQGVDHGVARGSPGRAALGESGEQADGPKATLRGDSFPDDGVQDDDDRLYQEVHRLSATLGGLLQDHGSRLLPGALPFARPLDMERKKSEHPESSLSSEEETAGVENVKSQTYSKDLLGQQPHSEPGAAAFGELQNQMPGPSKEEQSLPAGAQEALSDGLQLEVQPSEEEARGYIVTDRDPLRPEEGRRLVEDVARLLQVPSSAFADVDSIQTTQRVRKNLHDLYIRQKTNIQTLQRTHISKKQTVPSNNGLKT

SEQ ID NO: 276 - protein, 592 aa, Artificial Sequence
  Synthetic polypeptide
MIGYLGYCKGVEPKTECERLAGTESPVREEPGEDFPAARRLYWDDLKRKLSEKLDSTDFTGTIKLLNENSYVPREAGSQKDENLALYVENQFREFKLSKVWRDQHFVKIQVKDSAQNSVIIVDKNGRLVYLVENPGGYVAYSKAATVTGKLVHANFGTKKDFEDLYTPVNGSIVIVRAGKITFAEKVANAESLNAIGVLIYMDQTKFPIVNAELSFFGHAHLGTGDPYTPGFPSFNHTQFPPSRSSGLPNIPVQTISRAAAEKLFGNMEGDCPSDWKTDSTCRMVTSESKNVKLTVSNVLKEIKILNIFGVIKGFVEPDHYVVVGAQRDAWGPGAAKSGVGTALLLKLAQMFSDMVLKDGFQPSRSIIFASWSAGDFGSVGATEWLEGYLSSLHLKAFTYINLDKAVLGTSNFKVSASPLLYTLIEKTMQNVKHPVTGQFLYQDSNWASKVEKLTLDNAAFPFLAYSGIPAVSFCFCEDTDYPYLGTTMDTYKELIERIPELNKVARAAAEVAGQFVIKLTHDVELNLDYERYNSQLLSFVRDLNQYRADIKEMGLSLQWLYSARGGCSELRSRHCTPAWATRAKLCLNNNK

SEQ ID NO: 277 - protein, 592 aa, Artificial Sequence
  Synthetic polypeptide
MGPPLPLLLLLLLLLPPRVLPAAPSSVPRGRQLPGRLGCLLEEGLCGASEACVNDGVFGRCQKVPAMDFYRYEVSPVALQRLRVALQKLSGTGFTWQDDYTQYVMDQELADLPKTYLRRPEASSPARPSKHSVGSERRYSREGGAALANALRRHLPFLEALSQAPASDVLARTHTAQDRPPAEGDDRFSESILTYVAHTSALTYPPGSRTQLREDLLPRTLGQLQPDELSPKVDSGVDRHHLMAALSAYAAQRPPAPPGEGSLEPQYLLRAPSRMPRPLLAPAAPQKWPSPLGDSEDPSSTGDGARIHTLLKDLQRQPAEVRGLSGLELDGMAELMAGLMQGVDHGVARGSPGRAALGESGEQADGPKATLRGDSFPDDGVQDDDDRLYQEVHRLSATLGGLLQDHGSRLLPGALPFARPLDMERKKSEHPESSLSSEEETAGVENVKSQTYSKDLLGQQPHSEPGAAAFGELQNQMPGPSKEEQSLPAGAQEALSDGLQLEVQPSEEEARGYIVTDRDPLRPEEGRRLVEDVARLLQVPSSAFADVDIQTTQRVRKNLHDLYIRQKTNIQTLQRTHISKKQTVPSNNGLKT

SEQ ID NO: 278 - protein, 588 aa, Artificial Sequence
  Synthetic polypeptide
MELAALCRWGLLLALLPPGAASTQVCTGTDMKLRLPASPETHLDMLRHLYQGCQVVQGNLELTYLPTNASLSFLQDIQEVQGYVLIAHNQVRQVPLQRLRIVRGTQLFEDNYALAVLDNGDPLNNTTPVTGASPGGLRELQLRSLTEILKGGVLIQRNPQLCYQDTILWKDIFHKNNQLALTLIDTNRSRACHPCSPMCKGSRCWGESSEDCQSLTRTVCAGGCARCKGPLPTDCCHEQCAAGCTGPKHSDCLACLHFNHSGICELHCPALVTYNTDTFESMPNPEGRYTFGASCVTACPYNYLSTDVGSCTLVCPLHNQEVTAEDGTQRCEKCSKPCARVCYGLGMEHLREVRAVTSANIQEFAGCKKIFGSLAFLPESFDGDPASNTAPLQPEQLQVFETLEEITGYLYISAWPDSLPDLSVFQNLQVIRGRILHNGAYSLTLQGLGISWLGLRSLRELGSGLALIHHNTHLCFVHTVPWDQLFRNPHQALLHTANRPEDECVGEGLACHQLCARGHCWGPGPTQCVNCSQFLRGQECVEECRVLQGLPREYVNARHCLPCHPECQPQNGSVTCFGPNEIKQGLAQ

SEQ ID NO: 279 - protein, 588 aa, Artificial Sequence; identical to SEQ ID NO: 278
  Synthetic polypeptide

SEQ ID NO: 280 - protein, 586 aa, Artificial Sequence
  Synthetic polypeptide
MALRGFCSADGSDPLWDWNVTWNTSNPDFTKCFQNTVLVWVPCFYLWACFPFYFLYLSRHDRGYIQMTPLNKTKTALGFLLWIVCWADLFYSFWERSRGIFLAPVFLVSPTLLGITMLLATFLIQLERRKGVQSSGIMLTFWLVALVCALAILRSKIMTALKEDAQVDLFRDITFYVYFSLLLIQLVLSCFSDRSPLFSETIHDPNPCPESSASFLSRITFWWITGLIVRGYRQPLEGSDLWSLNKEDTSEQVVPVLVKNWKKECAKTRKQPVKVVYSSKDPAQPKESSKVDANEEVEALIVKSPQKEWNPSLFKVLYKTFGPYFLMSFFFKAIHDLMMFSGPQILKLLIKFVNDTKAPDWQGYFYTVLLFVTACLQTLVLHQYFHICFVSGMRIKTAVIGAVYRKALVITNSARKSSTVGEIVNLMSVDAQRFMDLATYINMIWSAPLQVILALYLLWLNLGPSVLAGVAVMVLMVPVNAVMAMKTKTYQVAHMKSKDNRIKLMNEILNGIKVLKLYAWELAFKDKVLAIRQEELKVLKKSAYLSAVGTFTWVCTPFLDVSSRWAFLSFLLTAVSSVYKTVHSRC

SEQ ID NO: 281 - protein, 586 aa, Artificial Sequence; identical to SEQ ID NO: 280
  Synthetic polypeptide

SEQ ID NO: 282 - protein, 586 aa, Artificial Sequence; identical to SEQ ID NO: 280
  Synthetic polypeptide

SEQ ID NO: 283 - protein, 586 aa, Artificial Sequence; identical to SEQ ID NO: 280
  Synthetic polypeptide

SEQ ID NO: 284 - protein, 586 aa, Artificial Sequence; identical to SEQ ID NO: 280
  Synthetic polypeptide

SEQ ID NO: 285 - protein, 586 aa, Artificial Sequence; identical to SEQ ID NO: 280
  Synthetic polypeptide

SEQ ID NO: 286 - protein, 586 aa, Artificial Sequence
  Synthetic polypeptide
MLPGLALLLLAAWTARALEVPTDGNAGLLAEPQIAMFCGRLNMHMNVQNGKWDSDPSGTKTCIDTKEGILQYCQEVYPELQITNVVEANQPVTIQNWCKRGRKQCKTHPHFVIPYRCLVGEFVSDALLVPDKCKFLHQERMDVCETHLHWHTVAKETCSEKSTNLHDYGMLLPCGIDKFRGVEFVCCPLAEESDNVDSADAEEDDSDVWWGGADTDYADGSEDKVVEVAEEEEVAEVEEEEADDDEDDEDGDEVEEEAEEPYEEATERTTSIATTTTTTTESVEEVVRVPTTAASTPDAVDKYLETPGDENEHAHFQKAKERLEAKHRERMSQVMREWEEAERQAKNLPKADKKAVIQHFQEKVESLEQEAANERQQLVETHMARVEAMLNDRRRLALENYITALQAVPPRPRHVFNMLKKYVRAEQKDRQHTLKHFEHVRMVDPKKAAQIRSQVMTHLRVIYERMNQSLSLLYNVPAVAEEIQDEVDELLQKEQNYSDDVLANMISEPRISYGNDALMPSLTETKTTVELLPVNGEFSLDDLQPWHSFGADSVPANTENEVEPVDARPAADRGLTTRPGYQVEAF

SEQ ID NO: 287 - protein, 583 aa, Artificial Sequence
  Synthetic polypeptide
MAAAGARLSPGPGSGLRGRPRLCFHPGPPPLLPLLLLFLLLLPPPPLLAGATAAASREPDSPCRLKTVTVSTLPALRESDIGWSGARAGAGAGTGAGAAAAAASPGSPGSAGTAAESRLLLFVRNELPGRIAVQDDLDNTELPFFTLEMSGTAADISLVHWRQQWLENGTLYFHVSMSSSGQLAQATAPTLQEPSEIVEEQMHILHISVMGGLIALLLLLLVFTVALYAQRRWQKRRRIPQKSASTEATHEIHYIPSVLLGPQARESFRSSRLQTHNSVIGVPIRETPILDDYDCEEDEEPPRRANHVSREDEFGSQVTHTLDSLGHPGEEKVDFEKKGGISFGRAKGTSGSEADDETQLTFYTEQYRSRRRSKGLLKSPVNKTALTLIAVSSCILAMVCGSQMSCPLTVKVTLHVPEHFIADGSSFVVSEGSYLDISDWLNPAKLSLYYQINATSPWVRDLCGQRTTDACEQLCDPETGECSCHEGYAPDPVHRHLCVRSDWGQSEGPWPYTTLERGYDLVTGEQAPEKILRSTFSLGQGLWLPVSKSFVVPPVELSINPLASCKTDVLVTEDPADVRSETP

SEQ ID NO: 288 - protein, 580 aa, Artificial Sequence
  Synthetic polypeptide
MLCCLLVRASNLPSAKKDRRSDPVASLTFRGVKKRTKVIKNSVNPVWNEGFEWDLKGIPLDQGSELHVVVKDHETMGRNRFLGEAKVPLREVLATPSLSASFNAPLLDTKKQPTGASLVLQVSYTPLPGAVPLFPPPTPLEPSPTLPDLDVVADTGGEEDTEDQGLTGDEAEPFLDQSGGPGAPTTPRKLPSRPPPHYPGIKRKRSAPTSRKLLSDKPQDFQIRVQVIEGRQLPGVNIKPVVKVTAAGQTKRTRIHKGNSPLFNETLFFNLFDSPGELFDEPIFITVVDSRSLRTDALLGEFRMDVGTIYREPRHAYLRKWLLLSDPDDFSAGARGYLKTSLCVLGPGDEAPLERKDPSEDKEDIESNLLRPTGVALRGAHFCLKVFRAEDLPQMDDAVMDNVKQIFGFESNKKNLVDPFVEVSFAGKMLCSKILEKTANPQWNQNITLPAMFPSMCEKMRIRIIDWDRLTHNDIVATTYLSMSKISAPGGEIEEEPAGAVKPSKASDLDDYLGFLPTFGPCYINLYGSPREFTGFPDPYTELNTGKAELASGTVHLGGLSYPPNSLGHAFLTCRGDEVG

SEQ ID NO: 289 - protein, 580 aa, Artificial Sequence; identical to SEQ ID NO: 288
  Synthetic polypeptide

SEQ ID NO: 290 - protein, 579 aa, Artificial Sequence
  Synthetic polypeptide
MLRVFILYAENVHTPDTDISDAYCSAVFAGVKKRTKVIKNSVNPVWNEGFEWDLKGIPLDQGSELHVVVKDHETMGRNRFLGEAKVPLREVLATPSLSASFNAPLLDTKKQPTGASLVLQVSYTPLPGAVPLFPPPTPLEPSPTLPDLDVVADTGGEEDTEDQGLTGDEAEPFLDQSGGPGAPTTPRKLPSRPPPHYPGIKRKRSAPTSRKLLSDKPQDFQIRVQVIEGRQLPGVNIKPVVKVTAAGQTKRTRIHKGNSPLFNETLFFNLFDSPGELFDEPIFITVVDSRSLRTDALLGEFRMDVGTIYREPRHAYLRKWLLLSDPDDFSAGARGYLKTSLCVLGPGDEAPLERKDPSEDKEDIESNLLRPTGVALRGAHFCLKVFRAEDLPQMDDAVMDNVKQIFGFESNKKNLVDPFVEVSFAGKMLCSKILEKTANPQWNQNITLPAMFPSMCEKMRIRIIDWDRLTHNDIVATTYLSMSKISAPGGEIEEEPAGAVKPSKASDLDDYLGFLPTFGPCYINLYGSPREFTGFPDPYTELNTGKAELASGTVHLGGLSYPPNSLGHAFLTCRGDEVG

SEQ ID NO: 291 - protein, 579 aa, Artificial Sequence; identical to SEQ ID NO: 290
  Synthetic polypeptide

SEQ ID NO: 292 - protein, 579 aa, Artificial Sequence
  Synthetic polypeptide
MALRGFCSADGSDPLWDWNVTWNTSNPDFTKCFQNTVLVWVPCFYLWACFPFYFLYLSRHDRGYIQMTPLNKTKTALGFLLWIVCWADLFYSFWERSRGIFLAPVFLVSPTLLGITMLLATFLIQLERRKGVQSSGIMLTFWLVALVCALAILRSKIMTALKEDAQVDLFRDITFYVYFSLLLIQLVLSCFSDRSPLFSETIHDPNPCPESSASFLSRITFWWITGLIVRGYRQPLEGSDLWSLNKEDTSEQVVPVLVKNWKKECAKTRKQPVKVVYSSKDPAQPKESSKVDANEEVEALIVKSPQKEWNPSLFKVLYKTFGPYFLMSFFFKAIHDLMMFSGPQILKLLIKFVNDTKAPDWQGYFYTVLLFVTACLQTLVLHQYFHICFVSGMRIKTAVIGAVYRKALVITNSARKSSTVGEIVNLMSVDAQRFMDLATYINMIWSAPLQVILALYLLWLNLGPSVLAGVAVMVLMVPVNAVMAMKTKTYQVAHMKSKDNRIKLMNEILNGIKVLKLYAWELAFKDKVLAIRQEELKVLKKSAYLSAVGTFTWVCTPFLVQWLMLGNPSTLGGQSRWIT

SEQ ID NO: 293 - protein, 579 aa, Artificial Sequence; identical to SEQ ID NO: 292
  Synthetic polypeptide

SEQ ID NO: 294 - protein, 579 aa, Artificial Sequence; identical to SEQ ID NO: 292
  Synthetic polypeptide

SEQ ID NO: 295 - protein, 579 aa, Artificial Sequence; identical to SEQ ID NO: 292
  Synthetic polypeptide

SEQ ID NO: 296 - protein, 579 aa, Artificial Sequence; identical to SEQ ID NO: 292
  Synthetic polypeptide

SEQ ID NO: 297 - protein, 579 aa, Artificial Sequence; identical to SEQ ID NO: 292
  Synthetic polypeptide

SEQ ID NO: 298 - protein, 578 aa, Artificial Sequence
  Synthetic polypeptide
MTMYLWLKLLAFGFAFLDTEVFVTGQSPTPSPTGLTTAKMPSVPLSSDPLPTHTTAFSPASTFERENDFSETTTSLSPDNTSTQVSPDSLDNASAFNTTGVSSVQTPHLPTHADSQTPSAGTDTQTFSGSAANAKLNPTPGSNAISDAYLNASETTTLSPSGSAVISTTTIATTPSKPTCDEKYANITVDYLYNKETKLFTAKLNVNENVECGNNTCTNNEVHNLTECKNASVSISHNSCTAPDKTLILDVPPGVEKFQLHDCTQVEKADTTICLKWKNIETFTCDTQNITYRFQCGNMIFDNKEIKLENLEPEHEYKCDSEILYNNHKFTNASKIIKTDFGSPGEPQIIFCRSEAAHQGVITWNPPQRSFHNFTLCYIKETEKDCLNLDKNLIKYDLQNLKPYTKYVLSLHAYIIAKVQRNGSAAMCHFTTKSAPPSQVWNMTVSMTSDNSMHVKCRPPRDRNGPHERYHLEVEAGNTLVRNESHKNCDFRVKDLQYSTDYTFKAYFHNGDYPGEPFILHHSTSYNSKALIAFLAFLIIVTSIALLVVLYKIYDLHKKRSCNLDEQQELVERECNTI

SEQ ID NO: 299 - protein, 577 aa, Artificial Sequence
  Synthetic polypeptide
MGGKQRDEDDEAYGKPVKYDPSFRGPIKNRSCTDVICCVLFLLFILGYIVVGIVAWLYGDPRQVLYPRNSTGAYCGMGENKDKPYLLYFNIFSCILSSNIISVAENGLQCPTPQTVITSLQQELCPSFLLPSAPALGRCFPWTNVTPPALPGITNDTTIQQGISGLIDSLNARDISVKIFEDFAQSWYWILVALGVALVLSLLFILLLRLVAGPLVLVLILGVLGVLAYGIYYCWEEYRVLRDKGASISQLGFTTNLSAYQSVQETWLAALIVLAVLEAILLLMLIFLRQRIRIAIALLKEASKAVGQMMSTMFYPLVTFVLLLICIAYWAMTALYLATSGQPQYVLWASNISSPGCEKVPINTSCNPTAHLVNSSCPGLMCVFQGYSSKGLIQRSVFNLQIYGVLGLFWTLNWVLALGQCVLAGAFASFYWAFHKPQDIPTFPLISAFIRTLRYHTGSLAFGALILTLVQIARVILEYIDHKLRGVQNPVARCIMCCFKCCLWCLEKFIKFLNRNAYIMIAIYGKNFCVSAKNAFMLLMRNIVRVVVLDKVTDLLLFFGKLLVAGESLEPGRQRLQ

SEQ ID NO: 300 - protein, 576 aa, Artificial Sequence
  Synthetic polypeptide
MGPPLPLLLLLLLLLPPRVLPAAPSSVPRGRQLPGRLDGVFGRCQKVPAMDFYRYEVSPVALQRLRVALQKLSGTGFTWQDDYTQYVMDQELADLPKTYLRRPEASSPARPSKHSVGSERRYSREGGAALANALRRHLPFLEALSQAPASDVLARTHTAQDRPPAEGDDRFSESILTYVAHTSALTYPPGSRTQLREDLLPRTLGQLQPDELSPKVDSGVDRHHLMAALSAYAAQRPPAPPGEGSLEPQYLLRAPSRMPRPLLAPAAPQKWPSPLGDSEDPSSTGDGARIHTLLKDLQRQPAEVRGLSGLELDGMAELMAGLMQGVDHGVARGSPGRAALGESGEQADGPKATLRGDSFPDDGVQDDDDRLYQEVHRLSATLGGLLQDHGSRLLPGALPFARPLDMERKKSEHPESSLSSEEETAGVENVKSQTYSKDLLGQQPHSEPGAAAFGELQNQMPGPSKEEQSLPAGAQEALSDGLQLEVQPSEEEARGYIVTDRDPLRPEEGRRLVEDVARLLQVPSSAFADVDSIQTTQRVRKNLHDLYIRQKTNIQTLQRTHISKKQTVPSNNGLKT

SEQ ID NO: 301 - protein, 576 aa, Artificial Sequence
  Synthetic polypeptide
MYLWLKLLAFGFAFLDTEVFVTGQSPTPSPTGLTTAKMPSVPLSSDPLPTHTTAFSPASTFERENDFSETTTSLSPDNTSTQVSPDSLDNASAFNTTGVSSVQTPHLPTHADSQTPSAGTDTQTFSGSAANAKLNPTPGSNAISDAYLNASETTTLSPSGSAVISTTTIATTPSKPTCDEKYANITVDYLYNKETKLFTAKLNVNENVECGNNTCTNNEVHNLTECKNASVSISHNSCTAPDKTLILDVPPGVEKFQLHDCTQVEKADTTICLKWKNIETFTCDTQNITYRFQCGNMIFDNKEIKLENLEPEHEYKCDSEILYNNHKFTNASKIIKTDFGSPGEPQIIFCRSEAAHQGVITWNPPQRSFHNFTLCYIKETEKDCLNLDKNLIKYDLQNLKPYTKYVLSLHAYIIAKVQRNGSAAMCHFTTKSAPPSQVWNMTVSMTSDNSMHVKCRPPRDRNGPHERYHLEVEAGNTLVRNESHKNCDFRVKDLQYSTDYTFKAYFHNGDYPGEPFILHHSTSYNSKALIAFLAFLIIVTSIALLVVLYKIYDLHKKRSCNLDEQQELVERECNTI

SEQ ID NO: 302 - protein, 575 aa, Artificial Sequence
  Synthetic polypeptide
MGPPLPLLLLLLLLLPPRVLPAAPSSVPRGRQLPGRLDGVFGRCQKVPAMDFYRYEVSPVALQRLRVALQKLSGTGFTWQDDYTQYVMDQELADLPKTYLRRPEASSPARPSKHSVGSERRYSREGGAALANALRRHLPFLEALSQAPASDVLARTHTAQDRPPAEGDDRFSESILTYVAHTSALTYPPGSRTQLREDLLPRTLGQLQPDELSPKVDSGVDRHHLMAALSAYAAQRPPAPPGEGSLEPQYLLRAPSRMPRPLLAPAAPQKWPSPLGDSEDPSSTGDGARIHTLLKDLQRQPAEVRGLSGLELDGMAELMAGLMQGVDHGVARGSPGRAALGESGEQADGPKATLRGDSFPDDGVQDDDDRLYQEVHRLSATLGGLLQDHGSRLLPGALPFARPLDMERKKSEHPESSLSSEEETAGVENVKSQTYSKDLLGQQPHSEPGAAAFGELQNQMPGPSKEEQSLPAGAQEALSDGLQLEVQPSEEEARGYIVTDRDPLRPEEGRRLVEDVARLLQVPSSAFADVDIQTTQRVRKNLHDLYIRQKTNIQTLQRTHISKKQTVPSNNGLKT

SEQ ID NO: 303 - protein, 575 aa, Artificial Sequence
  Synthetic polypeptide
MLLPLLLSSLLGGSQAMDGRFWIRVQESVMVPEGLCISVPCSFSYPRQDWTGSTPAYGYWFKAVTETTKGAPVATNHQSREVEMSTRGRFQLTGDPAKGNCSLVIRDAQMQDESQYFFRVERGSYVRYNFMNDGFFLKVTVLSFTPRPQDHNTDLTCHVDFSRKGVSAQRTVRLRVAYAPRDLVISISRDNTPALEPQPQGNVPYLEAQKGQFLRLLCAADSQPPATLSWVLQNRVLSSSHPWGPRPLGLELPGVKAGDSGRYTCRAENRLGSQQRALDLSVQYPPENLRVMVSQANRTVLENLGNGTSLPVLEGQSLCLVCVTHSSPPARLSWTQRGQVLSPSQPSDPGVLELPRVQVEHEGEFTCHARHPLGSQHVSLSLSVHYSPKLLGPSCSWEAEGLHCSCSSQASPAPSLRWWLGEELLEGNSSQDSFEVTPSSAGPWANSSLSLHGGLSSGLRLRCEAWNVHGAQSGSILQLPDKKGLISTAFSNGAFLGIGITALLFLCLALIIMKILPKRRTQTETPRPRFSRHSTILDYINVVPTAGPLAQKRNQKATPNSPRTPLPPGHSGSRL

SEQ ID NO: 304 - protein, 574 aa, Artificial Sequence
  Synthetic polypeptide
MQRVYGAQNEMCLATQQLSKQLLAYEKQNFALGKGDEEVISTLHYFSKVVDELNLLHTELAKQLADTMVLPIIQFREKDLTEVSTLKDLFGLASNEHDLSMAKYSRLPKKKENEKVKTEVGKEVAAARRKQHLSSLQYYCALNALQYRKQMAMMEPMIGFAHGQINFFKKGAEMFSKRMDSFLSSVADMVQSIQVELEAEAEKMRVSQQELLSVDESVYTPDSDVAAPQINRNLIQKAGYLNLRNKTGLVTTTWERLYFFTQGGNLMCQPRGAVAGGLIQDLDNCSVMAVDCEDRRYCFQITTPNGKSGIILQAESRKENEEWICAINNISRQIYLTDNPEAVAIKLNQTALQAVTPITSFGKKQESSCPSQNLKNSEMENENDKIVPKATASLPEAEELIAPGTPIQFDIVLPATEFLDQNRGSRRTNPFGETEDESFPEAEDSLLQQMFIVRFLGSMAVKTDSTTEVIYEAMRQVLAARAIHNIFRMTESHLMVTSQSLRNRQTPHTGEFQLASGGCPSGMKLPEEGAGSSLCYSAASTGDTQAKRVRSVPSANCSRPAEEGPEGKLTNRKL

SEQ ID NO: 305 - protein, 573 aa, Artificial Sequence
  Synthetic polypeptide
MMDQARSAFSNLFGGEPLSYTRFSLARQVDGDNSHVEMKLAVDEEENADNNTKANVTKPKRCSGSICYGTIAVIVFFLIGFMIGYLGYCKGVEPKTECERLAGTESPVREEPGEDFPAARRLYWDDLKRKLSEKLDSTDFTGTIKLLNENSYVPREAGSQKDENLALYVENQFREFKLSKVWRDQHFVKIQVKDSAQNSVIIVDKNGRLVYLVENPGGYVAYSKAATVTGKLVHANFGTKKDFEDLYTPVNGSIVIVRAGKITFAEKVANAESLNAIGVLIYMDQTKFPIVNAELSFFGHAHLGTGDPYTPGFPSFNHTQFPPSRSSGLPNIPVQTISRAAAEKLFGNMEGDCPSDWKTDSTCRMVTSESKNVKLTVSNVLKEIKILNIFGVIKGFVEPDHYVVVGAQRDAWGPGAAKSGVGTALLLKLAQMFSDMVLKDGFQPSRSIIFASWSAGDFGSVGATEWLEGYLSSLHLKAFTYINLDKAVLGTSNFKVSASPLLYTLIEKTMQNVKHPVTGQFLYQDSNWASKVEKLTLDNAAFPFLAYSGIPAVSFCFCEARGSHDCITALQPG

SEQ ID NO: 306 - protein, 573 aa, Artificial Sequence; identical to SEQ ID NO: 305
  Synthetic polypeptide

SEQ ID NO: 307 - protein, 573 aa, Artificial Sequence
  Synthetic polypeptide
MPRGSWKPQVCTGTDMKLRLPASPETHLDMLRHLYQGCQVVQGNLELTYLPTNASLSFLQDIQEVQGYVLIAHNQVRQVPLQRLRIVRGTQLFEDNYALAVLDNGDPLNNTTPVTGASPGGLRELQLRSLTEILKGGVLIQRNPQLCYQDTILWKDIFHKNNQLALTLIDTNRSRACHPCSPMCKGSRCWGESSEDCQSLTRTVCAGGCARCKGPLPTDCCHEQCAAGCTGPKHSDCLACLHFNHSGICELHCPALVTYNTDTFESMPNPEGRYTFGASCVTACPYNYLSTDVGSCTLVCPLHNQEVTAEDGTQRCEKCSKPCARVCYGLGMEHLREVRAVTSANIQEFAGCKKIFGSLAFLPESFDGDPASNTAPLQPEQLQVFETLEEITGYLYISAWPDSLPDLSVFQNLQVIRGRILHNGAYSLTLQGLGISWLGLRSLRELGSGLALIHHNTHLCFVHTVPWDQLFRNPHQALLHTANRPEDECVGEGLACHQLCARGHCWGPGPTQCVNCSQFLRGQECVEECRVLQGLPREYVNARHCLPCHPECQPQNGSVTCFGPNEIKQGLAQ

SEQ ID NO: 308 - protein, 573 aa, Artificial Sequence
  Synthetic polypeptide
MMDQARSAFSNLFGGEPLSYTRFSLARQVDGDNSHVEMKLAVDEEENADNNTKANVTKPKRCSGSICYGTIAVIVFFLIGFMIGYLGYCKGVEPKTECERLAGTESPVREEPGEDFPAARRLYWDDLKRKLSEKLDSTDFTGTIKLLNENSYVPREAGSQKDENLALYVENQFREFKLSKVWRDQHFVKIQVKDSAQNSVIIVDKNGRLVYLVENPGGYVAYSKAATVTGKLVHANFGTKKDFEDLYTPVNGSIVIVRAGKITFAEKVANAESLNAIGVLIYMDQTKFPIVNAELSFFGHAHLGTGDPYTPGFPSFNHTQFPPSRSSGLPNIPVQTISRAAAEKLFGNMEGDCPSDWKTDSTCRMVTSESKNVKLTVSNVLKEIKILNIFGVIKGFVEPDHYVVVGAQRDAWGPGAAKSGVGTALLLKLAQMFSDMVLKDGFQPSRSIIFASWSAGDFGSVGATEWLEGYLSSLHLKAFTYINLDKAVLGTSNFKVSASPLLYTLIEKTMQNVKHPVTGQFLYQDSNWASKVEKLTLDNAAFPFLAYSGIPAVSFCFCEAAGSHDCITALQPG

SEQ ID NO: 309 - protein, 573 aa, Artificial Sequence; identical to SEQ ID NO: 308
  Synthetic polypeptide

SEQ ID NO: 310 - protein, 571 aa, Artificial Sequence
  Synthetic polypeptide
MPGIVVFRRRWSVGSDDLVLPAIFLFLLHTTWFVILSVVLFGLVYNPHEACSLNLVDHGRGYLGILLSCMIAEMAIIWLSMRGGILYTEPRDSMQYVLYVRLAILVIEFIYAIVGIVWLTQYYTSCNDLTAKNVTLGMVVCNWVVILSVCITVLCVFDPTGRTFVKLRATKRRQRNLRTYNLRHRLEEGQATSWSRRLKVFLCCTRTKDSQSDAYSEIAYLFAEFFRDLDIVPSDIIAGLVLLRQRQRAKRNAVLDEANNDILAFLSGMPVTRNTKYLDLKNSQEMLRYKEVCYYMLFALAAYGWPMYLMRKPACGLCQLARSCSCCLCPARPRFAPGVTIEEDNCCGCNAIAIRRHFLDENMTAVDIVYTSCHDAVYETPFYVAVDHDKKKVVISIRGTLSPKDALTDLTGDAERLPVEGHHGTWLGHKGMVLSAEYIKKKLEQEMVLSQAFGRDLGRGTKHYGLIVVGHSLGAGTAAILSFLLRPQYPTLKCFAYSPPGGLLSEDAMEYSKEFVTAVVLGKDLVPRIGLSQLEGFRRQLLDVLQRSTKPKMRGWLGFQPLASPEIQQFH

SEQ ID NO: 311 - protein, 570 aa, Artificial Sequence
  Synthetic polypeptide
MMDQARSAFSNLFGGEPLSYTRFSLARQVDGDNSHVEMKLAVDEEENADNNTKANVTKPKRCSGSICYGTIAVIVFFLIGFMIGYLGYCKGVEPKTECERLAGTESPVREEPGEDFPAARRLYWDDLKRKLSEKLDSTDFTGTIKLLNENSYVPREAGSQKDENLALYVENQFREFKLSKVWRDQHFVKIQVKDSAQNSVIIVDKNGRLVYLVENPGGYVAYSKAATVTGKLVHANFGTKKDFEDLYTPVNGSIVIVRAGKITFAEKVANAESLNAIGVLIYMDQTKFPIVNAELSFFGHAHLGTGDPYTPGFPSFNHTQFPPSRSSGLPNIPVQTISRAAAEKLFGNMEGDCPSDWKTDSTCRMVTSESKNVKLTVSNVLKEIKILNIFGVIKGFVEPDHYVVVGAQRDAWGPGAAKSGVGTALLLKLAQMFSDMVLKDGFQPSRSIIFASWSAGDFGSVGATEWLEGYLSSLHLKAFTYINLDKAVLGTSNFKVSASPLLYTLIEKTMQNVKHPVTGQFLYQDSNWASKVEKLTLDNAAFPFLAYSGIPAVSFCFCEAAGSHDCIAAL

SEQ ID NO: 312 - protein, 570 aa, Artificial Sequence; identical to SEQ ID NO: 311
  Synthetic polypeptide

SEQ ID NO: 313 - protein, 569 aa, Artificial Sequence
  Synthetic polypeptide
MILLTFSTGRRLDFVHHSGVFFLQTLLWILCATVCGTEQYFNVEVWLQKYGYLPPTDPRMSVLRSAETMQSALAAMQQFYGINMTGKVDRNTIDWMKKPRCGVPDQTRGSSKFHIRRKRYALTGQKWQHKHITYSIKNVTPKVGDPETRKAIRRAFDVWQNVTPLTFEEVPYSELENGKRDVDITIIFASGFHGDSSPFDGEGGFLAHAYFPGPGIGGDTHFDSDEPWTLGNPNHDGNDLFLVAVHELGHALGLEHSNDPTAIMAPFYQYMETDNFKLPNDDLQGIQKIYGPPDKIPPPTRPLPTVPPHRSIPPADPRKNDRPKPPRPPTGRPSYPGAKPNICDGNFNTLAILRREMFVFKDQWFWRVRNNRVMDGYPMQITYFWRGLPPSIDAVYENSDGNFVFFKGNKYWVFKDTTLQPGYPHDLITLGSGIPPHGIDSAIWWEDVGKTYFFKGDRYWRYSEEMKTMDPGYPKPITVWKGIPESPQGAFVHKENDLGKGDTSEETMATFGKLKTSGHLVTGLAEPRKPNHRNWEGQAESKPNSITYVLNAGGMDTPSSCGHEVNGVD

SEQ ID NO: 314 - protein, 566 aa, Artificial Sequence
  Synthetic polypeptide
MLCCLLVRASNLPSAKKDRRSDPVASLTFRGVKKRTKVIKNSVNPVWNEGFEWDLKGIPLDQGSELHVVVKDHETMGRNRFLGEAKVPLREVLATPSLSASFNAPLLDTKKQPTGASLVLQVSYTPLPGAVPLFPPPTPLEPSPTLPDLDVVADTGGEEDTEDQGLTGDEAEPFLDQSGGPGAPTTPRKLPSRPPPHYPGIKRKRSAPTSRKLLSDKPQDFQIRVQVIEGRQLPGVNIKPVVKVTAAGQTKRTRIHKGNSPLFNETLFFNLFDSPGELFDEPIFITVVDSRSLRTDALLGEFRMDVGTIYREPRHAYLRKWLLLSDPDDFSAGARGYLKTSLCVLGPGDEAPLERKDPSEDKEDIESNLLRPTGVALRGAHFCLKVFRAEDLPQMDDAVMDNVKQIFGFESNKKNLVDPFVEVSFAGKMLCSKILEKTANPQWNQNITLPAMFPSMCEKMRIRIIDWDRLTHNDIVATTYLSMSKISAPGGEIEVDDYLGFLPTFGPCYINLYGSPREFTGFPDPYTELNTGKAELASGTVHLGGLSYPPNSLGHAFLTCRGDEVG

SEQ ID NO: 315 - protein, 560 aa, Artificial Sequence
  Synthetic polypeptide
MTMYLWLKLLAFGFAFLDTEVFVTGQSPTPSPTGVSSVQTPHLPTHADSQTPSAGTDTQTFSGSAANAKLNPTPGSNAISDVPGERSTASTFPTDPVSPLTTTLSLAHHSSAALPARTSNTTITANTSDAYLNASETTTLSPSGSAVISTTTIATTPSKPTCDEKYANITVDYLYNKETKLFTAKLNVNENVECGNNTCTNNEVHNLTECKNASVSISHNSCTAPDKTLILDVPPGVEKFQLHDCTQVEKADTTICLKWKNIETFTCDTQNITYRFQCGNMIFDNKEIKLENLEPEHEYKCDSEILYNNHKFTNASKIIKTDFGSPGEPQIIFCRSEAAHQGVITWNPPQRSFHNFTLCYIKETEKDCLNLDKNLIKYDLQNLKPYTKYVLSLHAYIIAKVQRNGSAAMCHFTTKSAPPSQVWNMTVSMTSDNSMHVKCRPPRDRNGPHERYHLEVEAGNTLVRNESHKNCDFRVKDLQYSTDYTFKAYFHNGDYPGEPFILHHSTSYNSKALIAFLAFLIIVTSIALLVVLYKIYDLHKKRSCNLDEQQELVERECNTI

SEQ ID NO: 316 - protein, 558 aa, Artificial Sequence
  Synthetic polypeptide
MKLRLPASPETHLDMLRHLYQGCQVVQGNLELTYLPTNASLSFLQDIQEVQGYVLIAHNQVRQVPLQRLRIVRGTQLFEDNYALAVLDNGDPLNNTTPVTGASPGGLRELQLRSLTEILKGGVLIQRNPQLCYQDTILWKDIFHKNNQLALTLIDTNRSRACHPCSPMCKGSRCWGESSEDCQSLTRTVCAGGCARCKGPLPTDCCHEQCAAGCTGPKHSDCLACLHFNHSGICELHCPALVTYNTDTFESMPNPEGRYTFGASCVTACPYNYLSTDVGSCTLVCPLHNQEVTAEDGTQRCEKCSKPCARVCYGLGMEHLREVRAVTSANIQEFAGCKKIFGSLAFLPESFDGDPASNTAPLQPEQLQVFETLEEITGYLYISAWPDSLPDLSVFQNLQVIRGRILHNGAYSLTLQGLGISWLGLRSLRELGSGLALIHHNTHLCFVHTVPWDQLFRNPHQALLHTANRPEDECVGEGLACHQLCARGHCWGPGPTQCVNCSQFLRGQECVEECRVLQGLPREYVNARHCLPCHPECQPQNGSVTCFGPNEIKQGLAQ

SEQ ID NO: 317 - protein, 558 aa, Artificial Sequence; identical to SEQ ID NO: 316
  Synthetic polypeptide

SEQ ID NO: 318 - protein, 558 aa, Artificial Sequence; identical to SEQ ID NO: 316
  Synthetic polypeptide

SEQ ID NO: 319 - protein, 558 aa, Artificial Sequence; identical to SEQ ID NO: 316
  Synthetic polypeptide

SEQ ID NO: 320 - protein, 558 aa, Artificial Sequence; identical to SEQ ID NO: 316
  Synthetic polypeptide

SEQ ID NO: 321 - protein, 558 aa, Artificial Sequence
  Synthetic polypeptide
MKFAEHLSAHITPEWRKQYIQYEAFKDMLYSAQDQAPSVEVTDEDTVKRYFAKFEEKFFQTCEKELAKINTFYSEKLAEAQRRFATLQNELQSSLDAQKESTGVTTLRQRRKPVFHLSHEERVQHRNIKDLKLAFSEFYLSLILLQNYQNLNFTGFRKILKKHDKILETSRGADWRVAHVEVAPFYTCKKINQLISETEAVVTNELEDGDRQKAMKRLRVPPLGAAQPAPAWTTFRVGLFCGIFIVLNITLVLAAVFKLETDRSIWPLIRIYRGGFLLIEFLFLLGINTYGWRQAGVNHVLIFELNPRSNLSHQHLFEIAGFLGILWCLSLLACFFAPISVIPTYVYPLALYGFMVFFLINPTKTFYYKSRFWLLKLLFRVFTAPFHKVGFADFWLADQLNSLSVILMDLEYMICFYSLELKWDESKGLLPNNSEERGHSDTMVFFYLWIVFYIISSCYTLIWDLKMDWGLFDKNAGENTFLREEIVYPQKAYYYCAIIEDVILRFAWTIQISITSTTLLPHSGDIIATVFAPLEVFRWIVELSMKSKSMNSLEVNIG

SEQ ID NO: 322 - protein, 557 aa, Artificial Sequence
  Synthetic polypeptide
MENDPSRRRESISLTPVAKGLENMGADFLESLEEGQLPRSDLSPAEIRSSWSEAAPKPFSRWRNLQPALRARSFCREHMQLFRWIGTGLLCTGLSAFLLVACLLDFQRALALFVLTCVVLTFLGHRLLKRLLGPKLRRFLKPQGHPRLLLWFKRGLALAAFLGLVLWLSLDTSQRPEQLVSFAGICVFVALLFACSKHHCAVSWRAVSWGLGLQFVLGLLVIRTEPGFIAFEWLGEQIRIFLSYTKAGSSFVFGEALVKDVFAFQVLPIIVFFSCVISVLYHVGLMQWVILKIAWLMQVTMGTTATETLSVAGNIFVSQTEAPLLIRPYLADMTLSEVHVVMTGGYATIAGSLLGAYISFGIDATSLIAASVMAAPCALALSKLVYPEVEESKFRREEGVKLTYGDAQNLIEAASTGAAISVKVVANIAANLIAFLAVLDFINAALSWLGDMVDIQGLSFQLICSYILRPVAFLMGVAWEDCPVVAELLGIKLFLNEFVAYQDLSKYKQRRLAGAEEWVGDRKQWISLECRWEGEQAWTMKTKATPERWSSFKLKGA

SEQ ID NO: 323 - protein, 557 aa, Artificial Sequence; identical to SEQ ID NO: 322
  Synthetic polypeptide

SEQ ID NO: 324 - protein, 557 aa, Artificial Sequence; identical to SEQ ID NO: 322
  Synthetic polypeptide

SEQ ID NO: 325 - protein, 557 aa, Artificial Sequence; identical to SEQ ID NO: 322
  Synthetic polypeptide

SEQ ID NO: 326 - protein, 555 aa, Artificial Sequence
  Synthetic polypeptide
MGPPLPLLLLLLLLLPPRVLPAAPSSVPRGRQLPGRLGCLLEEGLCGASEACVNGFTWQDDYTQYVMDQELADLPKTYLRRPEASSPARPSKHSVGSERRYSREGGAALANALRRHLPFLEALSQAPASDVLARTHTAQDRPPAEGDDRFSESILTYVAHTSALTYPPGSRTQLREDLLPRTLGQLQPDELSPKVDSGVDRHHLMAALSAYAAQRPPAPPGEGSLEPQYLLRAPSRMPRPLLAPAAPQKWPSPLGDSEDPSSTGDGARIHTLLKDLQRQPAEVRGLSGLELDGMAELMAGLMQGVDHGVARGSPGRAALGESGEQADGPKATLRGDSFPDDGVQDDDDRLYQEVHRLSATLGGLLQDHGSRLLPGALPFARPLDMERKKSEHPESSLSSEEETAGVENVKSQTYSKDLLGQQPHSEPGAAAFGELQNQMPGPSKEEQSLPAGAQEALSDGLQLEVQPSEEEARGYIVTDRDPLRPEEGRRLVEDVARLLQVPSSAFADVDSIQTTQRVRKNLHDLYIRQKTNIQTLQRTHISKKQTVPSNNGLKT

SEQ ID NO: 327 - protein, 555 aa, Artificial Sequence
  Synthetic polypeptide
MARSPGRAYALLLLLICFNVGSGLHLQVLSTRNENKLLPKHPHLVRQKRAWITAPVALREGEDLSKKNPIAKIHSDLAEERGLKITYKYTGKGITEPPFGIFVFNKDTGELNVTSILDREETPFFLLTGYALDARGNNVEKPLELRIKVLDINDNEPVFTQDVFVGSVEELSAAHTLVMKINATDADEPNTLNSKISYRIVSLEPAYPPVFYLNKDTGEIYTTSVTLDREEHSSYTLTVEARDGNGEVTDKPVKQAQVQIRILDVNDNIPVVENKVLEGMVEENQVNVEVTRIKVFDADEIGSDNWLANFTFASGNEGGYFHIETDAQTNEGIVTLIKEVDYEEMKNLDFSVIVANKAAFHKSIRSKYKPTPIPIKVKVKNVKEGIHFKSSVISIYVSESMDRSSKGQIIGNFQAFDEDTGLPAHARYVKLEDRDNWISVDSVTSEIKLAKLPDFESRYVQNGTYTVKIVAISEDYPRKTITGTVLINVEDINDNCPTLIEPVQTICHDAEYVNVTAEDLDGHPNSGPFSFSVIDKPPGMAEKWKIARQESLNFF

SEQ ID NO: 328 - protein, 554 aa, Artificial Sequence
  Synthetic polypeptide
MGPPLPLLLLLLLLLPPRVLPAAPSSVPRGRQLPGRLGCLLEEGLCGASEACVNGFTWQDDYTQYVMDQELADLPKTYLRRPEASSPARPSKHSVGSERRYSREGGAALANALRRHLPFLEALSQAPASDVLARTHTAQDRPPAEGDDRFSESILTYVAHTSALTYPPGSRTQLREDLLPRTLGQLQPDELSPKVDSGVDRHHLMAALSAYAAQRPPAPPGEGSLEPQYLLRAPSRMPRPLLAPAAPQKWPSPLGDSEDPSSTGDGARIHTLLKDLQRQPAEVRGLSGLELDGMAELMAGLMQGVDHGVARGSPGRAALGESGEQADGPKATLRGDSFPDDGVQDDDDRLYQEVHRLSATLGGLLQDHGSRLLPGALPFARPLDMERKKSEHPESSLSSEEETAGVENVKSQTYSKDLLGQQPHSEPGAAAFGELQNQMPGPSKEEQSLPAGAQEALSDGLQLEVQPSEEEARGYIVTDRDPLRPEEGRRLVEDVARLLQVPSSAFADVDIQTTQRVRKNLHDLYIRQKTNIQTLQRTHISKKQTVPSNNGLKT

SEQ ID NO: 329 - protein, 552 aa, Artificial Sequence
  Synthetic polypeptide
MGGKQRDEDDEAYGKPVKYDPSFRGPIKNRSCTDVICCVLFLLFILGYIVVGIVAWLYGDPRQVLYPRNSTGAYCGMGENKDKPYLLYFNIFSCILSSNIISVAENGLQCPTPQTVITSLQQELCPSFLLPSAPALGRCFPWTNVTPPALPGITNDTTIQQGISGLIDSLNARDISVKIFEDFAQSWYWILVALGVALVLSLLFILLLRLVAGPLVLVLILGVLGVLAYGIYYCWEEYRVLRDKGASISQLGFTTNLSAYQSVQETWLAALIVLAVLEAILLLMLIFLRQRIRIAIALLKEASKAVGQMMSTMFYPLVTFVLLLICIAYWAMTALYLATSGQPQYVLWASNISSPGCEKVPINTSCNPTAHLVNSSCPGLMCVFQGYSSKGLIQRSVFNLQIYGVLGLFWTLNWVLALGQCVLAGAFASFYWAFHKPQDIPTFPLISAFIRTLRYHTGSLAFGALILTLVQIARVILEYIDHKLRGVQNPVARCIMCCFKCCLWCLEKFIKFLNRNAYIMIAIYGKNFCVSAKNAFMLLMRNIVSPHKLRSQ

SEQ ID NO: 330 - protein, 551 aa, Artificial Sequence
  Synthetic polypeptide
MFCGRLNMHMNVQNGKWDSDPSGTKTCIDTKEGILQYCQEVYPELQITNVVEANQPVTIQNWCKRGRKQCKTHPHFVIPYRCLVGEFVSDALLVPDKCKFLHQERMDVCETHLHWHTVAKETCSEKSTNLHDYGMLLPCGIDKFRGVEFVCCPLAEESDNVDSADAEEDDSDVWWGGADTDYADGSEDKVVEVAEEEEVAEVEEEEADDDEDDEDGDEVEEEAEEPYEEATERTTSIATTTTTTTESVEEVVRVPTTAASTPDAVDKYLETPGDENEHAHFQKAKERLEAKHRERMSQVMREWEEAERQAKNLPKADKKAVIQHFQEKVESLEQEAANERQQLVETHMARVEAMLNDRRRLALENYITALQAVPPRPRHVFNMLKKYVRAEQKDRQHTLKHFEHVRMVDPKKAAQIRSQVMTHLRVIYERMNQSLSLLYNVPAVAEEIQDEVDELLQKEQNYSDDVLANMISEPRISYGNDALMPSLTETKTTVELLPVNGEFSLDDLQPWHSFGADSVPANTENEVEPVDARPAADRGLTTRPGYQVEAF

SEQ ID NO: 331 - protein, 551 aa, Artificial Sequence
  Synthetic polypeptide
MGMARGSLTRVPGVMGEGTQGPELSLDPDPCSPQSTPGLMKGNKLEEQDPRPLQPIPGLMEGNKLEEQDSSPPQSTPGLMKGNKREEQGLGPEPAAPQQPTAEEEALIEFHRSYRELFEFFCNNTTIHGAIRLVCSQHNRMKTAFWAVLWLCTFGMMYWQFGLLFGEYFSYPVSLNINLNSDKLVFPAVTICTLNPYRYPEIKEELEELDRITEQTLFDLYKYSSFTTLVAGSRSRRDLRGTLPHPLQRLRVPPPPHGARRARSVASSLRDNNPQVDWKDWKIGFQLCNQNKSDCFYQTYSSGVDAVREWYRFHYINILSRLPETLPSLEEDTLGNFIFACRFNQVSCNQANYSHFHHPMYGNCYTFNDKNNSNLWMSSMPGINNGLSLMLRAEQNDFIPLLSTVTGARVMVHGQDEPAFMDDGGFNLRPGVETSISMRKETLDRLGGDYGDCTKNGSDVPVENLYPSKYTQQVCIHSCFQESMIKECGCAYIFYPRPQNVEYCDYRKHSSWGRARWLTPVIPALWEATAGGSRGQEMETILANTVKPRLY

SEQ ID NO: 332 - protein, 545 aa, Artificial Sequence
  Synthetic polypeptide
MECLYYFLGFLLLAARLPLDAAKRFHDVLGNERPSAYMREHNQLNGWSSDENDWNEKLYPVWKRGDMRWKNSWKGGRVQAVLTSDSPALVGSNITFAVNLIFPRCQKEDANGNIVYEKNCRNEAGLSADPYVYNWTAWSEDSDGENGTGQSHHNVFPDGKPFPHHPGWRRWNFIYVFHTLGQYFQKLGRCSVRVSVNTANVTLGPQLMEVTVYRRHGRAYVPIAQVKDVYVVTDQIPVFVTMFQKNDRNSSDETFLKDLPIMFDVLIHDPSHFLNYSTINYKWSFGDNTGLFVSTNHTVNHTYVLNGTFSLNLTVKAAAPGPCPPPPPPPRPSKPTPSLATTLKSYDSNTPGPAGDNPLELSRIPDENCQINRYGHFQATITIVEGILEVNIIQMTDVLMPVPWPESSLIDFVVTCQGSIPTEVCTIISDPTCEITQNTVCSPVDVDEMCLLTVRRTFNGSGTYCVNLTLGDDTSLALTSTLISVPDRDPASPLRMANSALISVGCLAIFVTVISLLVYKLPKMKKYLTKSSVERKCNFAVGILN

SEQ ID NO: 333 - protein, 543 aa, Artificial Sequence
  Synthetic polypeptide
MGENKDKPYLLYFNIFSCILSSNIISVAENGLQCPTPQVCVSSCPEDPWTVGKNEFSQTVGEVFYTKNRNFCLPGVPWNMTVITSLQQELCPSFLLPSAPALGRCFPWTNVTPPALPGITNDTTIQQGISGLIDSLNARDISVKIFEDFAQSWYWILVALGVALVLSLLFILLLRLVAGPLVLVLILGVLGVLAYGIYYCWEEYRVLRDKGASISQLGFTTNLSAYQSVQETWLAALIVLAVLEAILLLMLIFLRQRIRIAIALLKEASKAVGQMMSTMFYPLVTFVLLLICIAYWAMTALYLATSGQPQYVLWASNISSPGCEKVPINTSCNPTAHLVNSSCPGLMCVFQGYSSKGLIQRSVFNLQIYGVLGLFWTLNWVLALGQCVLAGAFASFYWAFHKPQDIPTFPLISAFIRTLRYHTGSLAFGALILTLVQIARVILEYIDHKLRGVQNPVARCIMCCFKCCLWCLEKFIKFLNRNAYIMIAIYGKNFCVSAKNAFMLLMRNIVRVVVLDKVTDLLLFFGKLLVAGESLEPGRQRLQ

SEQ ID NO: 334 - protein, 542 aa, Artificial Sequence [sequence omitted]

SEQ ID NO: 335 - protein, 541 aa, Artificial Sequence
  Synthetic polypeptide
MWNLLHETDSAVATARRPRWLCAGALVLAGGFFLLGFLFGWFIKSSNEATNITPKHNMKAFLDELKAENIKKFLYNFTQIPHLAGTEQNFQLAKQIQSQWKEFGLDSVELAHYDVLLSYPNKTHPNYISIINEDGNEIFNTSLFEPPPPGYENVSDIVPPFSAFSPQGMPEGDLVYVNYARTEDFFKLERDMKINCSGKIVIARYGKVFRGNKVKNAQLAGAKGVILYSDPADYFAPGVKSYPDGWNLPGGGVQRGNILNLNGAGDPLTPGYPANEYAYRRGIAEAVGLPSIPVHPIGYYDAQKLLEKMGGSAPPDSSWRGSLKVPYNVGPGFTGNFSTQKVKMHIHSTNEVTRIYNVIGTLRGAVEPDRYVILGGHRDSWVFGGIDPQSGAAVVHEIVRSFGTLKKEGWRPRRTILFASWDAEEFGLLGSTEWAEENSRLLQERGVAYINADSSIEGNYTLRVDCTPLMYSLVHNLTKEPSPMIPPGTVKSEATSDWSRPPSTTQQPCRKVARLFKKKKKKRKKRTSSTQRSPTSKIEGR

SEQ ID NO: 336 - protein, 541 aa, Artificial Sequence; identical to SEQ ID NO: 335
  Synthetic polypeptide

SEQ ID NO: 337 - protein, 540 aa, Artificial Sequence
  Synthetic polypeptide
MFRQFYLWTCLASGIILGSLFEICLGQYDDDCKLARGGPPATIVAIDEESRNGTILVDNMLIKGTAGGPDPTIELSLKDNVDYWVLMDPVKQMLFLNSTGRVLDRDPPMNIHSIVVQVQCINKKVGTIIYHEVRIVVRDRNDNSPTFKHESYYATVNELTPVGTTIFTGFSGDNGATDIDDGPNGQIEYVIQYNPDDPTSNDTFEIPLMLTGNIVLRKRLNYEDKTRYFVIIQANDRAQNLNERRTTTTTLTVDVLDGDDLGPMFLPCVLVPNTRDCRPLTYQAAIPELRTPEELNPIIVTPPIQAIDQDRNIQPPSDRPGILYSILVGTPEDYPRFFHMHPRTAELSLLEPVNRDFHQKFDLVIKAEQDNGHPLPAFAGLHIEILDENNQSPYFTMPSYQGYILESAPVGATISDSLNLTSPLRIVALDKDIEDVPPSGVPTKDPELHLFLNDYTSVFTVTQTGITRYLTLLQPVDREEQQTYTFSITAFDGVQESEPVIVNIQVMDANDNTPTFPEISYDVYVYTDMRPGDSVIQVLI

SEQ ID NO: 338 - protein, 540 aa, Artificial Sequence; identical to SEQ ID NO: 337
  Synthetic polypeptide

SEQ ID NO: 339 - protein, 538 aa, Artificial Sequence
  Synthetic polypeptide
MFRQFYLWTCLASGIILGSLFEICLGQYDDGWRYMYCKLARGGPPATIVAIDEESRNGTILVDNMLIKGTAGGPDPTIELSLKDNVDYWVLMDPVKQMLFLNSTGRVLDRDPPMNIHSIVVQVQCINKKVGTIIYHEVRIVVRDRNDNSPTFKHESYYATVNELTPVGTTIFTGFSGDNGATDIDDGPNGQIEYVIQYNPDDPTSNDTFEIPLMLTGNIVLRKRLNYEDKTRYFVIIQANDRAQNLNERRTTTTTLTVDVLDGDDLGPMFLPCVLVPNTRDCRPLTYQAAIPELRTPEELNPIIVTPPIQAIDQDRNIQPPSDRPGILYSILVGTPEDYPRFFHMHPRTAELSLLEPVNRDFHQKFDLVIKAEQDNGHPLPAFAGLHIEILDENNQSPYFTMPSYQGYILESAPVGATISDSLNLTSPLRIVALDKDIEDTKDPELHLFLNDYTSVFTVTQTGITRYLTLLQPVDREEQQTYTFSITAFDGVQESEPVIVNIQVMDANDNTPTFPEISYDVYVYTDMRPGDSVIQVLI

SEQ ID NO: 340 - protein, 538 aa, Artificial Sequence
  Synthetic polypeptide
MLLPLLLSSLLGGSQAMDGRFWIRVQESVMVPEGLCISVPCSFSYPRQDWTGSTPAYGYWFKAVTETTKGAPVATNHQSREVEMSTRGRFQLTGDPAKGNCSLVIRDAQMQDESQYFFRVERGSYVRYNFMNDGFFLKVTALTQKPDVYIPETLEPGQPVTVICVFNWAFEECPPPSFSWTGAALSSQGTKPTTSHFSVLSFTPRPQDHNTDLTCHVDFSRKGVSAQRTVRLRVAYAPRDLVISISRDNTPALEPQPQGNVPYLEAQKGQFLRLLCAADSQPPATLSWVLQNRVLSSSHPWGPRPLGLELPGVKAGDSGRYTCRAENRLGSQQRALDLSVQYPPENLRVMVSQANRTVLENLGNGTSLPVLEGQSLCLVCVTHSSPPARLSWTQRGQVLSPSQPSDPGVLELPRVQVEHEGEFTCHARHPLGSQHVSLSLSVHYKKGLISTAFSNGAFLGIGITALLFLCLALIIMKILPKRRTQTETPRPRFSRHSTILDYINVVPTAGPLAQKRNQKATPNSPRTPLPPGHSGSRL

SEQ ID NO: 341 - protein, 536 aa, Artificial Sequence
  Synthetic polypeptide
MEPSSKKLTGRLMLAVGGAVLGSLQFGYNTGVINAPQKVIEEFYNQTWVHRYGESILPTTLTTLWSLSVAIFSVGGMIGSFSVGLFVNRFGRRNSMLMMNLLAFVSAVLMGFSKLGKSFEMLILGRFIIGVYCGLTTGFVPMYVGEVSPTALRGALGTLHQLGIVVGILIAQVFGLDSIMGNKDLWPLLLSIIFIPALLQCIVLPFCPESPRFLLINRNEENRAKSVLKKLRGTADVTHDLQEMKEESRQMMREKKVTILELFRSPAYRQPILIAVVLQLSQQLSGINAVFYYSTSIFEKAGVQQPVYATIGSGIVNTAFTVVSLFVVERAGRRTLHLIGLAGMAGCAILMTIALALLEQLPWMSYLSIVAIFGFVAFFEVGPGPIPWFIVAELFSQGPRPAAIAVAGFSNWTSNFIVGMCFQYVEQLCGPYVFIIFTVLLVLFFIFTYFKVPETKGRTFDEIASGFRQGGASQSDKTPEELFHPLGADSQVYALLDPEGGLLPPEDTVELNSIELEVKTAIQPLWAPYASESTGQ

SEQ ID NO: 342 - protein, 534 aa, Artificial Sequence
  Synthetic polypeptide
MAQAVDRDTNRPLEPPSEFIVKVQDINDNPPEFLHETYHANVPERSNVGTSVIQVTASDADDPTYGNSAKLVYSILEGQPYFSVEAQTGIIRTALPNMDREAKEEYHVVIQAKDMGGHMGGLSGTTKVTITLTDVNDNPPKFPQSVYQMSVSEAAVPGEEVGRVKAKDPDIGENGLVTYNIVDGDGMESFEITTDYETQEGVIKLKKPVDFETKRAYSLKVEAANVHIDPKFISNGPFKDTVTVKISVEDADEPPMFLAPSYIHEVQENAAAGTVVGRVHAKDPDAANSPIRYSIDRHTDLDRFFTINPEDGFIKTTKPLDREETAWLNITVFAAEIHNRHQEAKVPVAIRVLDVNDNAPKFAAPYEGFICESDQTKPLSNQPIVTISADDKDDTANGPRFIFSLPPEIIHNPNFTVRDNRDNTAGVYARRGGFSRQKQDLYLLPIVISDGGIPPMSSTNTLTIKVCGCDVNGALLSCNAEAYILNAGLSTGALIAILACIVILLGPCEPLQCHSTPSSFQCTMLQPHWPSFGS

SEQ ID NO: 343 - protein, 533 aa, Artificial Sequence
  Synthetic polypeptide
MFRQFYLWTCLASGIILGSLFEICLGQYDDDCKLARGGPPATIVAIDEESRNGTILVDNMLIKGTAGGPDPTIELSLKDNVDYWVLMDPVKQMLFLNSTGRVLDRDPPMNIHSIVVQVQCINKKVGTIIYHEVRIVVRDRNDNSPTFKHESYYATVNELTPVGTTIFTGFSGDNGATDIDDGPNGQIEYVIQYNPDDPTSNDTFEIPLMLTGNIVLRKRLNYEDKTRYFVIIQANDRAQNLNERRTTTTTLTVDVLDGDDLGPMFLPCVLVPNTRDCRPLTYQAAIPELRTPEELNPIIVTPPIQAIDQDRNIQPPSDRPGILYSILVGTPEDYPRFFHMHPRTAELSLLEPVNRDFHQKFDLVIKAEQDNGHPLPAFAGLHIEILDENNQSPYFTMPSYQGYILESAPVGATISDSLNLTSPLRIVALDKDIEDTKDPELHLFLNDYTSVFTVTQTGITRYLTLLQPVDREEQQTYTFSITAFDGVQESEPVIVNIQVMDANDNTPTFPEISYDVYVYTDMRPGDSVIQVLI

SEQ ID NO: 344 - protein, 533 aa, Artificial Sequence; identical to SEQ ID NO: 343
  Synthetic polypeptide

SEQ ID NO: 345 - protein, 533 aa, Artificial Sequence; identical to SEQ ID NO: 343
  Synthetic polypeptide

SEQ ID NO: 346 - protein, 533 aa, Artificial Sequence; identical to SEQ ID NO: 343
  Synthetic polypeptide

SEQ ID NO: 347 - protein, 533 aa, Artificial Sequence; identical to SEQ ID NO: 343
  Synthetic polypeptide

SEQ ID NO: 348 - protein, 533 aa, Artificial Sequence; identical to SEQ ID NO: 343
  Synthetic polypeptide

SEQ ID NO: 349 - protein, 533 aa, Artificial Sequence; identical to SEQ ID NO: 343
  Synthetic polypeptide

SEQ ID NO: 350 - protein, 533 aa, Artificial Sequence; identical to SEQ ID NO: 343
  Synthetic polypeptide

SEQ ID NO: 351 - protein, 533 aa, Artificial Sequence
  Synthetic polypeptide
MECLYYFLGFLLLAARLPLDAAKRFHDVLGNERPSAYMREHNQLNGWSSDENDWNEKLYPVWKRGDMRWKNSWKGGRVQAVLTSDSPALVGSNITFAVNLIFPRCQKEDANGNIVYEKNCRNEAGLSADPYVYNWTAWSEDSDGENGTGQSHHNVFPDGKPFPHHPGWRRWNFIYVFHTLGQYFQKLGRCSVRVSVNTANVTLGPQLMEVTVYRRHGRAYVPIAQVKDVYVVTDQIPVFVTMFQKNDRNSSDETFLKDLPIMFDVLIHDPSHFLNYSTINYKWSFGDNTGLFVSTNHTVNHTYVLNGTFSLNLTVKAAAPGPCPPPPPPPRPSKPTPSLGPAGDNPLELSRIPDENCQINRYGHFQATITIVEGILEVNIIQMTDVLMPVPWPESSLIDFVVTCQGSIPTEVCTIISDPTCEITQNTVCSPVDVDEMCLLTVRRTFNGSGTYCVNLTLGDDTSLALTSTLISVPDRDPASPLRMANSALISVGCLAIFVTVISLLVYKLPKMKKYLTKSSVERKCNFAVGILN

SEQ ID NO: 352 - protein, 530 aa, Artificial Sequence
  Synthetic polypeptide
MLPGLALLLLAAWTARALEVYPELQITNVVEANQPVTIQNWCKRGRKQCKTHPHFVIPYRCLVGEFVSDALLVPDKCKFLHQERMDVCETHLHWHTVAKETCSEKSTNLHDYGMLLPCGIDKFRGVEFVCCPLAEESDNVDSADAEEDDSDVWWGGADTDYADGSEDKVVEVAEEEEVAEVEEEEADDDEDDEDGDEVEEEAEEPYEEATERTTSIATTTTTTTESVEEVVRVPTTAASTPDAVDKYLETPGDENEHAHFQKAKERLEAKHRERMSQVMREWEEAERQAKNLPKADKKAVIQHFQEKVESLEQEAANERQQLVETHMARVEAMLNDRRRLALENYITALQAVPPRPRHVFNMLKKYVRAEQKDRQHTLKHFEHVRMVDPKKAAQIRSQVMTHLRVIYERMNQSLSLLYNVPAVAEEIQDEVDELLQKEQNYSDDVLANMISEPRISYGNDALMPSLTETKTTVELLPVNGEFSLDDLQPWHSFGADSVPANTENEVEPVDARPAADRGLTTRPGYQVEAF

SEQ ID NO: 353 - protein, 529 aa, Artificial Sequence
  Synthetic polypeptide
MPEDIPLLPGSPRRLSPQAGSRGGQGPKHGQQCLKMPGPRAPGLQGGSNRDPGQPCGGESTRSSSVINNYLDANEPVSLEARLSRMHFHDSQRKVDYVLAYHYRKRGVHLAQGFPGHSLAIVSNGETGKEPHAGGPGDIELGPLDALEEERKEQREEFEHNLMEAGLELEKDLENKSQGSIFVRIHAPWQVLAREAEFLKIKVPTKKEMYEIKAGGSIAKKFSAALQKLSSHLQPRVPEHSNNKMKNLSYPFSREKMYLYNIQEKDTFFDNATRSRIVHEILKRTACSRANNTMGINSLIANNIYEAAYPLHDGEYDSPEDDMNDRKLLYQEWARYGVFYKFQPIDLIRKYFGEKIGLYFAWLGLYTSFLIPSSVIGVIVFLYGCATIEEDIPSREMCDQQNAFTMCPLCDKSCDYWNLSSACGTAQASHLFDNPATVFFSIFMALWATMFLENWKRLQMRLGYFWDLTGIEEEEERAQEHSRPEYETKVREKMLKESNQSAVQKLETNTTECGDEGHGWSWKSLSSAN

SEQ ID NO: 354 - protein, 529 aa, Artificial Sequence
  Synthetic polypeptide
MPEDIPLLPGSPRRLSPQAGSRGGQGPKHGQQCLKMPGPRAPGLQGGSNRDPGQPCGGESTRSSSVINNYLDANEPVSLEARLSRMHFHDSQRKVDYVLAYHYRKRGVHLAQGFPGHSLAIVSNGETGKEPHAGGPGDIELGPLDALEEERKEQREEFEHNLMEAGLELEKDLENKSQGSIFVRIHAPWQVLAREAEFLKIKVPTKKEMYEIKAGGSIAKKFSAALQKLSSHLQPRVPEHSNNKMKNLSYPFSREKMYLYNIQEKDTFFDNATRSRIVHEILKRTACSRANNTMGINSLIANNIYEAAYPLHDGEYDSPEDDMNDRKLLYQEWARYGVFYKFQPIDLIRKYFGEKIGLYFAWLGLYTSFLIPSSVIGVIVFLYGCATIEEDIPSREMCDQQNAFTMCPLCDKSCDYWNLSSACGTAQASHLFDNPATVFFSIFMALWATMFLENWKRLQMRLGYFWDLTGIEEEEPRVQEHSRPEYETKVREKMLKESNQSAVQKLETNTTECGDEGHGWSWKSLSSAN

SEQ ID NO: 355 - protein, 528 aa, Artificial Sequence
  Synthetic polypeptide
MPEDIPLLPGSPRRLSPQAGSRGGQGPKHGQQCLKMPGPRAPGLQGGSNRDPGQPCGGESTRSSSVINNYLDANEPVSLEARLSRMHFHDSQRKVDYVLAYHYRKRGVHLAQGFPGHSLAIVSNGETGKEPHAGGPGDIELGPLDALEEERKEQREEFEHNLMEAGLELEKDLENKSQGSIFVRIHAPWQVLAREAEFLKIKVPTKKMYEIKAGGSIAKKFSAALQKLSSHLQPRVPEHSNNKMKNLSYPFSREKMYLYNIQEKDTFFDNATRSRIVHEILKRTACSRANNTMGINSLIANNIYEAAYPLHDGEYDSPEDDMNDRKLLYQEWARYGVFYKFQPIDLIRKYFGEKIGLYFAWLGLYTSFLIPSSVIGVIVFLYGCATIEEDIPSREMCDQQNAFTMCPLCDKSCDYWNLSSACGTAQASHLFDNPATVFFSIFMALWATMFLENWKRLQMRLGYFWDLTGIEEEEERAQEHSRPEYETKVREKMLKESNQSAVQKLETNTTECGDEGHGWSWKSLSSAN

SEQ ID NO: 356 - protein, 526 aa, Artificial Sequence
  Synthetic polypeptide
MTAGSSYPLFLAAYACTGCLAERLGWFIKSSNEATNITPKHNMKAFLDELKAENIKKFLYNFTQIPHLAGTEQNFQLAKQIQSQWKEFGLDSVELAHYDVLLSYPNKTHPNYISIINEDGNEIFNTSLFEPPPPGYENVSDIVPPFSAFSPQGMPEGDLVYVNYARTEDFFKLERDMKINCSGKIVIARYGKVFRGNKVKNAQLAGAKGVILYSDPADYFAPGVKSYPDGWNLPGGGVQRGNILNLNGAGDPLTPGYPANEYAYRRGIAEAVGLPSIPVHPIGYYDAQKLLEKMGGSAPPDSSWRGSLKVPYNVGPGFTGNFSTQKVKMHIHSTNEVTRIYNVIGTLRGAVEPDRYVILGGHRDSWVFGGIDPQSGAAVVHEIVRSFGTLKKEGWRPRRTILFASWDAEEFGLLGSTEWAEENSRLLQERGVAYINADSSIEGNYTLRVDCTPLMYSLVHNLTKEPSPMIPPGTVKSEATSDWSRPPSTTQQPCRKVARLFKKKKKKRKKRTSSTQRSPTSKIEGR

SEQ ID NO: 357 - protein, 526 aa, Artificial Sequence; identical to SEQ ID NO: 356
  Synthetic polypeptide

SEQ ID NO: 358 - protein, 525 aa, Artificial Sequence
  Synthetic polypeptide
MAWRCPRMGRVPLAWCLALCGWACMAPRGTQAEESPFVGNPGNITGARGLTGTLRCQLQVQGEPPEVHWLRDGQILELADSTQTQVPLGEDEQDDWIVVSQLRITSLQLSDTGQYQCLVFLGHQTFVSQPGYVGLEGLPYFLEEPEDRTVAANTPFNLSCQAQGPPEPVDLLWLQDAVPLATAPGHGPQRSLHVPGLNKTSSFSCEAHNAKGVTTSRTATITVLPQQPRNLHLVSRQPTELEVAWTPGLSGIYPLTHCTLQAVLSNDGMGIQAGEPDPPEEPLTSQASVPPHQLRLGSLHPHTPYHIRVACTSSQGPSSWTHWLPVETPEGVPLGPPENISATRNGSQAFVHWQEPRAPLQGTLLGYRLAYQGQDTPEVLMDIGLRQEVTLELQGDGSVSNLTVCVAAYTAAGDGPWSLPVPLEAWRPGQAQPVHQLVKEPSTPAFSWPWWYVLLGAVVAAACVLILALFLVHRRKKETRYGEVFEPTVERGELVVRYRVRKSYSRRTTEATSFSAVFQRLPDVG

SEQ ID NO: 359 - protein, 524 aa, Artificial Sequence
  Synthetic polypeptide
MALTPPLLLLSAGTMTLGSPRKGLLMLLMALVTQGDPVKPSRGPLVTCTCESPHCKGPTCRGAWCTVVLVREEGRHPQEHRGCGNLHRELCRGRPTEFVNHYCCDSHLCNHNVSLVLEATQPPSEQPGTDGQLALILGPVLALLALVALGVLGLWHVRRRQEKQRGLHSELGESSLILKASEQGDSMLGDLLDSDCTTGSGSGLPFLVQRTVARQVALVECVGKGRYGEVWRGLWHGESVAVKIFSSRDEQSWFRETEIYNTVLLRHDNILGFIASDMTSRNSSTQLWLITHYHEHGSLYDFLQRQTLEPHLALRLAVSAACGLAHLHVEIFGTQGKPAIAHRDFKSRNVLVKSNLQCCIADLGLAVMHSQGSDYLDIGNNPRVGTKRYMAPEVLDEQIRTDCFESYKWTDIWAFGLVLWEIARRTIVNGIVEDYRPPFYDVVPNDPSFEDMKKVVCVDQQTPTIPNRLAADPVLPTRHQLAAKRNPQAHTPPATLDSLLLPFLLTFIGKASFSPPTHSSAHAP

SEQ ID NO: 360 - protein, 518 aa, Artificial Sequence
  Synthetic polypeptide
MGENKDKPYLLYFNIFSCILSSNIISVAENGLQCPTPQVCVSSCPEDPWTVGKNEFSQTVGEVFYTKNRNFCLPGVPWNMTVITSLQQELCPSFLLPSAPALGRCFPWTNVTPPALPGITNDTTIQQGISGLIDSLNARDISVKIFEDFAQSWYWILVALGVALVLSLLFILLLRLVAGPLVLVLILGVLGVLAYGIYYCWEEYRVLRDKGASISQLGFTTNLSAYQSVQETWLAALIVLAVLEAILLLMLIFLRQRIRIAIALLKEASKAVGQMMSTMFYPLVTFVLLLICIAYWAMTALYLATSGQPQYVLWASNISSPGCEKVPINTSCNPTAHLVNSSCPGLMCVFQGYSSKGLIQRSVFNLQIYGVLGLFWTLNWVLALGQCVLAGAFASFYWAFHKPQDIPTFPLISAFIRTLRYHTGSLAFGALILTLVQIARVILEYIDHKLRGVQNPVARCIMCCFKCCLWCLEKFIKFLNRNAYIMIAIYGKNFCVSAKNAFMLLMRNIVSPHKLRSQ

SEQ ID NO: 361 - protein, 516 aa, Artificial Sequence
  Synthetic polypeptide
MAWRCPRMGRVPLAWCLALCGWACMAPRGTQAEESPFVGNPGNITGARGLTGTLRCQLQVQGEPPEVHWLRDGQILELADSTQTQVPLGEDEQDDWIVVSQLRITSLQLSDTGQYQCLVFLGHQTFVSQPGYVGLEGLPYFLEEPEDRTVAANTPFNLSCQAQGPPEPVDLLWLQDAVPLATAPGHGPQRSLHVPGLNKTSSFSCEAHNAKGVTTSRTATITVLPQQPRNLHLVSRQPTELEVAWTPGLSGIYPLTHCTLQAVLSNDGMGIQAGEPDPPEEPLTSQASVPPHQLRLGSLHPHTPYHIRVACTSSQGPSSWTHWLPVETPEGVPLGPPENISATRNGSQAFVHWQEPRAPLQGTLLGYRLAYQGQDTPEVLMDIGLRQEVTLELQGDGSVSNLTVCVAAYTAAGDGPWSLPVPLEAWRPVKEPSTPAFSWPWWYVLLGAVVAAACVLILALFLVHRRKKETRYGEVFEPTVERGELVVRYRVRKSYSRRTTEATSFSAVFQRLPDVG

SEQ ID NO: 362 - protein, 515 aa, Artificial Sequence
  Synthetic polypeptide
MSSIKGNKLEEQDPRPLQPIPGLMEGNKLEEQDSSPPQSTPGLMKGNKREEQGLGPEPAAPQQPTAEEEALIEFHRSYRELFEFFCNNTTIHGAIRLVCSQHNRMKTAFWAVLWLCTFGMMYWQFGLLFGEYFSYPVSLNINLNSDKLVFPAVTICTLNPYRYPEIKEELEELDRITEQTLFDLYKYSSFTTLVAGSRSRRDLRGTLPHPLQRLRVPPPPHGARRARSVASSLRDNNPQVDWKDWKIGFQLCNQNKSDCFYQTYSSGVDAVREWYRFHYINILSRLPETLPSLEEDTLGNFIFACRFNQVSCNQANYSHFHHPMYGNCYTFNDKNNSNLWMSSMPGINNGLSLMLRAEQNDFIPLLSTVTGARVMVHGQDEPAFMDDGGFNLRPGVETSISMRKETLDRLGGDYGDCTKNGSDVPVENLYPSKYTQQVCIHSCFQESMIKECGCAYIFYPRPQNVEYCDYRKHSSWGRARWLTPVIPALWEATAGGSRGQEMETILANTVKPRLY

SEQ ID NO: 363 - protein, 513 aa, Artificial Sequence
  Synthetic polypeptide
MRRERTRGPQAWEFPSPTKSGCSLQSLSRDLRELREGEKPEDQAETEESWQGLARKTPGKACAPEGGSCQPGKTENTITMTTSHQPQDRYKAVWLIFFMLGLGTLLPWNFFMTATQYFTNRLDMSQNVSLVTAELSKDAQASAAPAAPLPERNSLSAIFNNVMTLCAMLPLLLFTYLNSFLHQRIPQSVRILGSLVAILLVFLITAILVKVQLDALPFFVITMIKIVLINSFGAILQGSLFGLAGLLPASYTAPIMSGQGLAGFFASVAMICAIASGSELSESAFGYFITACAVIILTIICYLGLPRLEFYRYYQQLKLEGPGEQETKLDLISKGEEPRAGKEESGVSVSNSQPTNESHSIKAILKNISVLAFSVCFIFTITIGMFPAVTVEVKSSIAGSSTWERYFIPVSCFLTFNIFDWLGRSLTAVFMWPGKDSRWLPSLVLARLVFVPLLLLCNIKPRRYLTVVFEHDAWFIFFMAAFAFSNGYLASLCMCFGPKLKDGKTFCKLQSTR

SEQ ID NO: 364 - protein, 512 aa, Artificial Sequence
  Synthetic polypeptide
MGGKGGGDTRGPVLFPCQLAQALSPRRAFPRELKEKGQRMSSQPAGNQTSPGATEDYSYGSWYIDEPQGGEELQPEGEVPSCHTSIPPGLYHACLASLSILVLLLLAMLVRRRQLWPDCVRGRPGLPSPVDFLAGDRPRAVPAAVFMVLLSSLCLLLPDEDALPFLTLASAPSQDGKTEAPRGAWKILGLFYYAALYYPLAACATAGHTAAHLLGSTLSWAHLGVQVWQRAECPQVPKIYKYYSLLASLPLLLGLGFLSLWYPVQLVRSFSRRTGAGSKGLQSSYSEEYLRNLLCRKKLGSSYHTSKHGFLSWARVCLRHCIYTPQPGFHLPLKLVLSATLTGTAIYQVALLLLVGVVPTIQKVRAGVTTDVSYLLAGFGIVLSEDKQEVVELVKHHLWALEVCYISALVLSCLLTFLVLMRSLVTHRTNLRALHRGAALDLSPLHRSPHPSRQAIFCWMSFSAYQTAFICLAGYGGVHLQFQLFGRMRQENRLNPGGGGCSEPRLHHCAPA

SEQ ID NO: 365 - protein, 512 aa, Artificial Sequence
  Synthetic polypeptide
MTMYLWLKLLAFGFAFLDTEVFVTGQSPTPSPTGVSSVQTPHLPTHADSQTPSAGTDTQTFSGSAANAKLNPTPGSNAISDAYLNASETTTLSPSGSAVISTTTIATTPSKPTCDEKYANITVDYLYNKETKLFTAKLNVNENVECGNNTCTNNEVHNLTECKNASVSISHNSCTAPDKTLILDVPPGVEKFQLHDCTQVEKADTTICLKWKNIETFTCDTQNITYRFQCGNMIFDNKEIKLENLEPEHEYKCDSEILYNNHKFTNASKIIKTDFGSPGEPQIIFCRSEAAHQGVITWNPPQRSFHNFTLCYIKETEKDCLNLDKNLIKYDLQNLKPYTKYVLSLHAYIIAKVQRNGSAAMCHFTTKSAPPSQVWNMTVSMTSDNSMHVKCRPPRDRNGPHERYHLEVEAGNTLVRNESHKNCDFRVKDLQYSTDYTFKAYFHNGDYPGEPFILHHSTSYNSKALIAFLAFLIIVTSIALLVVLYKIYDLHKKRSCNLDEQQELVERECNTI

SEQ ID NO: 366 - protein, 511 aa, Artificial Sequence
  Synthetic polypeptide
MFRQFYLWTCLASGIILGSLFEICLGQYDDGTILVDNMLIKGTAGGPDPTIELSLKDNVDYWVLMDPVKQMLFLNSTGRVLDRDPPMNIHSIVVQVQCINKKVGTIIYHEVRIVVRDRNDNSPTFKHESYYATVNELTPVGTTIFTGFSGDNGATDIDDGPNGQIEYVIQYNPDDPTSNDTFEIPLMLTGNIVLRKRLNYEDKTRYFVIIQANDRAQNLNERRTTTTTLTVDVLDGDDLGPMFLPCVLVPNTRDCRPLTYQAAIPELRTPEELNPIIVTPPIQAIDQDRNIQPPSDRPGILYSILVGTPEDYPRFFHMHPRTAELSLLEPVNRDFHQKFDLVIKAEQDNGHPLPAFAGLHIEILDENNQSPYFTMPSYQGYILESAPVGATISDSLNLTSPLRIVALDKDIEDTKDPELHLFLNDYTSVFTVTQTGITRYLTLLQPVDREEQQTYTFSITAFDGVQESEPVIVNIQVMDANDNTPTFPEISYDVYVYTDMRPGDSVIQVLI

SEQ ID NO: 367 - protein, 511 aa, Artificial Sequence; identical to SEQ ID NO: 366
  Synthetic polypeptide

SEQ ID NO: 368 - protein, 510 aa, Artificial Sequence
  Synthetic polypeptide
MTLGSPRKGLLMLLMALVTQGDPVKPSRGPLVTCTCESPHCKGPTCRGAWCTVVLVREEGRHPQEHRGCGNLHRELCRGRPTEFVNHYCCDSHLCNHNVSLVLEATQPPSEQPGTDGQLALILGPVLALLALVALGVLGLWHVRRRQEKQRGLHSELGESSLILKASEQGDSMLGDLLDSDCTTGSGSGLPFLVQRTVARQVALVECVGKGRYGEVWRGLWHGESVAVKIFSSRDEQSWFRETEIYNTVLLRHDNILGFIASDMTSRNSSTQLWLITHYHEHGSLYDFLQRQTLEPHLALRLAVSAACGLAHLHVEIFGTQGKPAIAHRDFKSRNVLVKSNLQCCIADLGLAVMHSQGSDYLDIGNNPRVGTKRYMAPEVLDEQIRTDCFESYKWTDIWAFGLVLWEIARRTIVNGIVEDYRPPFYDVVPNDPSFEDMKKVVCVDQQTPTIPNRLAADPVLPTRHQLAAKRNPQAHTPPATLDSLLLPFLLTFIGKASFSPPTHSSAHAP

SEQ ID NO: 369 - protein, 510 aa, Artificial Sequence
  Synthetic polypeptide
MQIRLLRAELVVPLWQFIRQWPPGSDGWGQMEEKGQRMSSQPAGNQTSPGATEDYSYGSWYIDEPQGGEELQPEGEVPSCHTSIPPGLYHACLASLSILVLLLLAMLVRRRQLWPDCVRGRPGLPSPVDFLAGDRPRAVPAAVFMVLLSSLCLLLPDEDALPFLTLASAPSQDGKTEAPRGAWKILGLFYYAALYYPLAACATAGHTAAHLLGSTLSWAHLGVQVWQRAECPQVPKIYKYYSLLASLPLLLGLGFLSLWYPVQLVRSFSRRTGAGSKGLQSSYSEEYLRNLLCRKKLGSSYHTSKHGFLSWARVCLRHCIYTPQPGFHLPLKLVLSATLTGTAIYQVALLLLVGVVPTIQKVRAGVTTDVSYLLAGFGIVLSEDKQEVVELVKHHLWALEVCYISALVLSCLLTFLVLMRSLVTHRTNLRALHRGAALDLSPLHRSPHPSRQAIFCWMSFSAYQTAFICLAGYGGVHLQFQLFGRMRQENRLNPGGGGCSEPRLHHCAPA

SEQ ID NO: 370 - protein, 509 aa, Artificial Sequence
  Synthetic polypeptide
MVALSSLLVIVFIIIVLYMLRRFRKAELMSRNTEKYKQAGSHSNSFRLSNGRTEDVEPQSVPLLARSPSTNRKYPPLPVDKLEEEINRRMADDNKLFREEFNALPACPIQATCEAASKEENKEKNRYVNILPYDHSRVHLTPVEGVPDSDYINASFINGYQEKNKFIAAQGPKEETVNDFWRMIWEQNTATIVMVTNLKERKECKCAQYWPDQGCWTYGNIRVSVEDVTVLVDYTVRKFCIQQVGDMTNRKPQRLITQFHFTSWPDFGVPFTPIGMLKFLKKVKACNPQYAGAIVVHCSAGVGRTGTFVVIDAMLDMMHTERKVDVYGFVSRIRAQRCQMVQTDMQYVFIYQALLEHYLYGDTELEVTSLETHLQKIYNKIPGTSNNGLEEEFKKLTSIKIQNDKMRTGNLPANMKKNRVLQIIPYEFNRVIIPVKRGEENTDYVNASFIDGYRQKDSYIASQGPLLHTIEDFWRMIWEWKSCSIVMLTELEERGQAWPHWDCFSQDHQ

SEQ ID NO: 371 - protein, 508 aa, Artificial Sequence
  Synthetic polypeptide
MSKSKCSVGLMSSVVAPAKEPNAVGPKEVELILVKEQNGVQLTSSTLTNPRQSPVEAQDRETWGKKIDFLLSVIGFAVDLANVWRFPYLCYKNGGGAFLVPYLLFMVIAGMPLFYMELALGQFNREGAAGVWKICPILKGVGFTVILISLYVGFFYNVIIAWALHYLFSSFTTELPWIHCNNSWNSPNCSDAHPGDSSGDSSGLNDTFGTTPAAEYFERGVLHLHQSHGIDDLGPPRWQLTACLVLVIVLLYFSLWKGVKTSGKVVWITATMPYVVLTALLLRGVTLPGAIDGIRAYLSVDFYRLCEASVWIDAATQVCFSLGVGFGVLIAFSSYNKFTNNCYRDAIVTTSINSLTSFSSGFVVFSFLGYMAQKHSVPIGDVAKDGPGLIFIIYPEAIATLPLSSAWAVVFFIMLLTLGIDSAMGGMESVITGLIDEFQLLHRHRELFTLFIVLATFLLSLFCVTNGGIYVFTLLDHFAAGTSILFGVLIEAIGVAWFYGWSSEDGRW

SEQ ID NO: 372 - protein, 508 aa, Artificial Sequence; identical to SEQ ID NO: 371
  Synthetic polypeptide

SEQ ID NO: 373 - protein, 506 aa, Artificial Sequence
  Synthetic polypeptide
MSSQPAGNQTSPGATEDYSYGSWYIDEPQGGEELQPEGEVPSCHTSIPPGLYHACLASLSILVLLLLAMLVRRRQLWPDCVRGRPGLPSPVDFLAGDRPRAVPAAVFMVLLSSLCLLLPDEDALPFLTLASAPSQDGKTEAPRGAWKILGLFYYAALYYPLAACATAGHTAAHLLGSTLSWAHLGVQVWQRAECPQVPKIYKYYSLLASLPLLLGLGFLSLWYPVQLVRSFSRRTGAGSKGLQSSYSEEYLRNLLCRKKLGSRMAAVEDWLLLPRILVIKRDNYQLGTAGRPWPGLGHLGSCWPFSWAPWEGGGLPGLSGAVHHTPSFEDYRIPSPAEAGAFSYTDRDGHLPGGPAAAGGRGTHYPEGEGRGHHGCLLPAGRLWNRALRGQAGGGGAGEAPSVGSGSVLHLSLGLVLLTHLPGPDALTGDTQDQPSSSAPRSCPGLESLASESPSLPPSHILLDELQCLPDSLYLPCRVWWCAPAVPAIREDEAGESLEPRRWRLQ

SEQ ID NO: 374 - protein, 505 aa, Artificial Sequence
  Synthetic polypeptide
MYRDPEAASPGAPSRDVLLVSAIITVSLSVTVVLCGLCHWCQRKLGKRYKNSLETVGTPDSGRGRSEKKAINDLDRDFWNNNESTVQQKWSSYPPKEFILNISPYAPYGDPRLSLNGTLLSGAKVAAAAGLAVEREGRLGEKPAPVPPPGEDALRSGGAAPSEPGSGGKAGRGRWRTVQSHLAAGKLNLSNFEDSTLSTATTLESIPSSTGEPKCQRPRTLMRQQSLQQPLSQHQRGRQPSQPTTSQSLGQLQAHMASAPGPNPRAYGRGQARQGTSAGSKYRAAGGRSRSNPGSWDHVVGQIRNRGLDMKSFLEGRMVVLSLVLGLSEQDDFANIPDLQNPGTQQNQNAQGDKRLPAGGKAVNTAPVPGQTPHDESDRRTEPRSSVSDLVNSLTSEMLMLSPGSEEDEAHEGCSRENLGRIQFSVGYNFQESTLTVKIMKAQELPAKDFSGTSDPFVKIYLLPDKKHKLETKVKRKNLNPHWNETFLFEAGSLGKYFKPSEPHL

SEQ ID NO: 375 - protein, 499 aa, Artificial Sequence
  Synthetic polypeptide
MALTPPLLLLSAGTMTLGSPRKGLLMLLMALVTQGDPVKPSRGPLVTCTCESPHCKGPTCRGAWCTVVLVREEGRHPQEHRGCGNLHRELCRGRPTEFVNHYCCDSHLCNHNVSLVLEATQPPSEQPGTDGQLALILGPVLALLALVALGVLGLWHVRRRQEKQRGLHSELGESSLILKASEQGDSMLGDLLDSDCTTGSGSGLPFLVQRTVARQVALVECVGKGRYGEVWRGLWHGESVAVKIFSSRDEQSWFRETEIYNTVLLRHDNILGFIASDMTSRNSSTQLWLITHYHEHGSLYDFLQRQTLEPHLALRLAVSAACGLAHLHVEIFGTQGKPAIAHRDFKSRNVLVKSNLQCCIADLGLAVMHSQGSDYLDIGNNPRVGTKRYMAPEVLDEQIRTDCFESYKWTDIWAFGLVLWEIARRTIVNGIVEDYRPPFYDVVPNDPSFEDMKKVVCVDQQTPTIPNRLAADPLTQHEDKDEDFMIIHFHLMDSKYISS

SEQ ID NO: 376 - protein, 496 aa, Artificial Sequence
  Synthetic polypeptide
MFRQFYLWTCLASGIILGSLFEICLGQYDDDCKLARGGPPATIVAIDEESRNGTILVDNMLIKGTAGGPDPTIELSLKDNVDYWVLMDPVKQMLFLNSTGRVLDRDPPMNIHSIVVQVQCINKKVGTIIYHEVRIVVRDRNDNSPTFKHESYYATVNELTPVGTTIFTGFSGDNGATDIDDGPNGQIEYVIQYNPDDPDRAQNLNERRTTTTTLTVDVLDGDDLGPMFLPCVLVPNTRDCRPLTYQAAIPELRTPEELNPIIVTPPIQAIDQDRNIQPPSDRPGILYSILVGTPEDYPRFFHMHPRTAELSLLEPVNRDFHQKFDLVIKAEQDNGHPLPAFAGLHIEILDENNQSPYFTMPSYQGYILESAPVGATISDSLNLTSPLRIVALDKDIEDTKDPELHLFLNDYTSVFTVTQTGITRYLTLLQPVDREEQQTYTFSITAFDGVQESEPVIVNIQVMDANDNTPTFPEISYDVYVYTDMRPGDSVIQVLI

SEQ ID NO: 377 - protein, 493 aa, Artificial Sequence
  Synthetic polypeptide
MGGKGGGDTRGPVLFPCQLAQALSPRRAFPRELKEKGQRMSSQPAGNQTSPGATEDYSYGSWYIDEPQGGEELQPEGEVPSCHTSIPPGLYHACLASLSILVLLLLAMLVRRRQLWPDCVRGRPGLPSPVDFLAGDRPRAVPAAVFMVLLSSLCLLLPDEDALPFLTLASAPSQDGKTEAPRGAWKILGLFYYAALYYPLAACATAGHTAAHLLGSTLSWAHLGVQVWQRAECPQVPKIYKYYSLLASLPLLLGLGFLSLWYPVQLVRSFSRRTGAGSKGLQSSYSEEYLRNLLCRKKLGSSYHTSKHGFLSWARVCLRHCIYTPQPGFHLPLKLVLSATLTGTAIYQVALLLLVGVVPTIQKVRAGVTTDVSYLLAGFGIVLSEDKQEVVELVKHHLWALEVCYISALVLSCLLTFLVLMRSLVTHRTNLRALHRGAALDLSPLHRSPHPSRQAIFCWMSFSAYQTAFICLVPAIREDEAGESLEPRRWRLQ

SEQ ID NO: 378 - protein, 492 aa, Artificial Sequence
  Synthetic polypeptide
MIGYLGYCKGVEPKTECERLAGTESPVREEPGEDFPAARRLYWDDLKRKLSEKLDSTDFTGTIKLLNENSYVPREAGSQKDENLALYVENQFREFKLSKVWRDQHFVKIQVKDSAQNSVIIVDKNGRLVYLVENPGGYVAYSKAATVTGKLVHANFGTKKDFEDLYTPVNGSIVIVRAGKITFAEKVANAESLNAIGVLIYMDQTKFPIVNAELSFFGHAHLGTGDPYTPGFPSFNHTQFPPSRSSGLPNIPVQTISRAAAEKLFGNMEGDCPSDWKTDSTCRMVTSESKNVKLTVSNVLKEIKILNIFGVIKGFVEPDHYVVVGAQRDAWGPGAAKSGVGTALLLKLAQMFSDMVLKDGFQPSRSIIFASWSAGDFGSVGATEWLEGYLSSLHLKAFTYINLDKAVLGTSNFKVSASPLLYTLIEKTMQNVKHPVTGQFLYQDSNWASKVEKLTLDNAAFPFLAYSGIPAVSFCFCEARGSHDCITALQPG

SEQ ID NO: 379 - protein, 492 aa, Artificial Sequence
  Synthetic polypeptide
MEGNKLEEQDSSPPQSTPGLMKGNKREEQGLGPEPAAPQQPTAEEEALIEFHRSYRELFEFFCNNTTIHGAIRLVCSQHNRMKTAFWAVLWLCTFGMMYWQFGLLFGEYFSYPVSLNINLNSDKLVFPAVTICTLNPYRYPEIKEELEELDRITEQTLFDLYKYSSFTTLVAGSRSRRDLRGTLPHPLQRLRVPPPPHGARRARSVASSLRDNNPQVDWKDWKIGFQLCNQNKSDCFYQTYSSGVDAVREWYRFHYINILSRLPETLPSLEEDTLGNFIFACRFNQVSCNQANYSHFHHPMYGNCYTFNDKNNSNLWMSSMPGINNGLSLMLRAEQNDFIPLLSTVTGARVMVHGQDEPAFMDDGGFNLRPGVETSISMRKETLDRLGGDYGDCTKNGSDVPVENLYPSKYTQQVCIHSCFQESMIKECGCAYIFYPRPQNVEYCDYRKHSSWGRARWLTPVIPALWEATAGGSRGQEMETILANTVKPRLY

SEQ ID NO: 380 - protein, 492 aa, Artificial Sequence; identical to SEQ ID NO: 379
  Synthetic polypeptide

SEQ ID NO: 381 - protein, 492 aa, Artificial Sequence; identical to SEQ ID NO: 379
  Synthetic polypeptide

SEQ ID NO: 382 - protein, 492 aa, Artificial Sequence
  Synthetic polypeptide
MIGYLGYCKGVEPKTECERLAGTESPVREEPGEDFPAARRLYWDDLKRKLSEKLDSTDFTGTIKLLNENSYVPREAGSQKDENLALYVENQFREFKLSKVWRDQHFVKIQVKDSAQNSVIIVDKNGRLVYLVENPGGYVAYSKAATVTGKLVHANFGTKKDFEDLYTPVNGSIVIVRAGKITFAEKVANAESLNAIGVLIYMDQTKFPIVNAELSFFGHAHLGTGDPYTPGFPSFNHTQFPPSRSSGLPNIPVQTISRAAAEKLFGNMEGDCPSDWKTDSTCRMVTSESKNVKLTVSNVLKEIKILNIFGVIKGFVEPDHYVVVGAQRDAWGPGAAKSGVGTALLLKLAQMFSDMVLKDGFQPSRSIIFASWSAGDFGSVGATEWLEGYLSSLHLKAFTYINLDKAVLGTSNFKVSASPLLYTLIEKTMQNVKHPVTGQFLYQDSNWASKVEKLTLDNAAFPFLAYSGIPAVSFCFCEAAGSHDCITALQPG

SEQ ID NO: 383 - protein, 491 aa, Artificial Sequence
  Synthetic polypeptide
MQIRLLRAELVVPLWQFIRQWPPGSDGWGQMEEKGQRMSSQPAGNQTSPGATEDYSYGSWYIDEPQGGEELQPEGEVPSCHTSIPPGLYHACLASLSILVLLLLAMLVRRRQLWPDCVRGRPGLPSPVDFLAGDRPRAVPAAVFMVLLSSLCLLLPDEDALPFLTLASAPSQDGKTEAPRGAWKILGLFYYAALYYPLAACATAGHTAAHLLGSTLSWAHLGVQVWQRAECPQVPKIYKYYSLLASLPLLLGLGFLSLWYPVQLVRSFSRRTGAGSKGLQSSYSEEYLRNLLCRKKLGSSYHTSKHGFLSWARVCLRHCIYTPQPGFHLPLKLVLSATLTGTAIYQVALLLLVGVVPTIQKVRAGVTTDVSYLLAGFGIVLSEDKQEVVELVKHHLWALEVCYISALVLSCLLTFLVLMRSLVTHRTNLRALHRGAALDLSPLHRSPHPSRQAIFCWMSFSAYQTAFICLVPAIREDEAGESLEPRRWRLQ

SEQ ID NO: 384 - protein, 491 aa, Artificial Sequence
  Synthetic polypeptide
MQGEESLRILVEPEGDSFPLMEISTCETEASEQWDYVLVAQRHTQRDPRQARQQQFLEELRRKGFHIKVIRDQKQVFFGIRADNSVFGLYRTFLLEPEGPAPHAELAAPTTIPVTTSLRIRIVNFVVMNNKTSAGETFEDLMKDGVFEARFPLHKGEGRLKKTWARWRHMFREQPVDEIRNYFGEKVALYFVWLGWYTYMLVPAALTGLLVFLSGFSLFEASQISKEICEAHDILMCPLGDHSRRYQRLSETCTFAKLTHLFDNDGTVVFAIFMALWATVFLEIWKRQRARVVLHWDLYVWDEEQEEMALQLINCPDYKLRPYQHSYLRSTVILVLTLLMICLMIGMAHVLVVYRVLASALFSSSAVPFLEEQVTTAVVVTGALVHYVTIIIMTKINRCVALKLCDFEMPRTFSERESRFTIRFFTLQFFTHFSSLIYIAFILGRCSGLCLKSQHFGRLRQADHLRSGVQDQTGQHEETPSLLARRGGVSL

SEQ ID NO: 385 - protein, 490 aa, Artificial Sequence
  Synthetic polypeptide
MLLPLLLSSLLGGSQAMDGRFWIRVQESVMVPEGLCISVPCSFSYPRQDWTGSTPAYGYWFKAVTETTKGAPVATNHQSREVEMSTRGRFQLTGDPAKGNCSLVIRDAQMQDESQYFFRVERGSYVRYNFMNDGFFLKVTGTKPTTSHFSVLSFTPRPQDHNTDLTCHVDFSRKGVSAQRTVRLRVAYAPRDLVISISRDNTPALEPQPQGNVPYLEAQKGQFLRLLCAADSQPPATLSWVLQNRVLSSSHPWGPRPLGLELPGVKAGDSGRYTCRAENRLGSQQRALDLSVQYPPENLRVMVSQANRTVLENLGNGTSLPVLEGQSLCLVCVTHSSPPARLSWTQRGQVLSPSQPSDPGVLELPRVQVEHEGEFTCHARHPLGSQHVSLSLSVHYKKGLISTAFSNGAFLGIGITALLFLCLALIIMKILPKRRTQTETPRPRFSRHSTILDYINVVPTAGPLAQKRNQKATPNSPRTPLPPGHSGSRL

SEQ ID NO: 386 - protein, 489 aa, Artificial Sequence
  Synthetic polypeptide
MIGYLGYCKGVEPKTECERLAGTESPVREEPGEDFPAARRLYWDDLKRKLSEKLDSTDFTGTIKLLNENSYVPREAGSQKDENLALYVENQFREFKLSKVWRDQHFVKIQVKDSAQNSVIIVDKNGRLVYLVENPGGYVAYSKAATVTGKLVHANFGTKKDFEDLYTPVNGSIVIVRAGKITFAEKVANAESLNAIGVLIYMDQTKFPIVNAELSFFGHAHLGTGDPYTPGFPSFNHTQFPPSRSSGLPNIPVQTISRAAAEKLFGNMEGDCPSDWKTDSTCRMVTSESKNVKLTVSNVLKEIKILNIFGVIKGFVEPDHYVVVGAQRDAWGPGAAKSGVGTALLLKLAQMFSDMVLKDGFQPSRSIIFASWSAGDFGSVGATEWLEGYLSSLHLKAFTYINLDKAVLGTSNFKVSASPLLYTLIEKTMQNVKHPVTGQFLYQDSNWASKVEKLTLDNAAFPFLAYSGIPAVSFCFCEAAGSHDCIAAL

SEQ ID NO: 387 - protein, 488 aa, Artificial Sequence
  Synthetic polypeptide
MDSQGDWAAQEKGQRMSSQPAGNQTSPGATEDYSYGSWYIDEPQGGEELQPEGEVPSCHTSIPPGLYHACLASLSILVLLLLAMLVRRRQLWPDCVRGRPGLPSPVDFLAGDRPRAVPAAVFMVLLSSLCLLLPDEDALPFLTLASAPSQDGKTEAPRGAWKILGLFYYAALYYPLAACATAGHTAAHLLGSTLSWAHLGVQVWQRAECPQVPKIYKYYSLLASLPLLLGLGFLSLWYPVQLVRSFSRRTGAGSKGLQSSYSEEYLRNLLCRKKLGSSYHTSKHGFLSWARVCLRHCIYTPQPGFHLPLKLVLSATLTGTAIYQVALLLLVGVVPTIQKVRAGVTTDVSYLLAGFGIVLSEDKQEVVELVKHHLWALEVCYISALVLSCLLTFLVLMRSLVTHRTNLRALHRGAALDLSPLHRSPHPSRQAIFCWMSFSAYQTAFICLAGYGGVHLQFQLFGRMRQENRLNPGGGGCSEPRLHHCAPA

SEQ ID NO: 388 - protein, 487 aa, Artificial Sequence
  Synthetic polypeptide
MECLYYFLGFLLLAARLPLDAAKRFHDVLGNERPSAYMREHNQLNGWSSDENDWNEKLYPVWKRGDMRWKNSWKGGRVQAVLTSDSPALVGSNITFAVNLIFPRCQKEDANGNIVYEKNCRNGQYFQKLGRCSVRVSVNTANVTLGPQLMEVTVYRRHGRAYVPIAQVKDVYVVTDQIPVFVTMFQKNDRNSSDETFLKDLPIMFDVLIHDPSHFLNYSTINYKWSFGDNTGLFVSTNHTVNHTYVLNGTFSLNLTVKAAAPGPCPPPPPPPRPSKPTPSLATTLKSYDSNTPGPAGDNPLELSRIPDENCQINRYGHFQATITIVEGILEVNIIQMTDVLMPVPWPESSLIDFVVTCQGSIPTEVCTIISDPTCEITQNTVCSPVDVDEMCLLTVRRTFNGSGTYCVNLTLGDDTSLALTSTLISVPDRDPASPLRMANSALISVGCLAIFVTVISLLVYKLPKMKKYLTKSSVERKCNFAVGILN

SEQ ID NO: 389 - protein, 487 aa, Artificial Sequence
  Synthetic polypeptide
MATAERRALGIGFQWLSLATLVLICAGQGGRREDGGPACYGGFDLYFILDKSGSVLHHWNEIYYFVEQLAHKFISPQLRMSFIVFSTRGTTLMKLTEDREQIRQGLEELQKVLPGGDTYMHEGFERASEQIYYENRQGYRTASVIIALTDGELHEDLFFYSEREANRSRDLGAIVYCVGVKDFNETQLARIADSKDHVFPVNDGFQALQGIIHSILKKSCIEILAAEPSTICAGESFQVVVRGNGFRHARNVDRVLCSFKINDSVTLNEKPFSVEDTYLLCPAPILKEVGMKAALQVSMNDGLSFISSSVIITTTHCSDGSILAIALLILFLLLALALLWWFWPLCCTVIIKEVPPPPAEESEEEDDDGLPKKKWPTVDASYYGGRGVGGIKRMEVRWGEKGSTEEGAKLEKAKNARVKMPEQEYEFPEPRNLNNNMRRPSSPRKWYSPIKGKLDALWVLLRKGYDRVSVMRPQPGDTGLSQIHYPR

SEQ ID NO: 390 - protein, 485 aa, Artificial Sequence
  Synthetic polypeptide
MTLGSPRKGLLMLLMALVTQGDPVKPSRGPLVTCTCESPHCKGPTCRGAWCTVVLVREEGRHPQEHRGCGNLHRELCRGRPTEFVNHYCCDSHLCNHNVSLVLEATQPPSEQPGTDGQLALILGPVLALLALVALGVLGLWHVRRRQEKQRGLHSELGESSLILKASEQGDSMLGDLLDSDCTTGSGSGLPFLVQRTVARQVALVECVGKGRYGEVWRGLWHGESVAVKIFSSRDEQSWFRETEIYNTVLLRHDNILGFIASDMTSRNSSTQLWLITHYHEHGSLYDFLQRQTLEPHLALRLAVSAACGLAHLHVEIFGTQGKPAIAHRDFKSRNVLVKSNLQCCIADLGLAVMHSQGSDYLDIGNNPRVGTKRYMAPEVLDEQIRTDCFESYKWTDIWAFGLVLWEIARRTIVNGIVEDYRPPFYDVVPNDPSFEDMKKVVCVDQQTPTIPNRLAADPLTQHEDKDEDFMIIHFHLMDSKYISS

SEQ ID NO: 391 - protein, 485 aa, Artificial Sequence
  Synthetic polypeptide
MAESRGRLYLWMCLAAALASFLMGFMVGWFIKPLKETTTSVRYHQSIRWKLVSEMKAENIKSFLRSFTKLPHLAGTEQNFLLAKKIQTQWKKFGLDSAKLVHYDVLLSYPNETNANYISIVDEHETEIFKTSYLEPPPDGYENVTNIVPPYNAFSAQGMPEGDLVYVNYARTEDFFKLEREMGINCTGKIVIARYGKIFRGNKVKNAMLAGAIGIILYSDPADYFAPEVQPYPKGWNLPGTAAQRGNVLNLNGAGDPLTPGYPAKEYTFRLDVEEGVGIPRIPVHPIGYNDAEILLRYLGGIAPPDKSWKGALNVSYSIGPGFTGSDSFRKVRMHVYNINKITRIYNVVGTIRGSVEPDRYVILGGHRDSWVFGAIDPTSGVAVLQEIARSFGKLMSKGWRPRRTIIFASWDAEEFGLLGSTEWAEVCNFTREASETTNPPGGRNNSRWAALRVTLTVKVCSFTSEPARPQTHQKEETLNTSEHQ

SEQ ID NO: 392 - protein, 485 aa, Artificial Sequence
  Synthetic polypeptide
MENGTQILRPTQDPSECTKEVKSLMWVYVLVGNIVRGMGETPILPLGISYIEDFAKFENSPLYIGLVETGAIIGPLIGLLLASFCANVYVDTGFVNTDDLIITPTDTRWVGAWWFGFLICAGVNVLTAIPFFFLPNTLPKEGLETNADIIKNENEDKQKEEVKKEKYGITKDFLPFMKSLSCNPIYMLFILVSVIQFNAFVNMISFMPKYLEQQYGISSSDAIFLMGIYNLPPICIGYIIGGLIMKKFKITVKQAAHIGCWLSLLEYLLYFLSFLMTCENSSVVGINTSYEGIPQDLYVENDIFADCNVDCNCPSKIWDPVCGNNGLSYLSACLAGCETSIGTGINMVFQNCSCIQTSGNSSAVLGLCDKGPDCSLMLQYFLILSAMSSFIYSLAAIPGYMVLLRCMKSEEKSLGVGLHTFCTRVFAGIPAPIYFGALMDSTCLHWGTLKCGESGACRIYDSTTFSRDTESIFSGLYFQGCWNSK

SEQ ID NO: 393 - protein, 485 aa, Artificial Sequence; identical to SEQ ID NO: 392
  Synthetic polypeptide

SEQ ID NO: 394 - protein, 484 aa, Artificial Sequence
  Synthetic polypeptide
MGCSAKARWAAGALGVAGLLCAVLGAVMIVMVPSLIKQQVLKNVRIDPSSLSFNMWKEIPIPFYLSVYFFDVMNPSEILKGEKPQVRERGPYVYREFRHKSNITFNNNDTVSFLEYRTFQFQPSKSHGSESDYIVMPNILVLGAAVMMENKPMTLKLIMTLAFTTLGERAFMNRTVGEIMWGYKDPLVNLINKYFPGMFPFKDKFGLFAELNNSDSGLFTVFTGVQNISRIHLVDKWNGLSKVDFWHSDQCNMINGTSGQMWPPFMTPESSLEFYSPEACRSMKLMYKESGVFEGIPTYRFVAPKTLFANGSIYPPNEGFCPCLESGIQNVSTCRFSAPLFLSHPHFLNADPVLAEAVTGLHPNQEAHSLFLDIHPVTGIPMNCSVKLQLSLYMKSVAGIGQTGKIEPVVLPLLWFAESGAMEGETLHTFYTQLVLMPKVMHYAQYVLLALGCVLLLVPVICQIRSQARHGVSRLESQRFGRLR

SEQ ID NO: 395 - protein, 484 aa, Artificial Sequence; identical to SEQ ID NO: 394
  Synthetic polypeptide

SEQ ID NO: 396 - protein, 484 aa, Artificial Sequence; identical to SEQ ID NO: 394
  Synthetic polypeptide

SEQ ID NO: 397 - protein, 483 aa, Artificial Sequence
  Synthetic polypeptide
MSSQPAGNQTSPGATEDYSYGSWYIDEPQGGEELQPEGEVPSCHTSIPPGLYHACLASLSILVLLLLAMLVRRRQLWPDCVRGRPGLPSPVDFLAGDRPRAVPAAVFMVLLSSLCLLLPDEDALPFLTLASAPSQDGKTEAPRGAWKILGLFYYAALYYPLAACATAGHTAAHLLGSTLSWAHLGVQVWQRAECPQVPKIYKYYSLLASLPLLLGLGFLSLWYPVQLVRSFSRRTGAGSKGLQSSYSEEYLRNLLCRKKLGSRMAAVEDWLLLPRILVIKRDNYQLGTAGRPWPGLGHLGSCWPFSWAPWEGGGLPGLSGAVHHTPSFEDYRIPSPAEAGAFSYTDRDGHLPGGPAAAGGRGTHYPEGEGRGHHGCLLPAGRLWNRALRGQAGGGGAGEAPSVGSGSVLHLSLGLVLLTHLPGPDALTGDTQDQPSSSAPRSCPGLESLASESPSLPPSHILLDELQCLPDSLYLPCSSYSGG

SEQ ID NO: 398 - protein, 482 aa, Artificial Sequence
  Synthetic polypeptide
MEAPEEPAPVRGGPEATLEVRGSRCLRLSAFREELRALLVLAGPAFLVQLMVFLISFISSVFCGHLGKLELDAVTLAIAVINVTGVSVGFGLSSACDTLISQTYGSQNLKHVGVILQRSALVLLLCCFPCWALFLNTQHILLLFRQDPDVSRLTQTYVTIFIPALPATFLYMLQVKYLLNQGIVLPQIVTGVAANLVNALANYLFLHQLHLGVIGSALANLISQYTLALLLFLYILGKKLHQATWGGWSLECLQDWASFLRLAIPSMLMLCMEWWAYEVGSFLSGILGMVELGAQSIVYELAIIVYMVPAGFSVAASVRVGNALGAGDMEQARKSSTVSLLITVLFAVAFSVLLLSCKDHVGYIFTTDRDIINLVAQVVPIYAVSHLFEALACTSGGVLRGSGNQKVGAIVNTIGYYVVGLPIGIALMFATTLGVMGLWSGIIICTVFQAVCFLGFIIQLNWKKACQQLVKLRAVSWDQLCP

SEQ ID NO: 399 - protein, 482 aa, Artificial Sequence; identical to SEQ ID NO: 398
  Synthetic polypeptide

SEQ ID NO: 400 - protein, 482 aa, Artificial Sequence; identical to SEQ ID NO: 398
  Synthetic polypeptide

SEQ ID NO: 401 - protein, 481 aa, Artificial Sequence
  Synthetic polypeptide
MLQDPDSDQPLNSLDVKPLRKPRIPMETFRKVGIPIIIALLSLASIIIVVVLIKVILDKYYFLCGQPLHFIPRKQLCDGELDCPLGEDEEHCVKSFPEGPAVAVRLSKDRSTLQVLDSATGNWFSACFDNFTEALAETACRQMGYSSKPTFRAVEIGPDQDLDVVEITENSQELRMRNSSGPCLSGSLVSLHCLACGKSLKTPRVVGVEEASVDSWPWQVSIQYDKQHVCGGSILDPHWVLTAAHCFRKHTDVFNWKVRAGSDKLGSFPSLAVAKIIIIEFNPMYPKDNDIALMKLQFPLTFSGTVRPICLPFFDEELTPATPLWIIGWGFTKQNGGKMSDILLQASVQVIDSTRCNADDAYQGEVTEKMMCAGIPEGGVDTCQGDSGGPLMYQSDQWHVVGIVSWGYGCGGPSTPGVYTKDRTIQRSCNSPGTGLVIQQPAVPLMELRSARHTHRLTTCVCFLSFPALQPLSPLCPFPWD

SEQ ID NO: 402 - protein, 481 aa, Artificial Sequence
  Synthetic polypeptide
MARAAALLPSRSPPTPLLWPLLLLLLLETGAQDVRVQVLPEVRGQLGGTVELPCHLLPPVPGLYISLVTWQRPDAPANHQNVAAFHPKMGPSFPSPKPGSERLSFVSAKQSTGQDTEAELQDATLALHGLTVEDEGNYTCEFATFPKGSVRGMTWLRVIAKPKNQAEAQKVTFSQDPTTVALCISKEGRPPARISWLSSLDWEAKETQVSGTLAGTVTVTSRFTLVPSGRADGVTVTCKVEHESFEEPALIPVTLSVRYPPEVSISGYDDNWYLGRTDATLSCDVRSNPEPTGYDWSTTSGTFPTSAVAQGSQLVIHAVDSLFNTTFVCTVTNAVGMGRAEQVIFVRETPNTAGAGATGGIIGGIIAAIIATAVAATGILICRQQRKEQTLQGAEEDEDLEGPPSYKPPTPKAKLEAQEMPSQLFTLGASEHSPLKTPYFDAGASCTEQAWWLTPVIPALWEAETGRSPDVRSSRPPWLTR

SEQ ID NO: 403 - protein, 481 aa, Artificial Sequence
  Synthetic polypeptide
MGALARALLLPLLAQWLLRAAPELAPAPFTLPLRVAAATNRVVAPTPGPGTPAERHADGLALALEPALASPAGAANFLAMVDNLQGDSGRGYYLEMLIGTPPQKLQILVDTGSSNFAVAGTPHSYIDTYFDTERSSTYRSKGFDVTVKYTQGSWTGFVGEDLVTIPKGFNTSFLVNIATIFESENFFLPGIKWNGILGLAYATLAKPSSSLETFFDSLVTQANIPNVFSMQMCGAGLPVAGSGTNGGSLVLGGIEPSLYKGDIWYTPIKEEWYYQIEILKLEIGGQSLNLDCREYNADKAIVDSGTTLLRLPQKVFDAVVEAVARASLIPEFSDGFWTGSQLACWTNSETPWSYFPKISIYLRDENSSRSFRITILPQLYIQPMMGAGLNYECYRFGISPSTNALVIGATVMEGFYVIFDRAQKRVGFAASPCAETTVKPPVPSCPILRPPDYPCALLRGPQWQLCLLFLGIYEYKELLSL

SEQ ID NO: 404 - protein, 480 aa, Artificial Sequence
  Synthetic polypeptide
MLLPLLLSSLLGGSQAMDGRFWIRVQESVMVPEGLCISVPCSFSYPRQDWTGSTPAYGYWFKAVTETTKGAPVATNHQSREVEMSTRGRFQLTGDPAKGNCSLVIRDAQMQDESQYFFRVERGSYVRYNFMNDGFFLKVTVLSFTPRPQDHNTDLTCHVDFSRKGVSAQRTVRLRVAYAPRDLVISISRDNTPALEPQPQGNVPYLEAQKGQFLRLLCAADSQPPATLSWVLQNRVLSSSHPWGPRPLGLELPGVKAGDSGRYTCRAENRLGSQQRALDLSVQYPPENLRVMVSQANRTVLENLGNGTSLPVLEGQSLCLVCVTHSSPPARLSWTQRGQVLSPSQPSDPGVLELPRVQVEHEGEFTCHARHPLGSQHVSLSLSVHYKKGLISTAFSNGAFLGIGITALLFLCLALIIMKILPKRRTQTETPRPRFSRHSTILDYINVVPTAGPLAQKRNQKATPNSPRTPLPPGHSGSRL

SEQ ID NO: 405 - protein, 479 aa, Artificial Sequence
  Synthetic polypeptide
MDPDSDQPLNSLDVKPLRKPRIPMETFRKVGIPIIIALLSLASIIIVVVLIKVILDKYYFLCGQPLHFIPRKQLCDGELDCPLGEDEEHCVKSFPEGPAVAVRLSKDRSTLQVLDSATGNWFSACFDNFTEALAETACRQMGYSSKPTFRAVEIGPDQDLDVVEITENSQELRMRNSSGPCLSGSLVSLHCLACGKSLKTPRVVGVEEASVDSWPWQVSIQYDKQHVCGGSILDPHWVLTAAHCFRKHTDVFNWKVRAGSDKLGSFPSLAVAKIIIIEFNPMYPKDNDIALMKLQFPLTFSGTVRPICLPFFDEELTPATPLWIIGWGFTKQNGGKMSDILLQASVQVIDSTRCNADDAYQGEVTEKMMCAGIPEGGVDTCQGDSGGPLMYQSDQWHVVGIVSWGYGCGGPSTPGVYTKDRTIQRSCNSPGTGLVIQQPAVPLMELRSARHTHRLTTCVCFLSFPALQPLSPLCPFPWD

SEQ ID NO: 406 - protein, 476 aa, Artificial Sequence
  Synthetic polypeptide
MLQDPDSDQPLNSLDVKPLRKPRIPMETFRKVGIPIIIALLSLASIIIVVVLIKVILDKYYFLCGQPLHFIPRKQLCDGELDCPLGEDEEHCVKSFPEGPAVAVRLSKDRSTLQVLDSATGNWFSACFDNFTEALAETACRQMGYSRAVEIGPDQDLDVVEITENSQELRMRNSSGPCLSGSLVSLHCLACGKSLKTPRVVGVEEASVDSWPWQVSIQYDKQHVCGGSILDPHWVLTAAHCFRKHTDVFNWKVRAGSDKLGSFPSLAVAKIIIIEFNPMYPKDNDIALMKLQFPLTFSGTVRPICLPFFDEELTPATPLWIIGWGFTKQNGGKMSDILLQASVQVIDSTRCNADDAYQGEVTEKMMCAGIPEGGVDTCQGDSGGPLMYQSDQWHVVGIVSWGYGCGGPSTPGVYTKDRTIQRSCNSPGTGLVIQQPAVPLMELRSARHTHRLTTCVCFLSFPALQPLSPLCPFPWD

SEQ ID NO: 407 - protein, 476 aa, Artificial Sequence
  Synthetic polypeptide
MRRERTRGPQAWEFPSPTKSGCSLQSLSRDLRELREGEKPEDQAETEESWQGLARKTPGKACAPEGGSCQPGKTENTITMTTSHQPQDRYKAVWLIFFMLGLGTLLPWNFFMTATQYFTNRLDMSQNVSLVTAELSKDAQASAAPAAPLPERNSLSAIFNNVMTLCAMLPLLLFTYLNSFLHQRIPQSVRILGSLVAILLVFLITAILVKVQLDALPFFVITMIKIVLINSFGAILQGSLFGLAGLLPASYTAPIMSGQGLAGFFASVAMICAIASGSELSESAFGYFITACAVIILTIICYLGLPRLEFYRYYQQLKLEGPGEQETKLDLISKGEEPRAGKEESGVSVSNSQPTNESHSIKAILKNISVLAFSVCFIFTITIGMFPAVTVEVKSSIAGSSTWERYFIPVSCFLTFNIFDWLGRSLTAVFMWVLAGALKQEIRDTRIRRGETKLSLFSDDMVVPIKHQNFYSQIKN

SEQ ID NO: 408 - protein, 474 aa, Artificial Sequence
  Synthetic polypeptide
MQGEESLRILVEPEGDSFPLMEISTCETEASEQWDYVLVAQRHTQRDPRQARQQQFLEELRRKGFHIKVIRDQKQVFFGIRADNSVFGLYRTFLLEPEGPAPHAELAAPTTIPVTTSLRIRIVNFVVMNNKTSAGETFEDLMKDGVFEARFPLHKGEGRLKKTWARWRHMFREQPVDEIRNYFGEKVALYFVWLGWYTYMLVPAALTGLLVFLSGFSLFEASQISKEICEAHDILMCPLGDHSRRYQRLSETCTFAKLTHLFDNDGTVVFAIFMALWATVFLEIWKRQRARVVLHWDLYVWDEEQEEMALQLINCPDYKLRPYQHSYLRSTVILVLTLLMICLMIGMAHVLVVYRVLASALFSSSAVPFLEEQVTTAVVVTGALVHYVTIIIMTKINRCVALKLCDFEMPRTFSERESRFTIRFFTLQFFTHFSSLIYIAFILGSQAWWCEPVVPATREAEAQESLEPRRQRLQ

SEQ ID NO: 409 - protein, 473 aa, Artificial Sequence
  Synthetic polypeptide
MSSQPAGNQTSPGATEDYSYGSWYIDEPQGGEELQPEGEVPSCHTSIPPGLYHACLASLSILVLLLLAMLVRRRQLWPDCVRGRPGLPSPVDFLAGDRPRAVPAAVFMVLLSSLCLLLPDEDALPFLTLASAPSQDGKTEAPRGAWKILGLFYYAALYYPLAACATAGHTAAHLLGSTLSWAHLGVQVWQRAECPQVPKIYKYYSLLASLPLLLGLGFLSLWYPVQLVRSFSRRTGAGSKGLQSSYSEEYLRNLLCRKKLGSSYHTSKHGFLSWARVCLRHCIYTPQPGFHLPLKLVLSATLTGTAIYQVALLLLVGVVPTIQKVRAGVTTDVSYLLAGFGIVLSEDKQEVVELVKHHLWALEVCYISALVLSCLLTFLVLMRSLVTHRTNLRALHRGAALDLSPLHRSPHPSRQAIFCWMSFSAYQTAFICLAGYGGVHLQFQLFGRMRQENRLNPGGGGCSEPRLHHCAPA

SEQ ID NO: 410 - protein, 473 aa, Artificial Sequence; identical to SEQ ID NO: 409
  Synthetic polypeptide

SEQ ID NO: 411 - protein, 473 aa, Artificial Sequence; identical to SEQ ID NO: 409
  Synthetic polypeptide

SEQ ID NO: 412 - protein, 471 aa, Artificial Sequence
  Synthetic polypeptide
MENDPSRRRESISLTPVAKGLENMGADFLESLEEGQLPRSDLSPAEIRSSWSEAAPKPFSRWRNLQPALRARSFCREHMQLFRWIGTGLLCTGLSAFLLVACLLDFQRALALFVLTCVVLTFLGHRLLKRLLGPKLRRFLKPQGHPRLLLWFKRGLALAAFLGLVLWLSLDTSQRPEQLVSFAGICVFVALLFACSKHHCAVSWRAVSWGLGLQFVLGLLVIRTEPGFIAFEWLGEQIRIFLSYTKAGSSFVFGEALVKDVFAFQVLPIIVFFSCVISVLYHVGLMQWVILKIAWLMQVTMGTTATETLSVAGNIFVSQTEAPLLIRPYLADMTLSEVHVVMTGGYATIAGSLLGAYISFGVRAEVLTTFALCGFANFSSIGIMLGGLTSMVPQRKSDFSQIVLRALFTGACVSLVNACMAGILYMPRGAEVDCMSLLNTTLSSSSFEIYQCCREAFQSWNADGKVSKLGP

SEQ ID NO: 413 - protein, 469 aa, Artificial Sequence
  Synthetic polypeptide
MDSQGDWAAQEKGQRMSSQPAGNQTSPGATEDYSYGSWYIDEPQGGEELQPEGEVPSCHTSIPPGLYHACLASLSILVLLLLAMLVRRRQLWPDCVRGRPGLPSPVDFLAGDRPRAVPAAVFMVLLSSLCLLLPDEDALPFLTLASAPSQDGKTEAPRGAWKILGLFYYAALYYPLAACATAGHTAAHLLGSTLSWAHLGVQVWQRAECPQVPKIYKYYSLLASLPLLLGLGFLSLWYPVQLVRSFSRRTGAGSKGLQSSYSEEYLRNLLCRKKLGSSYHTSKHGFLSWARVCLRHCIYTPQPGFHLPLKLVLSATLTGTAIYQVALLLLVGVVPTIQKVRAGVTTDVSYLLAGFGIVLSEDKQEVVELVKHHLWALEVCYISALVLSCLLTFLVLMRSLVTHRTNLRALHRGAALDLSPLHRSPHPSRQAIFCWMSFSAYQTAFICLVPAIREDEAGESLEPRRWRLQ

SEQ ID NO: 414 - protein, 467 aa, Artificial Sequence
  Synthetic polypeptide
MDDVLPLMPWETLLAQGSPQGSPDLPAGQRKQQPQGDRAQGLASESWKLLEVPIIHITPSSDGESPACTPTPRRRQQQRMPDPQSLSQDSTTPHSGRSTPSSSPSLRKRLQLLPPSRPPPEPEPGTMVEKGSDSSSEKGGVPGTPSTQSLGSRNFIRNSKKMQSWYSMLSPTYKQRNEDFRKLFSKLPEAERLIVDYSCALQREILLQGRLYLSENWICFYSNIFRWETTISIQLKEVTCLKKEKTAKLIPNAIQICTESEKHFFTSFGARDRCFLLIFRLWQNALLEKTLSPRELWHLVHQCYGSELGLTSEDEDYVSPLQLNGLGTPKEVGDVIALSDITSSGAADRSQEPSPVGSRRGHVTPNLSRASSDADHGAEEDKEEQVDSQPDASSSQTVTPVAEPPSTEPTQPDGPTTLGPLDLLPSEELLTDTSNSSSSTGEEAWQGEHKHRLKAACRGSHPGHTTS

SEQ ID NO: 415 - protein, 466 aa, Artificial Sequence
  Synthetic polypeptide
MHCLKRTPKEVGDVIALSDITSSGAADRSQEPSPVGSRRGHVTPNLSRASSDADHGAEEDKEEQVDSQPDASSSQTVTPVAEPPSTEPTQPDGPTTLGPLDLLPSEELLTDTSNSSSSTGEEADLAALLPDLSGRLLINSVFHVGAERLQQMLFSDSPFLQGFLQQCKFTDVTLSPWSGDSKCHQRRVLTYTIPISNPLGPKSASVVETQTLFRRGPQAGGCVVDSEVLTQGIPYQDYFYTAHRYCILGLARNKARLRVSSEIRYRKQPWSLVKSLIEKNSWSGIEDYFHHLERELAKAEKLSLEEGGKDARGLLSGLRRRKRPLSWRAHGDGPQHPDPDPCARAGIHTSGSLSSRFSEPSVDQGPGAGIPSALVLISIVLIILIALNVLLFYRLWSLERTAHTFESWHSLALAKGKFPQTATEWAEILALQKQFHSVEVHKWRQILRASVELLDEHCRGKHGSMD

SEQ ID NO: 416 - protein, 466 aa, Artificial Sequence
  Synthetic polypeptide
MKDIDIGKEYIIPSPGYRSVRERTSTSGTHRDREDSKFRRTRPLECQDALETAARAEGLSLDASMHSQLRILDEEHPKGKYHHGLSALKPIRTTSKHQHPVDNAGLFSCMTFSWLSSLARVAHKKGELSMEDVWSLSKHESSDVNCRRLERLWQEELNEVGPDAASLRRVVWIFCRTRLILSIVCLMITQLAGFSGPAFMVKHLLEYTQATESNLQYSLLLVLGLLLTEIVRSWSLALTWALNYRTGVRLRGAILTMAFKKILKLKNIKEKSLGELINICSNDGQRMFEAAAVGSLLAGGPVVAILGMIYNVIILGPTGFLGSAVFILFYPAMMFASRLTAYFRRKCVAATDERVQKMNEVLTYIKFIKMYAWVKAFSQSVQKIREEERRILEKAGYFQSITVGVAPIVVVIASVVTFSVHMTLGFDLTAAQVVEVTVSQDHAIALQPGGQSKTPSQNKTNKQTKK

SEQ ID NO: 417 - protein, 466 aa, Artificial Sequence; identical to SEQ ID NO: 416
  Synthetic polypeptide

SEQ ID NO: 418 - protein, 466 aa, Artificial Sequence; identical to SEQ ID NO: 416
  Synthetic polypeptide

SEQ ID NO: 419 - protein, 465 aa, Artificial Sequence
  Synthetic polypeptide
MSSQPAGNQTSPGATEDYSYGSWYIDEPQGGEELQPEGEVPSCHTSIPPGLYHACLASLSILVLLLLAMLVRRRQLWPDCVRGRPGLPSPVDFLAGDRPRAVPAAVFMVLLSSLCLLLPDEDALPFLTLASAPSQGAWKILGLFYYAALYYPLAACATAGHTAAHLLGSTLSWAHLGVQVWQRAECPQVPKIYKYYSLLASLPLLLGLGFLSLWYPVQLVRSFSRRTGAGSKGLQSSYSEEYLRNLLCRKKLGSSYHTSKHGFLSWARVCLRHCIYTPQPGFHLPLKLVLSATLTGTAIYQVALLLLVGVVPTIQKVRAGVTTDVSYLLAGFGIVLSEDKQEVVELVKHHLWALEVCYISALVLSCLLTFLVLMRSLVTHRTNLRALHRGAALDLSPLHRSPHPSRQAIFCWMSFSAYQTAFICLAGYGGVHLQFQLFGRMRQENRLNPGGGGCSEPRLHHCAPA

SEQ ID NO: 420 - protein, 465 aa, Artificial Sequence
  Synthetic polypeptide
MTMYLWLKLLAFGFAFLDTEVFVTGQSPTPSPTDAYLNASETTTLSPSGSAVISTTTIATTPSKPTCDEKYANITVDYLYNKETKLFTAKLNVNENVECGNNTCTNNEVHNLTECKNASVSISHNSCTAPDKTLILDVPPGVEKFQLHDCTQVEKADTTICLKWKNIETFTCDTQNITYRFQCGNMIFDNKEIKLENLEPEHEYKCDSEILYNNHKFTNASKIIKTDFGSPGEPQIIFCRSEAAHQGVITWNPPQRSFHNFTLCYIKETEKDCLNLDKNLIKYDLQNLKPYTKYVLSLHAYIIAKVQRNGSAAMCHFTTKSAPPSQVWNMTVSMTSDNSMHVKCRPPRDRNGPHERYHLEVEAGNTLVRNESHKNCDFRVKDLQYSTDYTFKAYFHNGDYPGEPFILHHSTSYNSKALIAFLAFLIIVTSIALLVVLYKIYDLHKKRSCNLDEQQELVERECNTI

SEQ ID NO: 421 - protein, 464 aa, Artificial Sequence
  Synthetic polypeptide
MSSQPAGNQTSPGATEDYSYGSWYIDEPQGGEELQPEGEVPSCHTSIPPGLYHACLASLSILVLLLLAMLVRRRQLWPDCVRGRPGLPRPRAVPAAVFMVLLSSLCLLLPDEDALPFLTLASAPSQDGKTEAPRGAWKILGLFYYAALYYPLAACATAGHTAAHLLGSTLSWAHLGVQVWQRAECPQVPKIYKYYSLLASLPLLLGLGFLSLWYPVQLVRSFSRRTGAGSKGLQSSYSEEYLRNLLCRKKLGSSYHTSKHGFLSWARVCLRHCIYTPQPGFHLPLKLVLSATLTGTAIYQVALLLLVGVVPTIQKVRAGVTTDVSYLLAGFGIVLSEDKQEVVELVKHHLWALEVCYISALVLSCLLTFLVLMRSLVTHRTNLRALHRGAALDLSPLHRSPHPSRQAIFCWMSFSAYQTAFICLAGYGGVHLQFQLFGRMRQENRLNPGGGGCSEPRLHHCAPA

SEQ ID NO: 422 - protein, 464 aa, Artificial Sequence
  Synthetic polypeptide
MATKTELSPTARESKNAQDMQVDETLIPRKVPSLCSARYGIALVLHFCNFTTIAQNVIMNITMVAMVNSTSPQSQLNDSSEVLPVDSFGGLSKAPKSLPAKAPVYDWSPQIQGIIFGAVGYGGILTMAPSGYLAGRVGTKRVVGISLFATSFLTLCIPLATDFGIVLLIVTRIVQGLSQSSILGGQFAIWEKWGPPQERSRLCSIALSGMLLGCFTAILIGGFISETLGWPFVFYIFGGVGCVCCLLWFVVIYDDPVSYPWISTSEKEYIISSLKQQVGSSKQPLPIKAMLRSLPIWSICLGCFSHQWLVSTMVVYIPTYISSVYHVNIRDNGLLSALPFIVAWVIGMVGGYLADFLLTKKFRLITVRKIATILGSLPSSALIVSLPYLNSGYITATALLTLSCGLSTLCQSGIYINVLDIAPRYSSFLMGASRGFSSIAPVIVPTVSGFLLSQENGWCWRPLS

SEQ ID NO: 423 - protein, 463 aa, Artificial Sequence
  Synthetic polypeptide
MSAQCCAGQLACCCGSAGCSLCCDCCPRIRQSLSTRFMYALYFILVVVLCCIMMSTTVAHKMKEHIPFFEDMCKGIKAGDTCEKLVGYSAVYRVCFGMACFFFIFCLLTLKINNSKSCRAHIHNGFWFFKLLLLGAMCSGAFFIPDQDTFLNAWRYVGAVGGFLFIGIQLLLLVEFAHKWNKNWTAGTASNKLWYASLALVTLIMYSIATGGLVLMAVFYTQKDSCMENKILLGVNGGLCLLISLVAISPWVQNRQPHSGLLQSGVISCYVTYLTFSALSSKPAEVDEHGKNVTICVPDFGQDLYRDENLVTILGTSLLIGCILYSCLTSTTRSSSDALQGRYAAPELEIARCCFCFSPGGEDTEEQQPGKEGPRVIYDEKKGTVYIYSYFHFVFFLASLYVMMTVTNWFKWSPTLLPRLEYSGMILAHCNLHLPDVKRFSCLSLPSSWGYRHVPPCAFHLLP

SEQ ID NO: 424 - protein, 463 aa, Artificial Sequence
  Synthetic polypeptide
MYLWLKLLAFGFAFLDTEVFVTGQSPTPSPTDAYLNASETTTLSPSGSAVISTTTIATTPSKPTCDEKYANITVDYLYNKETKLFTAKLNVNENVECGNNTCTNNEVHNLTECKNASVSISHNSCTAPDKTLILDVPPGVEKFQLHDCTQVEKADTTICLKWKNIETFTCDTQNITYRFQCGNMIFDNKEIKLENLEPEHEYKCDSEILYNNHKFTNASKIIKTDFGSPGEPQIIFCRSEAAHQGVITWNPPQRSFHNFTLCYIKETEKDCLNLDKNLIKYDLQNLKPYTKYVLSLHAYIIAKVQRNGSAAMCHFTTKSAPPSQVWNMTVSMTSDNSMHVKCRPPRDRNGPHERYHLEVEAGNTLVRNESHKNCDFRVKDLQYSTDYTFKAYFHNGDYPGEPFILHHSTSYNSKALIAFLAFLIIVTSIALLVVLYKIYDLHKKRSCNLDEQQELVERECNTI

SEQ ID NO: 425 - protein, 457 aa, Artificial Sequence
  Synthetic polypeptide
MEAPEEPAPVRGGPEATLEVRGSRCLRLSAFREELRALLVLAGPAFLVQLMVFLISFISSVFCGHLGKLELDAVTLAIAVINVTGVSVGFGLSSACDTLISQTYGSQNLKHVGVILQRSALVLLLCCFPCWALFLNTQHILLLFRQDPDVSRLTQTYVTIFIPALPATFLYMLQVKYLLNQGIVLPQIVTGVAANLVNALANYLFLHQLHLGVIGSALANLISQYTLALLLFLYILGKKLHQATWGGWSLECLQDWASFLRLAIPSMLMLCMEWWAYEVGSFLSGILGMVELGAQSIVYELAIIVYMVPAGFSVAASVRVGNALGAGDMEQARKSSTVSLLITVLFAVAFSVLLLSCKDHVGYIFTTDRDIINLVAQVVPIYAVSHLFEALACTSGGVLRGSGNQKVGAIVNTIGYYVVGLPIGIALMFATTLGVMAGETACCKLGPALSITAERTC

SEQ ID NO: 426 - protein, 457 aa, Artificial Sequence; identical to SEQ ID NO: 425
  Synthetic polypeptide

SEQ ID NO: 427 - protein, 457 aa, Artificial Sequence; identical to SEQ ID NO: 425
  Synthetic polypeptide

SEQ ID NO: 428 - protein, 455 aa, Artificial Sequence
  Synthetic polypeptide
MLLPLLLSSLLGGSQAMDGRFWIRVQESVMVPEGLCISVPCSFSYPRQDWTGSTPAYGYWFKAVTETTKGAPVATNHQSREVEMSTRGRFQLTGDPAKGNCSLVIRDAQMQDESQYFFRVERGSYVRYNFMNDGFFLKVTALTQKTVRLRVAYAPRDLVISISRDNTPALEPQPQGNVPYLEAQKGQFLRLLCAADSQPPATLSWVLQNRVLSSSHPWGPRPLGLELPGVKAGDSGRYTCRAENRLGSQQRALDLSVQYPPENLRVMVSQANRTVLENLGNGTSLPVLEGQSLCLVCVTHSSPPARLSWTQRGQVLSPSQPSDPGVLELPRVQVEHEGEFTCHARHPLGSQHVSLSLSVHYKKGLISTAFSNGAFLGIGITALLFLCLALIIMKILPKRRTQTETPRPRFSRHSTILDYINVVPTAGPLAQKRNQKATPNSPRTPLPPGHSGSRL

SEQ ID NO: 429 - protein, 454 aa, Artificial Sequence
  Synthetic polypeptide
MSSQPAGNQTSPGATEDYSYGSWYIDEPQGGEELQPEGEVPSCHTSIPPGLYHACLASLSILVLLLLAMLVRRRQLWPDCVRGRPGLPSPVDFLAGDRPRAVPAAVFMVLLSSLCLLLPDEDALPFLTLASAPSQDGKTEAPRGAWKILGLFYYAALYYPLAACATAGHTAAHLLGSTLSWAHLGVQVWQRAECPQVPKIYKYYSLLASLPLLLGLGFLSLWYPVQLVRSFSRRTGAGSKGLQSSYSEEYLRNLLCRKKLGSSYHTSKHGFLSWARVCLRHCIYTPQPGFHLPLKLVLSATLTGTAIYQVALLLLVGVVPTIQKVRAGVTTDVSYLLAGFGIVLSEDKQEVVELVKHHLWALEVCYISALVLSCLLTFLVLMRSLVTHRTNLRALHRGAALDLSPLHRSPHPSRQAIFCWMSFSAYQTAFICLVPAIREDEAGESLEPRRWRLQ

SEQ ID NO: 430 - protein, 454 aa, Artificial Sequence; identical to SEQ ID NO: 429
  Synthetic polypeptide

SEQ ID NO: 431 - protein, 454 aa, Artificial Sequence; identical to SEQ ID NO: 429
  Synthetic polypeptide

SEQ ID NO: 432 - protein, 453 aa, Artificial Sequence
  Synthetic polypeptide
MLGPCMLLLLLLLGLRLQLSLGIIPVEEENPDFWNREAAEALGAAKKLQPAQTAAKNLIIFLGDGMGVSTVTAARILKGQKKDKLGPEIPLAMDRFPYVALSKTYNVDKHVPDSGATATAYLCGVKGNFQTIGLSAAARFNQCNTTRGNEVISVMNRAKKAGKSVGVVTTTRVQHASPAGTYAHTVNRNWYSDADVPASARQEGCQDIATQLISNMDIDVILGGGRKYMFRMGTPDPEYPDDYSQGGTRLDGKNLVQEWLAKRQGARYVWNRTELMQASLDPSVTHLMGLFEPGDMKYEIHRDSTLDPSLMEMTEAALRLLSRNPRGFFLFVEGGRIDHGHHESRAYRALTETIMFDDAIERAGQLTSEEDTLSLVTADHSHVFSFGGYPLRGSSIFGLAPGKARDRKAYTVLLYGNGPGYVLKDGARPDVTESESGMAAQHLQSQHFGRKSG

SEQ ID NO: 433 - protein, 452 aa, Artificial Sequence
  Synthetic polypeptide
MAESRGRLYLWMCLAAALASFLMGFMVGWFIKPLKETTTSVRYHQSIRWKLVSEMKAENIKSFLRSFTKLPHLAGTEQNFLLAKKIQTQWKKFGLDSAKLVHYDVLLSYPNETNANYISIVDEHETEIFKTSYLEPPPDGYENVTNIVPPYNAFSAQGMPEGDLVYVNYARTEDFFKLEREMGINCTGKIVIARYGKIFRGNKVKNAMLAGAIGIILYSDPADYFAPEVQPYPKGWNLPGTAAQRGNVLNLNGAGDPLTPGYPAKEYTFRLDVEEGVGIPRIPVHPIGYNDAEILLRKVRMHVYNINKITRIYNVVGTIRGSVEPDRYVILGGHRDSWVFGAIDPTSGVAVLQEIARSFGKLMSKGWRPRRTIIFASWDAEEFGLLGSTEWAEVCNFTREASETTNPPGGRNNSRWAALRVTLTVKVCSFTSEPARPQTHQKEETLNTSEHQ

SEQ ID NO: 434 - protein, 451 aa, Artificial Sequence
  Synthetic polypeptide
MPPAVGGPVGYTPPDGGWGWAVVIGAFISIGFSYAFPKSITVFFKEIEGIFHATTSEVSWISSIMLAVMYGGGPISSILVNKYGSRIVMIVGGCLSGCGLIAASFCNTVQQLYVCIGVIGGLGLAFNLNPALTMIGKYFYKRRPLANGLAMAGSPVFLCTLAPLNQVFFGIFGWRGSFLILGGLLLNCCVAGALMRPIGPKPTKAGKDKSKASLEKAGKSGVKKDLHDANTDLIGRHPKQEKRSVFQTINQFLDLTLFTHRGFLLYLSGNVIMFFGLFAPLVFLSSYGKSQHYSSEKSAFLLSILAFVDMVARPSMGLVANTKPIRPRIQYFFAASVVANGVCHMLAPLSTTYVGFCVYAGFFGFAFGWLSSVLFETLMDLVGPQRFSSAVGLVTIVECCPVLLGPPLLGRLNDMYGDYKYTYWACGVVLIISDSALDGSSGTTQLKNWLN

SEQ ID NO: 435 - protein, 451 aa, Artificial Sequence; identical to SEQ ID NO: 434
  Synthetic polypeptide

SEQ ID NO: 436 - protein, 451 aa, Artificial Sequence; identical to SEQ ID NO: 434
  Synthetic polypeptide

SEQ ID NO: 437 - protein, 448 aa, Artificial Sequence
  Synthetic polypeptide
MAPGRAVAGLLLLAAAGLGGVAEGPGLAFSEDVLSVFGANLSLSAAQLQHLLEQMGAASRVGVPEPGQLHFNQCLTAEEIFSLHGFSNATQITSSKFSVICPAVLQQLNFHPCEDRPKHKTRPSHSEVWGYGFLSVTIINLASLLGLILTPLIKKSYFPKILTFFVGLAIGTLFSNAIFQLIPEAFGFDPKVDSYVEKAVAVFGGFYLLFFFERMLKMLLKTYGQNGHTHFGNDNFGPQEKTHQPKALPAINGVTCYANPAVTEANGHIHFDNVSVVSLQDGKKEPSSCTCLKGPKLSEIGTIAWMITLCDALHNFIDGLAIGASCTLSLLQGLSTSIAILCEEFPHELGDFVILLNAGMSTRQALLFNFLSACSCYVGLAFGILVGNNFAPNIIFALAGGMFLYISLADMFPEMNDMLREKIIKWATDDIKSQLHLLWIYTRLTHMD

SEQ ID NO: 438 - protein, 448 aa, Artificial Sequence
  Synthetic polypeptide
MLLPLLLSSLLGGSQAMDGRFWIRVQESVMVPEGLCISVPCSFSYPRQDWTGSTPAYGYWFKAVTETTKGAPVATNHQSREVEMSTRGRFQLTGDPAKGNCSLVIRDAQMQDESQYFFRVERGSYVRYNFMNDGFFLKVTALTQKPDVYIPETLEPGQPVTVICVFNWAFEECPPPSFSWTGAALSSQGTKPTTSHFSVLSFTPRPQDHNTDLTCHVDFSRKGVSAQRTVRLRVAYAPRDLVISISRDNTPDPPENLRVMVSQANRTVLENLGNGTSLPVLEGQSLCLVCVTHSSPPARLSWTQRGQVLSPSQPSDPGVLELPRVQVEHEGEFTCHARHPLGSQHVSLSLSVHYKKGLISTAFSNGAFLGIGITALLFLCLALIIMKILPKRRTQTETPRPRFSRHSTILDYINVVPTAGPLAQKRNQKATPNSPRTPLPPGHSGSRL

SEQ ID NO: 439 - protein, 447 aa, Artificial Sequence
  Synthetic polypeptide
MCAVGNVRIDPSSLSFNMWKEIPIPFYLSVYFFDVMNPSEILKGEKPQVRERGPYVYREFRHKSNITFNNNDTVSFLEYRTFQFQPSKSHGSESDYIVMPNILVLGAAVMMENKPMTLKLIMTLAFTTLGERAFMNRTVGEIMWGYKDPLVNLINKYFPGMFPFKDKFGLFAELNNSDSGLFTVFTGVQNISRIHLVDKWNGLSKVDFWHSDQCNMINGTSGQMWPPFMTPESSLEFYSPEACRSMKLMYKESGVFEGIPTYRFVAPKTLFANGSIYPPNEGFCPCLESGIQNVSTCRFSAPLFLSHPHFLNADPVLAEAVTGLHPNQEAHSLFLDIHPVTGIPMNCSVKLQLSLYMKSVAGIGQTGKIEPVVLPLLWFAESGAMEGETLHTFYTQLVLMPKVMHYAQYVLLALGCVLLLVPVICQIRSQARHGVSRLESQRFGRLR

SEQ ID NO: 440 - protein, 446 aa, Artificial Sequence
  Synthetic polypeptide
MSSQPAGNQTSPGATEDYSYGSWYIDEPQGGEELQPEGEVPSCHTSIPPGLYHACLASLSILVLLLLAMLVRRRQLWPDCVRGRPGLPSPVDFLAGDRPRAVPAAVFMVLLSSLCLLLPDEDALPFLTLASAPSQGAWKILGLFYYAALYYPLAACATAGHTAAHLLGSTLSWAHLGVQVWQRAECPQVPKIYKYYSLLASLPLLLGLGFLSLWYPVQLVRSFSRRTGAGSKGLQSSYSEEYLRNLLCRKKLGSSYHTSKHGFLSWARVCLRHCIYTPQPGFHLPLKLVLSATLTGTAIYQVALLLLVGVVPTIQKVRAGVTTDVSYLLAGFGIVLSEDKQEVVELVKHHLWALEVCYISALVLSCLLTFLVLMRSLVTHRTNLRALHRGAALDLSPLHRSPHPSRQAIFCWMSFSAYQTAFICLVPAIREDEAGESLEPRRWRLQ

SEQ ID NO: 441 - protein, 446 aa, Artificial Sequence
  Synthetic polypeptide
MVLSQEEPDSARGTSEAQPLGPAPTGAAPPPGPGPSDSPEAAVEKVEVELAGPATAEPHEPPEPPEGGWGWLVMLAAMWCNGSVFGIQNACGVLFVSMLETFGSKDDDKMVFKTAWVGSLSMGMIFFCCPIVSVFTDLFGCRKTAVVGAAVGFVGLMSSSFVSSIEPLYLTYGIIFACGCSFAYQPSLVILGHYFKKRLGLVNGIVTAGSSVFTILLPLLLRVLIDSVGLFYTLRVLCIFMFVLFLAGFTYRPLATSTKDKESGGSGSSLFSRKKFSPPKKIFNFAIFKVTAYAVWAVGIPLALFGYFVPYVHLMKHVNERFQDEKNKEVVLMCIGVTSGVGRLLFGRIADYVPGVKKVYLQVLSFFFIGLMSMMIPLCSIFGALIAVCLIMGLFDGCFISIMAPIAFELVGAQDVSQAIGFLLGFMSIPMTVGPPIAEKEERKKE

SEQ ID NO: 442 - protein, 445 aa, Artificial Sequence
  Synthetic polypeptide
MSSQPAGNQTSPGATEDYSYGSWYIDEPQGGEELQPEGEVPSCHTSIPPGLYHACLASLSILVLLLLAMLVRRRQLWPDCVRGRPGLPRPRAVPAAVFMVLLSSLCLLLPDEDALPFLTLASAPSQDGKTEAPRGAWKILGLFYYAALYYPLAACATAGHTAAHLLGSTLSWAHLGVQVWQRAECPQVPKIYKYYSLLASLPLLLGLGFLSLWYPVQLVRSFSRRTGAGSKGLQSSYSEEYLRNLLCRKKLGSSYHTSKHGFLSWARVCLRHCIYTPQPGFHLPLKLVLSATLTGTAIYQVALLLLVGVVPTIQKVRAGVTTDVSYLLAGFGIVLSEDKQEVVELVKHHLWALEVCYISALVLSCLLTFLVLMRSLVTHRTNLRALHRGAALDLSPLHRSPHPSRQAIFCWMSFSAYQTAFICLVPAIREDEAGESLEPRRWRLQ

SEQ ID NO: 443 - protein, 444 aa, Artificial Sequence
  Synthetic polypeptide
MLQDPDSDQPLNSLDVKPLRKPRIPMETFRKVGIPIIIALLSLASIIIVVVLIKVILDKYYFLCGQPLHFIPRKQLCDGELDCPLGEDEEHCVKSFPEGPAVAVRLSKDRSTLQVLDSATGNWFSACFDNFTEALAETACRQMGYSSKPTFRAVEIGPDQDLDVVEITENSQELRMRNSSGPCLSGSLVSLHCLACGKSLKTPRVVGVEEASVDSWPWQVSIQYDKQHVCGGSILDPHWVLTAAHCFRKHTDVFNWKVRAGSDKLGSFPSLAVAKIIIIEFNPMYPKDNDIALMKLQFPLTFSGTVRPICLPFFDEELTPATPLWIIGWGFTKQNGGKMSDILLQASVQVIDSTRCNADDAYQGEVTEKMMCAGIPEGGVDTCQDRTIQRSCNSPGTGLVIQQPAVPLMELRSARHTHRLTTCVCFLSFPALQPLSPLCPFPWD

SEQ ID NO: 444 - protein, 444 aa, Artificial Sequence
  Synthetic polypeptide
MVQKSRNGGVYPGPSGEKKLKVGFVGLDPGAPDSTRDGALLIAGSEAPKRGSILSKPRAGGAGAGKPPKRNAFYRKLQNFLYNVLERPRGWAFIYHAYVFLLVFSCLVLSVFSTIKEYEKSSEGALYILEIVTIVVFGVEYFVRIWAAGCCCRYRGWRGRLKFARKPFCVIDIMVLIASIAVLAAGSQGNVFATSALRSLRFLQILRMIRMDRRGGTWKLLGSVVYAHSKELVTAWYIGFLCLILASFLVYLAEKGENDHFDTYADALWWGLITLTTIGYGDKYPQTWNGRLLAATFTLIGVSFFALPAGILGSGFALKVQEQHRQKHFEKRRNPAAGLIQEERALPLATTRMGRGDVTLSGGSQTGKAVQLAMPLAGNARGGEVRGAPYTLAVARAWGTRNQERLLNVGGRRGFIWGRRRGVELDRGSGRTALCVQALLKCTL

SEQ ID NO: 445 - protein, 444 aa, Artificial Sequence; identical to SEQ ID NO: 444
  Synthetic polypeptide

SEQ ID NO: 446 - protein, 444 aa, Artificial Sequence; identical to SEQ ID NO: 444
  Synthetic polypeptide

SEQ ID NO: 447 - protein, 444 aa, Artificial Sequence; identical to SEQ ID NO: 444
  Synthetic polypeptide

SEQ ID NO: 448 - protein, 444 aa, Artificial Sequence; identical to SEQ ID NO: 444
  Synthetic polypeptide

SEQ ID NO: 449 - protein, 444 aa, Artificial Sequence; identical to SEQ ID NO: 444
  Synthetic polypeptide

SEQ ID NO: 450 - protein, 444 aa, Artificial Sequence; identical to SEQ ID NO: 444
  Synthetic polypeptide

SEQ ID NO: 451 - protein, 444 aa, Artificial Sequence; identical to SEQ ID NO: 444
  Synthetic polypeptide

SEQ ID NO: 452 - protein, 443 aa, Artificial Sequence
  Synthetic polypeptide
MNVRIDPSSLSFNMWKEIPIPFYLSVYFFDVMNPSEILKGEKPQVRERGPYVYREFRHKSNITFNNNDTVSFLEYRTFQFQPSKSHGSESDYIVMPNILVLGAAVMMENKPMTLKLIMTLAFTTLGERAFMNRTVGEIMWGYKDPLVNLINKYFPGMFPFKDKFGLFAELNNSDSGLFTVFTGVQNISRIHLVDKWNGLSKVDFWHSDQCNMINGTSGQMWPPFMTPESSLEFYSPEACRSMKLMYKESGVFEGIPTYRFVAPKTLFANGSIYPPNEGFCPCLESGIQNVSTCRFSAPLFLSHPHFLNADPVLAEAVTGLHPNQEAHSLFLDIHPVTGIPMNCSVKLQLSLYMKSVAGIGQTGKIEPVVLPLLWFAESGAMEGETLHTFYTQLVLMPKVMHYAQYVLLALGCVLLLVPVICQIRSQARHGVSRLESQRFGRLR

SEQ ID NO: 453 - protein, 442 aa, Artificial Sequence
  Synthetic polypeptide
MDPDSDQPLNSLDVKPLRKPRIPMETFRKVGIPIIIALLSLASIIIVVVLIKVILDKYYFLCGQPLHFIPRKQLCDGELDCPLGEDEEHCVKSFPEGPAVAVRLSKDRSTLQVLDSATGNWFSACFDNFTEALAETACRQMGYSSKPTFRAVEIGPDQDLDVVEITENSQELRMRNSSGPCLSGSLVSLHCLACGKSLKTPRVVGVEEASVDSWPWQVSIQYDKQHVCGGSILDPHWVLTAAHCFRKHTDVFNWKVRAGSDKLGSFPSLAVAKIIIIEFNPMYPKDNDIALMKLQFPLTFSGTVRPICLPFFDEELTPATPLWIIGWGFTKQNGGKMSDILLQASVQVIDSTRCNADDAYQGEVTEKMMCAGIPEGGVDTCQDRTIQRSCNSPGTGLVIQQPAVPLMELRSARHTHRLTTCVCFLSFPALQPLSPLCPFPWD

SEQ ID NO: 454 - protein, 441 aa, Artificial Sequence
  Synthetic polypeptide
MDPDSDQPLNSLVKVILDKYYFLCGQPLHFIPRKQLCDGELDCPLGEDEEHCVKSFPEGPAVAVRLSKDRSTLQVLDSATGNWFSACFDNFTEALAETACRQMGYSSKPTFRAVEIGPDQDLDVVEITENSQELRMRNSSGPCLSGSLVSLHCLACGKSLKTPRVVGVEEASVDSWPWQVSIQYDKQHVCGGSILDPHWVLTAAHCFRKHTDVFNWKVRAGSDKLGSFPSLAVAKIIIIEFNPMYPKDNDIALMKLQFPLTFSGTVRPICLPFFDEELTPATPLWIIGWGFTKQNGGKMSDILLQASVQVIDSTRCNADDAYQGEVTEKMMCAGIPEGGVDTCQGDSGGPLMYQSDQWHVVGIVSWGYGCGGPSTPGVYTKDRTIQRSCNSPGTGLVIQQPAVPLMELRSARHTHRLTTCVCFLSFPALQPLSPLCPFPWD

SEQ ID NO: 455 - protein, 439 aa, Artificial Sequence
  Synthetic polypeptide
MLQDPDSDQPLNSLDVKPLRKPRIPMETFRKVGIPIIIALLSLASIIIVVVLIKVILDKYYFLCGQPLHFIPRKQLCDGELDCPLGEDEEHCVKSFPEGPAVAVRLSKDRSTLQVLDSATGNWFSACFDNFTEALAETACRQMGYSRAVEIGPDQDLDVVEITENSQELRMRNSSGPCLSGSLVSLHCLACGKSLKTPRVVGVEEASVDSWPWQVSIQYDKQHVCGGSILDPHWVLTAAHCFRKHTDVFNWKVRAGSDKLGSFPSLAVAKIIIIEFNPMYPKDNDIALMKLQFPLTFSGTVRPICLPFFDEELTPATPLWIIGWGFTKQNGGKMSDILLQASVQVIDSTRCNADDAYQGEVTEKMMCAGIPEGGVDTCQDRTIQRSCNSPGTGLVIQQPAVPLMELRSARHTHRLTTCVCFLSFPALQPLSPLCPFPWD

SEQ ID NO: 456 - protein, 438 aa, Artificial Sequence
  Synthetic polypeptide
MLQDPDSDQPLNSLDVKPLRKPRIPMETFRKVGIPIIIALLSLASIIIVVVLIKVILDKYYFLCGQPLHFIPRKQLCDGELDCPLGEDEEHCVKSFPEGPAVAVRLSKDRSTLQVLDSATGNWFSACFDNFTEALAETACRQMGYSSKPTFRAVEIGPDQDLDVVEITENSQELRMRNSSGPCLSGSLVSLHCLACGKSLKTPRVVGVEEASVDSWPWQVSIQYDKQHVCGGSILDPHWVLTAAHCFRKHTDVFNWKVRAGSDKLGSFPSLAVAKIIIIEFNPMYPKDNDIALMKLQFPLTFSGTVRPICLPFFDEELTPATPLWIIGWGFTKQNGGKMSDILLQASVQVIDSTRCNADDAYQGEVTEKMMCAGIPEGGVDTCQGDSGGPLMYQSDQWHVVGIVSWGYGCGGPSTPGVYTKVSAYLNWIYNVWKGQVL

SEQ ID NO: 457 - protein, 436 aa, Artificial Sequence
  Synthetic polypeptide
MDPDSDQPLNSLDVKPLRKPRIPMETFRKVGIPIIIALLSLASIIIVVVLIKVILDKYYFLCGQPLHFIPRKQLCDGELDCPLGEDEEHCVKSFPEGPAVAVRLSKDRSTLQVLDSATGNWFSACFDNFTEALAETACRQMGYSSKPTFRAVEIGPDQDLDVVEITENSQELRMRNSSGPCLSGSLVSLHCLACGKSLKTPRVVGVEEASVDSWPWQVSIQYDKQHVCGGSILDPHWVLTAAHCFRKHTDVFNWKVRAGSDKLGSFPSLAVAKIIIIEFNPMYPKDNDIALMKLQFPLTFSGTVRPICLPFFDEELTPATPLWIIGWGFTKQNGGKMSDILLQASVQVIDSTRCNADDAYQGEVTEKMMCAGIPEGGVDTCQGDSGGPLMYQSDQWHVVGIVSWGYGCGGPSTPGVYTKVSAYLNWIYNVWKGQVL

SEQ ID NO: 458 - protein, 434 aa, Artificial Sequence
  Synthetic polypeptide
MEAPEEPAPVRGGPEATLEVRGSRCLRLSAFREELRALLVLAGPAFLVQLMVFLISFISSVFCGHLGKLELDAVTLAIATYGSQNLKHVGVILQRSALVLLLCCFPCWALFLNTQHILLLFRQDPDVSRLTQTYVTIFIPALPATFLYMLQVKYLLNQGIVLPQIVTGVAANLVNALANYLFLHQLHLGVIGSALANLISQYTLALLLFLYILGKKLHQATWGGWSLECLQDWASFLRLAIPSMLMLCMEWWAYEVGSFLSGILGMVELGAQSIVYELAIIVYMVPAGFSVAASVRVGNALGAGDMEQARKSSTVSLLITVLFAVAFSVLLLSCKDHVGYIFTTDRDIINLVAQVVPIYAVSHLFEALACTSGGVLRGSGNQKVGAIVNTIGYYVVGLPIGIALMFATTLGVMAGETACCKLGPALSITAERTC

SEQ ID NO: 459 - protein, 434 aa, Artificial Sequence
  Synthetic polypeptide
MTTSHQPQDRYKAVWLIFFMLGLGTLLPWNFFMTATQYFTNRLDMSQNVSLVTAELSKDAQASAAPAAPLPERNSLSAIFNNVMTLCAMLPLLLFTYLNSFLHQRIPQSVRILGSLVAILLVFLITAILVKVQLDALPFFVITMIKIVLINSFGAILQGSLFGLAGLLPASYTAPIMSGQGLAGFFASVAMICAIASGSELSESAFGYFITACAVIILTIICYLGLPRLEFYRYYQQLKLEGPGEQETKLDLISKGEEPRAGKEESGVSVSNSQPTNESHSIKAILKNISVLAFSVCFIFTITIGMFPAVTVEVKSSIAGSSTWERYFIPVSCFLTFNIFDWLGRSLTAVFMWPGKDSRWLPSLVLARLVFVPLLLLCNIKPRRYLTVVFEHDAWFIFFMAAFAFSNGYLASLCMCFGPKLKDGKTFCKLQSTR

SEQ ID NO: 460 - protein, 434 aa, Artificial Sequence; identical to SEQ ID NO: 459
  Synthetic polypeptide

SEQ ID NO: 461 - protein, 434 aa, Artificial Sequence; identical to SEQ ID NO: 459
  Synthetic polypeptide

SEQ ID NO: 462 - protein, 434 aa, Artificial Sequence; identical to SEQ ID NO: 459
  Synthetic polypeptide

SEQ ID NO: 463 - protein, 434 aa, Artificial Sequence; identical to SEQ ID NO: 459
  Synthetic polypeptide

SEQ ID NO: 464 - protein, 434 aa, Artificial Sequence; identical to SEQ ID NO: 459
  Synthetic polypeptide

SEQ ID NO: 465 - protein, 434 aa, Artificial Sequence; identical to SEQ ID NO: 459
  Synthetic polypeptide

SEQ ID NO: 466 - protein, 434 aa, Artificial Sequence; identical to SEQ ID NO: 459
  Synthetic polypeptide

SEQ ID NO: 467 - protein, 434 aa, Artificial Sequence; identical to SEQ ID NO: 459
  Synthetic polypeptide

SEQ ID NO: 468 - protein, 434 aa, Artificial Sequence
  Synthetic polypeptide
MECLYYFLGFLLLAARLPLDAAKQAGLSADPYVYNWTAWSEDSDGENGTGQSHHNVFPDGKPFPHHPGWRRWNFIYVFHTLGQYFQKLGRCSVRVSVNTANVTLGPQLMEVTVYRRHGRAYVPIAQVKDVYVVTDQIPVFVTMFQKNDRNSSDETFLKDLPIMFDVLIHDPSHFLNYSTINYKWSFGDNTGLFVSTNHTVNHTYVLNGTFSLNLTVKAAAPGPCPPPPPPPRPSKPTPSLGPAGDNPLELSRIPDENCQINRYGHFQATITIVEGILEVNIIQMTDVLMPVPWPESSLIDFVVTCQGSIPTEVCTIISDPTCEITQNTVCSPVDVDEMCLLTVRRTFNGSGTYCVNLTLGDDTSLALTSTLISVPDRDPASPLRMANSALISVGCLAIFVTVISLLVYKLPKMKKYLTKSSVERKCNFAVGILN

SEQ ID NO: 469 - protein, 434 aa, Artificial Sequence
  Synthetic polypeptide
MLGKLAMLLWVQQALLALLLPTLLAQGEARRSRNTTRPALLRLSDYLLTNYRKGVRPVRDWRKPTTVSIDVIVYAILNVDEKNQVLTTYIWYRQYWTDEFLQWNPEDFDNITKLSIPTDSIWVPDILINEFVDVGKSPNIPYVYIRHQGEVQNYKPLQVVTACSLDIYNFPFDVQNCSLTFTSWLHTIQDINISLWRLPEKVKSDRSVFMNQGEWELLGVLPYFREFSMESSNYYAEMKFYVVIRRRPLFYVVSLLLPSIFLMVMDIVGFYLPPNSGERVSFKITLLLGYSVFLIIVSDTLPATAIGTPLIGKAPPGSRAQSGEKPAPSHLLHVSLASALGCTGVYFVVCMALLVISLAETIFIVRLVHKQDLQQPVPAWLRHLVLERIAWLLCLREQSTSQRPPATSQATKTDDCSVGWAWSCTPVVLATSGG

SEQ ID NO: 470 - protein, 433 aa, Artificial Sequence
  Synthetic polypeptide
MLQDPDSDQPLNSLDVKPLRKPRIPMETFRKVGIPIIIALLSLASIIIVVVLIKVILDKYYFLCGQPLHFIPRKQLCDGELDCPLGEDEEHCVKSFPEGPAVAVRLSKDRSTLQVLDSATGNWFSACFDNFTEALAETACRQMGYSRAVEIGPDQDLDVVEITENSQELRMRNSSGPCLSGSLVSLHCLACGKSLKTPRVVGVEEASVDSWPWQVSIQYDKQHVCGGSILDPHWVLTAAHCFRKHTDVFNWKVRAGSDKLGSFPSLAVAKIIIIEFNPMYPKDNDIALMKLQFPLTFSGTVRPICLPFFDEELTPATPLWIIGWGFTKQNGGKMSDILLQASVQVIDSTRCNADDAYQGEVTEKMMCAGIPEGGVDTCQGDSGGPLMYQSDQWHVVGIVSWGYGCGGPSTPGVYTKVSAYLNWIYNVWKGQVL

SEQ ID NO: 471 - protein, 431 aa, Artificial Sequence
  Synthetic polypeptide
MGALARALLLPLLAQWLLRAAPELAPAPFTLPLRVAAATNRVVAPTPGPGTPAERHADGLALALEPALASPAGAANFLAMVDNLQGDSGRGYYLEMLIGTPPQKLQILVDTGSSNFAVAGTPHSYIDTYFDTERSSTYRSKGFDVTVKYTQGSWTGFVGEDLVTIPKGFNTSFLVNIATIFESENFFLPGIKWNGILGLAYATLAKPSSSLETFFDSLVTQANIPNVFSMQMCGAGLPVAGSGTNGGSLVLGGIEPSLYKGDIWYTPIKEEWYYQIEILKLEIGGQSLNLDCREYNADKAIVDSGTTLLRLPQKVFDAVVEAVARASLLYIQPMMGAGLNYECYRFGISPSTNALVIGATVMEGFYVIFDRAQKRVGFAASPCAETTVKPPVPSCPILRPPDYPCALLRGPQWQLCLLFLGIYEYKELLSL

SEQ ID NO: 472 - protein, 430 aa, Artificial Sequence
  Synthetic polypeptide
MYRDPEAASPGAPSRDVLLVSAIITVSLSVTVVLCGLCHWCQRKLGKRYKNSLETVGTPDSGRGRSEKKAINDLDRDFWNNNESTVQQKWSSYPPKEFILNISPYAPYGDPRLSLNFEDSTLSTATTLESIPSSTGEPKCQRPRTLMRQQSLQQPLSQHQRGRQPSQPTTSQSLGQLQAHMASAPGPNPRAYGRGQARQGTSAGSKYRAAGGRSRSNPGSWDHVVGQIRNRGLDMKSFLEGRMVVLSLVLGLSEQDDFANIPDLQNPGTQQNQNAQGDKRLPAGGKAVNTAPVPGQTPHDESDRRTEPRSSVSDLVNSLTSEMLMLSPGSEEDEAHEGCSRENLGRIQFSVGYNFQESTLTVKIMKAQELPAKDFSGTSDPFVKIYLLPDKKHKLETKVKRKNLNPHWNETFLFEAGSLGKYFKPSEPHL

SEQ ID NO: 473 - protein, 430 aa, Artificial Sequence
  Synthetic polypeptide
MWKEIPIPFYLSVYFFDVMNPSEILKGEKPQVRERGPYVYREFRHKSNITFNNNDTVSFLEYRTFQFQPSKSHGSESDYIVMPNILVLGAAVMMENKPMTLKLIMTLAFTTLGERAFMNRTVGEIMWGYKDPLVNLINKYFPGMFPFKDKFGLFAELNNSDSGLFTVFTGVQNISRIHLVDKWNGLSKVDFWHSDQCNMINGTSGQMWPPFMTPESSLEFYSPEACRSMKLMYKESGVFEGIPTYRFVAPKTLFANGSIYPPNEGFCPCLESGIQNVSTCRFSAPLFLSHPHFLNADPVLAEAVTGLHPNQEAHSLFLDIHPVTGIPMNCSVKLQLSLYMKSVAGIGQTGKIEPVVLPLLWFAESGAMEGETLHTFYTQLVLMPKVMHYAQYVLLALGCVLLLVPVICQIRSQARHGVSRLESQRFGRLR

SEQ ID NO: 474 - protein, 428 aa, Artificial Sequence
  Synthetic polypeptide
MGGKGGGDTRGPVLFPCQLAQALSPRRAFPRELKEKGQRMSSQPAGNQTSPGATEDYSYGSWYIDEPQGGEELQPEGEVPSCHTSIPPGLYHACLASLSILVLLLLAMLVRRRQLWPDCVRGRPGLPSPVDFLAGDRPRAVPAAVFMVLLSSLCLLLPDEDALPFLTLASAPSQDGKTEAPRGAWKILGLFYYAALYYPLAACATAGHTAAHLLGSTLSWAHLGVQVWQRAECPQVPKIYKYYSLLASLPLLLGLGFLSLWYPVQLVRSFSRRTGAGSKGLQSSYSEEYLRNLLCRKKLGSSYHTSKHGFLSWARVCLRHCIYTPQPGFHLPLKLVLSATLTGTAIYQVALLLLVGVVPTIQKVRAGVTTDVSYLLAGFGIVLSEDKQEVVELVKHHLWALEAAWLSGRSPLSEPQLPLQPSGNSSSV

SEQ ID NO: 475 - protein, 428 aa, Artificial Sequence
  Synthetic polypeptide
MLLWVQQALLALLLPTLLAQGEARRSRNTTRPALLRLSDYLLTNYRKGVRPVRDWRKPTTVSIDVIVYAILNVDEKNQVLTTYIWYRQYWTDEFLQWNPEDFDNITKLSIPTDSIWVPDILINEFVDVGKSPNIPYVYIRHQGEVQNYKPLQVVTACSLDIYNFPFDVQNCSLTFTSWLHTIQDINISLWRLPEKVKSDRSVFMNQGEWELLGVLPYFREFSMESSNYYAEMKFYVVIRRRPLFYVVSLLLPSIFLMVMDIVGFYLPPNSGERVSFKITLLLGYSVFLIIVSDTLPATAIGTPLIGKAPPGSRAQSGEKPAPSHLLHVSLASALGCTGVYFVVCMALLVISLAETIFIVRLVHKQDLQQPVPAWLRHLVLERIAWLLCLREQSTSQRPPATSQATKTDDCSVGWAWSCTPVVLATSGG

SEQ ID NO: 476 - protein, 428 aa, Artificial Sequence
  Synthetic polypeptide
MAGSPSRAAGRRLQLPLLCLFLQGATAVLFAVFVRYNHKTDAALWHRSNHSNADNEFYFRYPSFQDVHAMVFVGFGFLMVFLQRYGFSSVGFTFLLAAFALQWSTLVQGFLHSFHGGHIHVGVESMINADFCAGAVLISFGAVLGKTGPTQLLLMALLEVVLFGINEFVLLHLLGVRDAGGSMTIHTFGAYFGLVLSRVLYRPQLEKSKHRQGSVYHSDLFAMIGTIFLWIFWPSFNAALTALGAGQHRTALNTYYSLAASTLGTFALSALVGEDGRLDMVHIQNAALAGGVVVGTSSEMMLTPFGALAAGFLAGTVSTLGYKFFTPILESKFKVQDTCGVHNLHGMPGVLGALLGVLVAGLATHEAYGDGLESVFPLIAEGQRSATSQAMHQLFGLFVTLMFASVGGGLGGIILALQGCCDYSGKQD

SEQ ID NO: 477 - protein, 428 aa, Artificial Sequence; identical to SEQ ID NO: 476
  Synthetic polypeptide

SEQ ID NO: 478 - protein, 427 aa, Artificial Sequence
  Synthetic polypeptide
MGGKGGGDTRGPVLFPCQLAQALSPRRAFPRELKEKGQRMSSQPAGNQTSPGATEDYSYGSWYIDEPQGGEELQPEGEVPSCHTSIPPGLYHACLASLSILVLLLLAMLVRRRQLWPDCVRGRPGLPSPVDFLAGDRPRAVPAAVFMVLLSSLCLLLPDEDALPFLTLASAPSQDGKTEAPRGAWKILGLFYYAALYYPLAACATAGHTAAHLLGSTLSWAHLGVQVWQRAECPQVPKIYKYYSLLASLPLLLGLGFLSLWYPVQLVRSFSRRTGAGSKGLQSSYSEEYLRNLLCRKKLGSSYHTSKHGFLSWARVCLRHCIYTPQPGFHLPLKLVLSATLTGTAIYQVALLLLVGVVPTIQKVRAGVTTDVSYLLAGFGIVLSEDKQEVVELVKHHLWALEAWLSGRSPLSEPQLPLQPSGNSSSV

SEQ ID NO: 479 - protein, 427 aa, Artificial Sequence
  Synthetic polypeptide
MDSLQDTVALDHGGCCPALSRLVPRGFGTEMWTLFALSGPLFLFQVLTFMIYIVSTVFCGHLGKVELASVTLAVAFVNVCGVSVGVGLSSACDTLMSQSFGSPNKKHVGVILQRGALVLLLCCLPCWALFLNTQHILLLFRQDPDVSRLTQDYVMIFIPGLPVIFLYNLLAKYLQNQGWLKGQEEESPFQTPGLSILHPSHSHLSRASFHLFQKITWPQVLSGVVGNCVNGVANYALVSVLNLGVRGSAYANIISQFAQTVFLLLYIVLKKLHLETWAGWSSQCLQDWGPFFSLAVPSMLMICVEWWAYEIGSFLMGLLSVVDLSAQAVIYEVATVTYMIPLGLSIGVCVRVGMALGAADTVQAKRSAVSGVLSIVGISLVLGTLISILKNQLGHIFTNDEDVIALVSQVLPVYSVFHVFEAICALG

SEQ ID NO: 480 - protein, 426 aa, Artificial Sequence
  Synthetic polypeptide
MQIRLLRAELVVPLWQFIRQWPPGSDGWGQMEEKGQRMSSQPAGNQTSPGATEDYSYGSWYIDEPQGGEELQPEGEVPSCHTSIPPGLYHACLASLSILVLLLLAMLVRRRQLWPDCVRGRPGLPSPVDFLAGDRPRAVPAAVFMVLLSSLCLLLPDEDALPFLTLASAPSQDGKTEAPRGAWKILGLFYYAALYYPLAACATAGHTAAHLLGSTLSWAHLGVQVWQRAECPQVPKIYKYYSLLASLPLLLGLGFLSLWYPVQLVRSFSRRTGAGSKGLQSSYSEEYLRNLLCRKKLGSSYHTSKHGFLSWARVCLRHCIYTPQPGFHLPLKLVLSATLTGTAIYQVALLLLVGVVPTIQKVRAGVTTDVSYLLAGFGIVLSEDKQEVVELVKHHLWALEAAWLSGRSPLSEPQLPLQPSGNSSSV

SEQ ID NO: 481 - protein, 425 aa, Artificial Sequence
  Synthetic polypeptide
MQIRLLRAELVVPLWQFIRQWPPGSDGWGQMEEKGQRMSSQPAGNQTSPGATEDYSYGSWYIDEPQGGEELQPEGEVPSCHTSIPPGLYHACLASLSILVLLLLAMLVRRRQLWPDCVRGRPGLPSPVDFLAGDRPRAVPAAVFMVLLSSLCLLLPDEDALPFLTLASAPSQDGKTEAPRGAWKILGLFYYAALYYPLAACATAGHTAAHLLGSTLSWAHLGVQVWQRAECPQVPKIYKYYSLLASLPLLLGLGFLSLWYPVQLVRSFSRRTGAGSKGLQSSYSEEYLRNLLCRKKLGSSYHTSKHGFLSWARVCLRHCIYTPQPGFHLPLKLVLSATLTGTAIYQVALLLLVGVVPTIQKVRAGVTTDVSYLLAGFGIVLSEDKQEVVELVKHHLWALEAWLSGRSPLSEPQLPLQPSGNSSSV

SEQ ID NO: 482 - protein, 424 aa, Artificial Sequence
  Synthetic polypeptide
MSARGVVQHALPTPRRGALTMSLNSSLSCRKELSNLTEEEGGEGGVIITQFIAIIVITIFVCLGNLVIVVTLYKKSYLLTLSNKFVFSLTLSNFLLSVLVLPFVVTSSIRREWIFGVVWCNFSALLYLLISSASMLTLGVIAIDRYYAVLYPMVYPMKITGNRAVMALVYIWLHSLIGCLPPLFGWSSVEFDEFKWMCVAAWHREPGYTAFWQIWCALFPFLVMLVCYGFIFRVARVKARKVHCGTVVIVEEDAQRTGRKNSSTSTSSSGSRRNAFQGVVYSANQCKALITILVVLGAFMVTWGPYMVVIASEALWGKSSVSPSLETWATWLSFASAVCHPLIYGLWNKTVRKELLGMCFGDRYYREPFVQRQRTSRLFSISNRITDLGLSPHLTALMAGGQPLGHSSSTGDTGFSCSQDSGQL

SEQ ID NO: 483 - protein, 422 aa, Artificial Sequence
  Synthetic polypeptide
MGQPGNGSAFLLAPNGSHAPDHDVTQERDEVWVVGMGIVMSLIVLAIVFGNVLVITAIAKFERLQTVTNYFITSLACADLVMGLAVVPFGAAHILMKMWTFGNFWCEFWTSIDVLCVTASIETLCVIAVDRYFAITSPFKYQSLLTKNKARVIILMVWIVSGLTSFLPIQMHWYRATHQEAINCYANETCCDFFTNQAYAIASSIVSFYVPLVIMVFVYSRVFQEAKRQLQKIDKSEGRFHVQNLSQVEQDGRTGHGLRRSSKFCLKEHKALKTLGIIMGTFTLCWLPFFIVNIVHVIQDNLIRKEVYILLNWIGYVNSGFNPLIYCRSPDFRIAFQELLCLRRSSLKAYGNGYSSNGNTGEQSGYHVEQEKENKLLCEDLPGTEDFVGHQGTRMKPEIIILSKLTEEQKTKHRMLSLISGS

SEQ ID NO: 484 - protein, 418 aa, Artificial Sequence
  Synthetic polypeptide
MAFLMHLLVCVFGMGSWVTINGLWVELPLLVMELPEGWYLPSYLTVVIQLANIGPLLVTLLHHFRPSCLSEVPIIFTLLGVGTVTCIIFAFLWNMTSWVLDGHHSIAFLVLTFFLALVDCTSSVTFLPFMSRLPTYYLTTFFVGEGLSGLLPALVALAQGSGLTTCVNVTEISDSVPSPVPTRETDIAQGVPRALVSALPGMEAPLSHLESRYLPAHFSPLVFFLLLSIMMACCLVAFFVLQRQPRCWEASVEDLLNDQVTLHSIRPREENDLGPAGTVDSSQGQGYLEEKAAPCCPAHLAFIYTLVAFVNALTNGMLPSVQTYSCLSYGPVAYHLAATLSIVANPLASLVSMFLPNRSLLFLGVLSVLGTCFGGYNMAMAVMSPCPLLQGHWGGEVLIETDVMAKSGAAVLDHKEKA

SEQ ID NO: 485 - protein, 418 aa, Artificial Sequence; identical to SEQ ID NO: 484
  Synthetic polypeptide

SEQ ID NO: 486 - protein, 417 aa, Artificial Sequence
  Synthetic polypeptide
MQPRRAQAPGAQLLPALALLLLLLGAGPRGSSLANPVPAAPLSAPGPCAAQPCRNGGVCTSRPEPDPQHPAPAGEPGYSCTCPAGISGANCQLVADPCASNPCHHGNCSSSSSSSSDGYLCICNEGYEGPNCEQALPSLPATGWTESMAPRQLQPVPATQEPDKILPRSQATVTLPTWQPKTGQKVVEMKWDQVEVIPDIACGNASSNSSAGGRLVSFEVPQNTSVKIRQDATASLILLWKVTATGFQQCSLIDGRSVTPLQASGGLVLLEEMLALGNNHFIGFVNDSVTKSIVALRLTLVVKVSTCVPGESHANDLECSGKGKCTTKPSEATFSCTCEEQYVGTFCEEYDACQRKPCQNNASCIDANEKQDGSNFTCVCLPACKEGHVCLLFLHDCKFLEAPQPCGTVSQLNLFPL

SEQ ID NO: 487 - protein, 417 aa, Artificial Sequence
  Synthetic polypeptide
MSSQPAGNQTSPGATEDYSYGSWYIDEPQGGEELQPEGEVPSCHTSIPPGLYHACLASLSILVLLLLAMLVRRRQLWPDCVRGRPGLPSPVDFLAGDRPRAVPAAVFMVLLSSLCLLLPDEDALPFLTLASAPSQDGKTEAPRGAWKILGLFYYAALYYPLAACATAGHTAAHLLGSTLSWAHLGVQVWQRAECPQVPKIYKYYSLLASLPLLLGLGFLSLWYPVQLVRSFSRRTGAGSKGLQSSYSEEYLRNLLCRKKLGSRMAAVEDWLLLPRILVIKRDNYQLGTAGRPWPGLGHLGSCWPFSWAPWEGGGLPGLSGAVHHTPSFEDYRIPSPAEAGAFSYTDRDGHLPGGPAAAGGRGTHYPEGEGRGHHGCLLPAGRLWNRALRGQAGGGGAGEAPSVGSGSSMAVWAKPSL

SEQ ID NO: 488 - protein, 416 aa, Artificial Sequence
  Synthetic polypeptide
MSSQPAGNQTSPGATEDYSYGSWYIDEPQGGEELQPEGEVPSCHTSIPPGLYHACLASLSILVLLLLAMLVRRRQLWPDCVRGRPGLPSPVDFLAGDRPRAVPAAVFMVLLSSLCLLLPDEDALPFLTLASAPSQDGKTEAPRGAWKILGLFYYAALYYPLAACATAGHTAAHLLGSTLSWAHLGVQVWQRAECPQVPKIYKYYSLLASLPLLLGLGFLSLWYPVQLVRSFSRRTGAGSKGLQSSYSEEYLRNLLCRKKLGSRMAAVEDWLLLPRILVIKRDNYQLGTAGRPWPGLGHLGSCWPFSWAPWEGGGLPGLSGAVHHTPSFEDYRIPSPAEAGAFSYTDRDGHLPGGPAAAGGRGTHYPEGEGRGHHGCLLPAGRLWNRALRGQAGGGGAGEAPSVGSGSMAVWAKPSL

SEQ ID NO: 489 - protein, 414 aa, Artificial Sequence
  Synthetic polypeptide
MAGSPSRAAGRRLQLPLLCLFLQGATAVLFAVFVRYNHKTDAALWHRSNHSNADNEFYFRYPSFQDVHAMVFVGFGFLMVFLQRYGFSSVGFTFLLAAFALQWSTLVQGFLHSFHGGHIHVGVESMINADFCAGAVLISFGAVLGKTGPTQLLLMALLEVVLFGINEFVLLHLLGVRDAGGSMTIHTFGAYFGLVLSRVLYRPQLEKSKHRQGSVYHSDLFAMIGTIFLWIFWPSFNAALTALGAGQHRTALNTYYSLAASTLGTFALSALVGEDGRLDMVHIQNAALAGGVVVGTSSEMMLTPFGALAAGFLAGTVSTLGYKFFTPILESKFKVQDTCGVHNLHGMPGVLGALLGVLVAGLATHEAYGDGLESVFPLIAEGQRSATSQAMHQLFGLFVTLMFASVGGGLGGLL

SEQ ID NO: 490 - protein, 414 aa, Artificial Sequence; identical to SEQ ID NO: 489
  Synthetic polypeptide

SEQ ID NO: 491 - protein, 413 aa, Artificial Sequence
  Synthetic polypeptide
MQGEESLRILVEPEGDSFPLMEISTCETEASEQWDYVLVAQRHTQRDPRQARQQQFLEELRRKGFHIKVIRDQKQVFFGIRADNSVFGLYRTFLLEPEGPAPHAELAAPTTIPVTTSLRIRIVNFVVMNNKTSAGETFEDLMKDGVFEARFPLHKGEGRLKKTWARWRHMFREQPVDEIRNYFGEKVALYFVWLGWYTYMLVPAALTGLLVFLSGFSLFEASQISKEICEAHDILMCPLGDHSRRYQRLSETCTFAKLTHLFDNDGTVVFAIFMALWATVFLEIWKRQRARVVLHWDLYVWDEEQEEMALQLINCPDYKLRPYQHSYLRSTVILVLTLLMICLMIGMAHVLVVYRVLASALFSSSAVPFLEEQVTTAVVVTGALVHYVTIIIMTKINRCVALKLCDFGAVAYA

SEQ ID NO: 492 - protein, 412 aa, Artificial Sequence
  Synthetic polypeptide
MSSQPAGNQTSPGATEDYSYGSWYIDEPQGGEELQPEGEVPSCHTSIPPGLYHACLASLSILVLLLLAMLVRRRQLWPDCVRGRPGLPSPVDFLAGDRPRAVPAAVFMVLLSSLCLLLPDEDALPFLTLASAPSQDGKTEAPRGAWKILGLFYYAALYYPLAACATAGHTAAHLLGSTLSWAHLGVQVWQRAECPQVPKIYKYYSLLASLPLLLGLGFLSLWYPVQLVRSFSRRTGAGSKGLQSSYSEEYLRNLLCRKKLGSRMAAVEDWLLLPRILVIKRDNYQLGTAGRPWPGLGHLGSCWPFSWAPWEGGGLPGLSGAVHHTPSFEDYRIPSPAEAGAFSYTDRDGHLPGGPAAAGGRGTHYPEGEGRGHHGCLLPAGRLWNRALRGQAGGGGAGEAPSVGSGSWRFQF

SEQ ID NO: 493 - protein, 411 aa, Artificial Sequence
  Synthetic polypeptide
MGGKGGGDTRGPVLFPCQLAQALSPRRAFPRELKEKGQRMSSQPAGNQTSPGATEDYSYGSWYIDEPQGGEELQPEGEVPSCHTSIPPGLYHACLASLSILVLLLLAMLVRRRQLWPDCVRGRPGLPSPVDFLAGDRPRAVPAAVFMVLLSSLCLLLPDEDALPFLTLASAPSQDGKTEAPRGAWKILGLFYYAALYYPLAACATAGHTAAHLLGSTLSWAHLGVQVWQRAECPQVPKIYKYYSLLASLPLLLGLGFLSLWYPVQLVRSFSRRTGAGSKGLQSSYSEEYLRNLLCRKKLGSSYHTSKHGFLSWARVCLRHCIYTPQPGFHLPLKLVLSATLTGTAIYQVALLLLVGVVPTIQKVRAGVTTDVSYLLAGFGIVLSEDKQEVVELVKHHLWALEVGASSSELP

SEQ ID NO: 494 - protein, 410 aa, Artificial Sequence
  Synthetic polypeptide
MECLYYFLGFLLLAARLPLDAAKRFHDVLGNERPSAYMREHNQLNGWSSDENDWNEKLYPVWKRGDMRWKNSWKGGRVQAVLTSDSPALVGSNITFAVNLIFPRCQKEDANGNIVYEKNCRNEAGLSADPYVYNWTAWSEDSDGENGTGQSHHNVFPDGKPFPHHPGWRRWNFIYVFHTLGQYFQKLGRCSVRVSVNTANVTLGPQLMEVTVYRRHGRAYVPIAQVKDVYVVTDQIPVFVTMFQKNDRNSSDETFLKDLPIMFDVLIHDPSHFLNYSTINYKWSFGDNTGLFVSTNHTVNHTYVLNGTFSLNLTVKAAAPGPCPPPPPPPRPSKPTPSLAKTWNEPKCPSMIDWIKKMWHIYTIEYYAVIKKDEFMSFVGTWMKLETIILSKLSQGQKTKRRMFSFTGGN

SEQ ID NO: 495 - protein, 410 aa, Artificial Sequence; identical to SEQ ID NO: 494
  Synthetic polypeptide

SEQ ID NO: 496 - protein, 409 aa, Artificial Sequence
  Synthetic polypeptide
MQIRLLRAELVVPLWQFIRQWPPGSDGWGQMEEKGQRMSSQPAGNQTSPGATEDYSYGSWYIDEPQGGEELQPEGEVPSCHTSIPPGLYHACLASLSILVLLLLAMLVRRRQLWPDCVRGRPGLPSPVDFLAGDRPRAVPAAVFMVLLSSLCLLLPDEDALPFLTLASAPSQDGKTEAPRGAWKILGLFYYAALYYPLAACATAGHTAAHLLGSTLSWAHLGVQVWQRAECPQVPKIYKYYSLLASLPLLLGLGFLSLWYPVQLVRSFSRRTGAGSKGLQSSYSEEYLRNLLCRKKLGSSYHTSKHGFLSWARVCLRHCIYTPQPGFHLPLKLVLSATLTGTAIYQVALLLLVGVVPTIQKVRAGVTTDVSYLLAGFGIVLSEDKQEVVELVKHHLWALEVGASSSELP

SEQ ID NO: 497 - protein, 409 aa, Artificial Sequence
  Synthetic polypeptide
MQPRRAQAPGAQLLPALALLLLLLGAGPRGSSLANPVPAAPLSAPGPCAAQPCRNGGVCTSRPEPDPQHPAPAGEPGYSCTCPAGISGANCQLVADPCASNPCHHGNCSSSSSSSSDGYLCICNEGYEGPNCEQALPSLPATGWTESMAPRQLQPVPATQEPDKILPRSQATVTLPTWQPKTGQKVVEMKWDQVEVIPDIACGNASSNSSAGGRLVSFEVPQNTSVKIRQDATASLILLWKVTATGFQQCSLIDGRSVTPLQASGGLVLLEEMLALGNNHFIGFVNDSVTKSIVALRLTLVVKVSTCVPGESHANDLECSGKGKCTTKPSEATFSCTCEEQYVGTFCEEYDACQRKPCQNNASCIDANEKQDGSNFTCVCLPGTWMELEAIILSKLTQEQKTKHHMFSL

SEQ ID NO: 498 - protein, 407 aa, Artificial Sequence
  Synthetic polypeptide
MARGAEGGRGDAGWGLRGALAAVALLSALNAAGTVFALCQWRGLSSALRALEAQRGREQREDSALRSFLAELSRAPRGASAPPQDPASSARNKRSHSGEPAPHIRAESHDMLMMMTYSMVPIRVMVDLCNSTKGICLTGPSGPPGPPGAGGLPGHNGLDGQPGPQGPKGEKGANGKRGKMGIPGAAGNPGERGEKGDHGELGLQGNEGPPGQKGEKGDKGDVSNDVLLAGAKGDQGPPGPPGPPGPPGPPGPPGSRRAKGPRQPSMFNGQCPGETCAIPNDDTLVGKADEKASEHHSPQAESMITSIGNPVQVLKVTETFGTWIRESANKSDDRIWVTEHFSGIMVKEFKDQPSLLNGSYTFIHLPYYFHGCGHVVYNNSLYYHKGGSNTLVRADTLRSIRVCRLNE

SEQ ID NO: 499 - protein, 406 aa, Artificial Sequence
  Synthetic polypeptide
MAPVAVWAALAVGLELWAAAHALPAQVAFTPYAPEPGSTCRLREYYDQTAQMCCSKCSPGQHAKVFCTKTSDTVCDSCEDSTYTQLWNWVPECLSCGSRCSSDQVETQACTREQNRICTCRPGWYCALSKQEGCRLCAPLRKCRPGFGVARPGTETSDVVCKPCAPGTFSNTTSSTDICRPHQICNVVAIPGNASMDAVCTSTSPTRSMAPGAVHLPQPVSTRSQHTQPTPEPSTAPSTSFLLPMGPSPPAEGSTGDFALPVGLIVGVTALGLLIIGVVNCVIMTQVKKKPLCLQREAKVPHLPADKARGTQGPEQQHLLITAPSSSSSSLESSASALDRRAPTRNQPQAPGVEASGAGEARASTGSSGLSDCMYRHCLLLSPTPGCGTPGEPGSSHSSLYLQAQH

SEQ ID NO: 500 - protein, 405 aa, Artificial Sequence
  Synthetic polypeptide
MDSLQDTVALDHGGCCPALSRLVPRGFGTEMWTLFALSGPLFLFQVLTFMIYIVSTVFCGHLGKVELASVTLAVAFVNVCGVSVGVGLSSACDTLMSQSFGSPNKKHVGVILQRGALVLLLCCLPCWALFLNTQHILLLFRQDPDVSRLTQDYVMIFIPGLPVIFLYNLLAKYLQNQKITWPQVLSGVVGNCVNGVANYALVSVLNLGVRGSAYANIISQFAQTVFLLLYIVLKKLHLETWAGWSSQCLQDWGPFFSLAVPSMLMICVEWWAYEIGSFLMGLLSVVDLSAQAVIYEVATVTYMRHSHRLAYAAHVTRIPLGLSIGVCVRVGMALGAADTVQAKRSAVSGVLSIVGISLVLGTLISILKNQLGHIFTNDEDVIALVSQVLPVYSVFHVFEAICALG

SEQ ID NO: 501 - protein, 405 aa, Artificial Sequence
  Synthetic polypeptide
MSGGRFDFDDGGAYCGGWEGGKAHGHGLCTGPKGQGEYSGSWNFGFEVAGVYTWPSGNTFEGYWSQGKRHGLGIETKGRWLYKGEWTHGFKGRYGIRQSSSSGAKYEGTWNNGLQDGYGTETYADGGTYQGQFTNGMRHGYGVRQSVPYGMAVVVRSPLRTSLSSLRSEHSNGTVAPDSPASPASDGPALPSPAIPRGGFALSLLANAEAAARAPKGGGLFQRGALLGKLRRAESRTSVGSQRSRVSFLKSDLSSGASDAASTASLGEAAEGADEAAPFEADIDATTTETYMGEWKNDKRSGFGVSERSSGLRYEGEWLDNLRHGYGCTTLPDGHREEGKYRHNVLVKDTKRRMLQLKSNKVRQKVEHSVEGAQRAAAIARQKAEIAASRWAVGSPEPACAQRKS

SEQ ID NO: 502 - protein, 404 aa, Artificial Sequence
  Synthetic polypeptide
MDPDSDQPLNSLVKVILDKYYFLCGQPLHFIPRKQLCDGELDCPLGEDEEHCVKSFPEGPAVAVRLSKDRSTLQVLDSATGNWFSACFDNFTEALAETACRQMGYSSKPTFRAVEIGPDQDLDVVEITENSQELRMRNSSGPCLSGSLVSLHCLACGKSLKTPRVVGVEEASVDSWPWQVSIQYDKQHVCGGSILDPHWVLTAAHCFRKHTDVFNWKVRAGSDKLGSFPSLAVAKIIIIEFNPMYPKDNDIALMKLQFPLTFSGTVRPICLPFFDEELTPATPLWIIGWGFTKQNGGKMSDILLQASVQVIDSTRCNADDAYQGEVTEKMMCAGIPEGGVDTCQDRTIQRSCNSPGTGLVIQQPAVPLMELRSARHTHRLTTCVCFLSFPALQPLSPLCPFPWD

SEQ ID NO: 503 - protein, 404 aa, Artificial Sequence
  Synthetic polypeptide
MAAGVAAWLPFARAAAIGWMPVASGPMPAPPRQERKRTQDALIVLNVSGTRFQTWQDTLERYPDTLLGSSERDFFYHPETQQYFFDRDPDIFRHILNFYRTGKLHYPRHECISAYDEELAFFGLIPEIIGDCCYEEYKDRRRENAERLQDDADTDTAGESALPTMTARQRVWRAFENPHTSTMALVFYYVTGFFIAVSVIANVVETVPCGSSPGHIKELPCGERYAVAFFCLDTACVMIFTVEYLLRLAAAPSRYRFVRSVMSIIDVVAILPYYIGLVMTDNEDVSGAFVTLRVFRVFRIFKFSRHSQGLRILGYTLKSCASELGFLLFSLTMAIIIFATVMFYAEKGSSASKFTSIPAAFWYTIVTMTTLGCQHHTLGLLSLQNCEQNKLLFFISYPVCDTLL

SEQ ID NO: 504 - protein, 404 aa, Artificial Sequence
  Synthetic polypeptide
MSLNSSLSCRKELSNLTEEEGGEGGVIITQFIAIIVITIFVCLGNLVIVVTLYKKSYLLTLSNKFVFSLTLSNFLLSVLVLPFVVTSSIRREWIFGVVWCNFSALLYLLISSASMLTLGVIAIDRYYAVLYPMVYPMKITGNRAVMALVYIWLHSLIGCLPPLFGWSSVEFDEFKWMCVAAWHREPGYTAFWQIWCALFPFLVMLVCYGFIFRVARVKARKVHCGTVVIVEEDAQRTGRKNSSTSTSSSGSRRNAFQGVVYSANQCKALITILVVLGAFMVTWGPYMVVIASEALWGKSSVSPSLETWATWLSFASAVCHPLIYGLWNKTVRKELLGMCFGDRYYREPFVQRQRTSRLFSISNRITDLGLSPHLTALMAGGQPLGHSSSTGDTGFSCSQDSGQL

SEQ ID NO: 505 - protein, 404 aa, Artificial Sequence; identical to SEQ ID NO: 504
  Synthetic polypeptide

SEQ ID NO: 506 - protein, 404 aa, Artificial Sequence; identical to SEQ ID NO: 504
  Synthetic polypeptide

SEQ ID NO: 507 - protein, 404 aa, Artificial Sequence; identical to SEQ ID NO: 504
  Synthetic polypeptide

SEQ ID NO: 508 - protein, 404 aa, Artificial Sequence
  Synthetic polypeptide
MDSQGDWAAQEKGQRMSSQPAGNQTSPGATEDYSYGSWYIDEPQGGEELQPEGEVPSCHTSIPPGLYHACLASLSILVLLLLAMLVRRRQLWPDCVRGRPGLPSPVDFLAGDRPRAVPAAVFMVLLSSLCLLLPDEDALPFLTLASAPSQDGKTEAPRGAWKILGLFYYAALYYPLAACATAGHTAAHLLGSTLSWAHLGVQVWQRAECPQVPKIYKYYSLLASLPLLLGLGFLSLWYPVQLVRSFSRRTGAGSKGLQSSYSEEYLRNLLCRKKLGSSYHTSKHGFLSWARVCLRHCIYTPQPGFHLPLKLVLSATLTGTAIYQVALLLLVGVVPTIQKVRAGVTTDVSYLLAGFGIVLSEDKQEVVELVKHHLWALEAAWLSGRSPLSEPQLPLQPSGNSSSV

SEQ ID NO: 509 - protein, 403 aa, Artificial Sequence
  Synthetic polypeptide
MDSQGDWAAQEKGQRMSSQPAGNQTSPGATEDYSYGSWYIDEPQGGEELQPEGEVPSCHTSIPPGLYHACLASLSILVLLLLAMLVRRRQLWPDCVRGRPGLPSPVDFLAGDRPRAVPAAVFMVLLSSLCLLLPDEDALPFLTLASAPSQDGKTEAPRGAWKILGLFYYAALYYPLAACATAGHTAAHLLGSTLSWAHLGVQVWQRAECPQVPKIYKYYSLLASLPLLLGLGFLSLWYPVQLVRSFSRRTGAGSKGLQSSYSEEYLRNLLCRKKLGSSYHTSKHGFLSWARVCLRHCIYTPQPGFHLPLKLVLSATLTGTAIYQVALLLLVGVVPTIQKVRAGVTTDVSYLLAGFGIVLSEDKQEVVELVKHHLWALEAWLSGRSPLSEPQLPLQPSGNSSSV

SEQ ID NO: 510 - protein, 403 aa, Artificial Sequence
  Synthetic polypeptide
MIPTFTALLCLGLSLGPRTHMQAGPLPKPTLWAEPGSVISWGNSVTIWCQGTLEAREYRLDKEESPAPWDRQNPLEPKNKARFSIPSMTEDYAGRYRCYYRSPVGWSQPSDPLELVMTGAYSKPTLSALPSPLVTSGKSVTLLCQSRSPMDTFLLIKERAAHPLLHLRSEHGAQQHQAEFPMSPVTSVHGGTYRCFSSHGFSHYLLSHPSDPLELIVSGSLEDPRPSPTRSVSTAAGPEDQPLMPTGSVPHSGLRRHWEVLIGVLVVSILLLSLLLFLLLQHWRQGKHRTLAQRQADFQRPPGAAEPEPKDGGLQRRSSPAADVQGENFSGAAVKNTQPEDGVEMDTRHRHGGPLLVQHAASCLLGPHSLLLSWDLMGLLPGPLPAPHPLFGHLVVRELPRPQ

SEQ ID NO: 511 - protein, 402 aa, Artificial Sequence
  Synthetic polypeptide
MSTQRLRNEDYHDYSSTDVSPEESPSEGLNNLSSPGSYQRFGQSNSTTWFQTLIHLLKGNIGTGLLGLPLAVKNAGIVMGPISLLIIGIVAVHCMGILVKCAHHFCRRLNKSFVDYGDTVMYGLESSPCSWLRNHAHWGRRVVDFFLIVTQLGFCCVYFVFLADNFKQVIEAANGTTNNCHNNETVILTPTMDSRLYMLSFLPFLVLLVFIRNLRALSIFSLLANITMLVSLVMIYQFIVQRIPDPSHLPLVAPWKTYPLFFGTAIFSFEGIGMVLPLENKMKDPRKFPLILYLGMVIVTILYISLGCLGYLQFGANIQGSITLNLPNCWLYQSVKLLYSIGIFFTYALQFYVPAEIIIPFFVSRAPEHCELVVDLFVRTVLVCLTCNHIHALGFEGHLPIL

SEQ ID NO: 512 - protein, 402 aa, Artificial Sequence; identical to SEQ ID NO: 511
  Synthetic polypeptide

SEQ ID NO: 513 - protein, 402 aa, Artificial Sequence; identical to SEQ ID NO: 511
  Synthetic polypeptide

SEQ ID NO: 514 - protein, 402 aa, Artificial Sequence
  Synthetic polypeptide
MLGKLAMLLWVQQALLALLLPTLLAQGEARRSRNTTRPALLRLSDYLLTNYRKGVRPVRDWRKPTTVSIDVIVYAILNVDEKNQVLTTYIWYRQYWTDEFLQWNPEDFDNITKLSIPTDSIWVPDILINEFVDVGKSPNIPYVYIRHQGEVQNYKPLQVVTACSLDIYNFPFDVQNCSLTFTSWLHTIQDINISLWRLPEKVKSDRSVFMNQGEWELLGVLPYFREFSMESSNYYAEMKFYVVIRRRPLFYVVSLLLPSIFLMVMDIVGFYLPPNSGERVSFKITLLLGYSVFLIIVSDTLPATAIGTPLIGVYFVVCMALLVISLAETIFIVRLVHKQDLQQPVPAWLRHLVLERIAWLLCLREQSTSQRPPATSQATKTDDCSVGWAWSCTPVVLATSGG

SEQ ID NO: 515 - protein, 402 aa, Artificial Sequence
  Synthetic polypeptide
MIPTFTALLCLGLSLGPRTHMQAGPLPKPTLWAEPGSVISWGNSVTIWCQGTLEAREYRLDKEESPAPWDRQNPLEPKNKARFSIPSMTEDYAGRYRCYYRSPVGWSQPSDPLELVMTGAYSKPTLSALPSPLVTSGKSVTLLCQSRSPMDTFLLIKERAAHPLLHLRSEHGAQQHQAEFPMSPVTSVHGGTYRCFSSHGFSHYLLSHPSDPLELIVSGSLEDPRPSPTRSVSTAAGPEDQPLMPTGSVPHSGLRRHWEVLIGVLVVSILLLSLLLFLLLQHWRQGKHRTLAQRQADFQRPPGAAEPEPKDGGLQRRSSPAADVQGENFCAAVKNTQPEDGVEMDTRHRHGGPLLVQHAASCLLGPHSLLLSWDLMGLLPGPLPAPHPLFGHLVVRELPRPQ

SEQ ID NO: 516 - protein, 402 aa, Artificial Sequence; identical to SEQ ID NO: 515
  Synthetic polypeptide

SEQ ID NO: 517 - protein, 402 aa, Artificial Sequence; identical to SEQ ID NO: 515
  Synthetic polypeptide

SEQ ID NO: 518 - protein, 402 aa, Artificial Sequence; identical to SEQ ID NO: 515
  Synthetic polypeptide

SEQ ID NO: 519 - protein, 401 aa, Artificial Sequence
  Synthetic polypeptide
MIPTFTALLCLGLSLGPRTHMQAGPLPKPTLWAEPGSVISWGNSVTIWCQGTLEAREYRLDKEESPAPWDRQNPLEPKNKARFSIPSMTEDYAGRYRCYYRSPVGWSQPSDPLELVMTGAYSKPTLSALPSPLVTSGKSVTLLCQSRSPMDTFLLIKERAAHPLLHLRSEHGAQQHQAEFPMSPVTSVHGGTYRCFSSHGFSHYLLSHPSDPLELIVSGSLEDPRPSPTRSVSTAGPEDQPLMPTGSVPHSGLRRHWEVLIGVLVVSILLLSLLLFLLLQHWRQGKHRTLAQRQADFQRPPGAAEPEPKDGGLQRRSSPAADVQGENFCAAVKNTQPEDGVEMDTRHRHGGPLLVQHAASCLLGPHSLLLSWDLMGLLPGPLPAPHPLFGHLVVRELPRPQ

SEQ ID NO: 520 - protein, 401 aa, Artificial Sequence
  Synthetic polypeptide
MKPGPPHRAGAAHGAGAGAGAAAGPGARGLLLPPLLLLLLAGRAAGAQRWRSENFERPVDLEGSGDDDSFPDDELDDLYSGSGSGYFEQESGIETAMRFSPDVALAVSTTPAVLPTTNIQPVGTPFEELPSERPTLEPATSPLVVTEVPEEPSQRATTVSTTMATTAATSTGDPTVATVPATVATATPSTPAAPPFTATTAVIRTTGVRRLLPLPLTTVATARATTPEAPSPPTTAAVLDTEAPTPRLVSTATSRPRALPRPATTQEPDIPERSTLPLGTTAPGPTEVAQTPTPETFLTTIRDEPEVPVSGGPSGDFELPEEETTQPDTANEVVAVGGAAAKASSPPGTLPKGARPGPGLLDNAIDSGSSAAQLPQKSILERKEVLVAWRSRKSMVLKSSR

SEQ ID NO: 521 - protein, 398 aa, Artificial Sequence
  Synthetic polypeptide
MDPDSDQPLNSLVKVILDKYYFLCGQPLHFIPRKQLCDGELDCPLGEDEEHCVKSFPEGPAVAVRLSKDRSTLQVLDSATGNWFSACFDNFTEALAETACRQMGYSSKPTFRAVEIGPDQDLDVVEITENSQELRMRNSSGPCLSGSLVSLHCLACGKSLKTPRVVGVEEASVDSWPWQVSIQYDKQHVCGGSILDPHWVLTAAHCFRKHTDVFNWKVRAGSDKLGSFPSLAVAKIIIIEFNPMYPKDNDIALMKLQFPLTFSGTVRPICLPFFDEELTPATPLWIIGWGFTKQNGGKMSDILLQASVQVIDSTRCNADDAYQGEVTEKMMCAGIPEGGVDTCQGDSGGPLMYQSDQWHVVGIVSWGYGCGGPSTPGVYTKVSAYLNWIYNVWKGQVL

SEQ ID NO: 522 - protein, 397 aa, Artificial Sequence
  Synthetic polypeptide
MTTSHQPQDRYKAVWLIFFMLGLGTLLPWNFFMTATQYFTNRLDMSQNVSLVTAELSKDAQASAAPAAPLPERNSLSAIFNNVMTLCAMLPLLLFTYLNSFLHQRIPQSVRILGSLVAILLVFLITAILVKVQLDALPFFVITMIKIVLINSFGAILQGSLFGLAGLLPASYTAPIMSGQGLAGFFASVAMICAIASGSELSESAFGYFITACAVIILTIICYLGLPRLEFYRYYQQLKLEGPGEQETKLDLISKGEEPRAGKEESGVSVSNSQPTNESHSIKAILKNISVLAFSVCFIFTITIGMFPAVTVEVKSSIAGSSTWERYFIPVSCFLTFNIFDWLGRSLTAVFMWVLAGALKQEIRDTRIRRGETKLSLFSDDMVVPIKHQNFYSQIKN

SEQ ID NO: 523 - protein, 397 aa, Artificial Sequence; identical to SEQ ID NO: 522
  Synthetic polypeptide

SEQ ID NO: 524 - protein, 397 aa, Artificial Sequence; identical to SEQ ID NO: 522
  Synthetic polypeptide

SEQ ID NO: 525 - protein, 397 aa, Artificial Sequence; identical to SEQ ID NO: 522
  Synthetic polypeptide

SEQ ID NO: 526 - protein, 397 aa, Artificial Sequence; identical to SEQ ID NO: 522
  Synthetic polypeptide

SEQ ID NO: 527 - protein, 397 aa, Artificial Sequence; identical to SEQ ID NO: 522
  Synthetic polypeptide

SEQ ID NO: 528 - protein, 397 aa, Artificial Sequence; identical to SEQ ID NO: 522
  Synthetic polypeptide

SEQ ID NO: 529 - protein, 397 aa, Artificial Sequence; identical to SEQ ID NO: 522
  Synthetic polypeptide

SEQ ID NO: 530 - protein, 397 aa, Artificial Sequence; identical to SEQ ID NO: 522
  Synthetic polypeptide

SEQ ID NO: 531 - protein, 396 aa, Artificial Sequence
  Synthetic polypeptide
MLLWVQQALLALLLPTLLAQGEARRSRNTTRPALLRLSDYLLTNYRKGVRPVRDWRKPTTVSIDVIVYAILNVDEKNQVLTTYIWYRQYWTDEFLQWNPEDFDNITKLSIPTDSIWVPDILINEFVDVGKSPNIPYVYIRHQGEVQNYKPLQVVTACSLDIYNFPFDVQNCSLTFTSWLHTIQDINISLWRLPEKVKSDRSVFMNQGEWELLGVLPYFREFSMESSNYYAEMKFYVVIRRRPLFYVVSLLLPSIFLMVMDIVGFYLPPNSGERVSFKITLLLGYSVFLIIVSDTLPATAIGTPLIGVYFVVCMALLVISLAETIFIVRLVHKQDLQQPVPAWLRHLVLERIAWLLCLREQSTSQRPPATSQATKTDDCSVGWAWSCTPVVLATSGG

SEQ ID NO: 532 - protein, 396 aa, Artificial Sequence
  Synthetic polypeptide
MVFVGFGFLMVFLQRYGFSSVGFTFLLAAFALQWSTLVQGFLHSFHGGHIHVGVESMINADFCAGAVLISFGAVLGKTGPTQLLLMALLEVVLFGINEFVLLHLLGVRVWGGMESGVGGGQGQPLSQERGGGGGVLPLTPPPQVRDAGGSMTIHTFGAYFGLVLSRVLYRPQLEKSKHRQGSVYHSDLFAMIGTIFLWIFWPSFNAALTALGAGQHRTALNTYYSLAASTLGTFALSALVGEDGRLDMVHIQNAALAGGVVVGTSSEMMLTPFGALAAGFLAGTVSTLGYKFFTPILESKFKVQDTCGVHNLHGMPGVLGALLGVLVAGLATHEAYGDGLESVFPLIAEGQRSATSQAMHQLFGLFVTLMFASVGGGLGGIILALQGCCDYSGKQD

SEQ ID NO: 533 - protein, 394 aa, Artificial Sequence
  Synthetic polypeptide
MENDPSRRRESISLTPVAKGLENMGADFLESLEEGQLPRSDLSPAEIRSSWSEAAPKPFSRWRNLQPALRARSFCREHMQLFRWIGTGLLCTGLSAFLLVACLLDFQRALALFVLTCVVLTFLGHRLLKRLLGPKLRRFLKPQGHPRLLLWFKRGLALAAFLGLVLWLSLDTSQRPEQLVSFAGICVFVALLFACSKHHCAVSWRAVSWGLGLQFVLGLLVIRTEPGFIAFEWLGEQIRIFLSYTKAGSSFVFGEALVKDVFAFQVLPIIVFFSCVISVLYHVGLMQWVILKIAWLMQVTMGTTATETLSVAGNIFVSQTEAPLLIRPYLADMTLSEVHVVMTGGYATIAGSLLGAYISFGHFGRPRRVDHLRSGVQDQPGQHGETLSLQKYKN

SEQ ID NO: 534 - protein, 394 aa, Artificial Sequence; identical to SEQ ID NO: 533
  Synthetic polypeptide

SEQ ID NO: 535 - protein, 394 aa, Artificial Sequence; identical to SEQ ID NO: 533
  Synthetic polypeptide

SEQ ID NO: 536 - protein, 394 aa, Artificial Sequence; identical to SEQ ID NO: 533
  Synthetic polypeptide

SEQ ID NO: 537 - protein, 394 aa, Artificial Sequence; identical to SEQ ID NO: 533
  Synthetic polypeptide

SEQ ID NO: 538 - protein, 393 aa, Artificial Sequence
  Synthetic polypeptide
MDRGTLPLAVALLLASCSLSPTSLAETVHCDLQPVGPERGEVTYTTSQVSKGCVAQAPNAILEVHVLFLEFPTGPSQLELTLQASKQNGTWPREVLLVLSVNSSVFLHLQALGIPLHLAYNSSLVTFQEPPGVNTTELPSFPKTQILEWAAERGPITSAAELNDPQSILLRLGQAQGSLSFCMLEASQDMGRTLEWRPRTPALVRGCHLEGVAGHKEAHILRVLPGHSAGPRTVTVKVELSCAPGDLDAVLILQGPPYVSWLIDANHNMQIWTTGEYSFKIFPEKNIRGFKLPDTPQGLLGEARMLNASIVASFVELPLASIVSLHASSCGGRLQTSPAPIQTTPPKDTCSPELLMSLIQTKCADDAMTLVLKKELVAPEVMGHTCSPSYLGG

SEQ ID NO: 539 - protein, 393 aa, Artificial Sequence; identical to SEQ ID NO: 538
  Synthetic polypeptide

SEQ ID NO: 540 - protein, 393 aa, Artificial Sequence
  Synthetic polypeptide
MAKATSGAAGLRLLLLLLLPLLGKVALGLYFSRDAYWEKLYVDQAAGTPLLYVHALRDAPEEVPSFRLGQHLYGTYRTRLHENNWICIQEDTGLLYLNRSLDHSSWEKLSVRNRGFPLLTVYLKVFLSPTSLREGECQWPGCARVYFSFFNTSFPACSSLKPRELCFPETRPSFRIRENRPPGTFHQFRLLPVQFLCPNISVAYRLLEGEGLPFRCAPDSLEVSTRWALDREQREKYELVAVCTVHAGAREEVVMVPFPVTVYDEDDSAPTFPAGVDTASAVVEFKRKEDTVVATLRVFDADVVPASGELVRRYTSTLLPGDTWAQQTFRVEHWPNETSVQANGSFVRATVHDYRHLSAAALLPASLRHLLQISPGIAFQINHLHLGSVSGGT

SEQ ID NO: 541 - protein, 393 aa, Artificial Sequence; identical to SEQ ID NO: 540
  Synthetic polypeptide

SEQ ID NO: 542 - protein, 392 aa, Artificial Sequence
  Synthetic polypeptide
MAESRGRLYLWMCLAAALASFLMGFMVGWFIKPLKETTTSVRYHQSIRWKLVSEMKAENIKSFLRSFTKLPHLAGTEQNFLLAKKIQTQWKKFGLDSAKLVHYDVLLSYPNETNANYISIVDEHETEIFKTSYLEPPPDGYENVTNIVPPYNAFSAQGMPEGDLVYVNYARTEDFFKLEREMGINCTGKIVIARYGKIFRGNKVKNAMLAGAIGIILYSDPADYFAPEVQPYPKGWNLPGTAAQRGNVLNLNGAGDPLTPGYPAKDRYVILGGHRDSWVFGAIDPTSGVAVLQEIARSFGKLMSKGWRPRRTIIFASWDAEEFGLLGSTEWAEVCNFTREASETTNPPGGRNNSRWAALRVTLTVKVCSFTSEPARPQTHQKEETLNTSEHQ

SEQ ID NO: 543 - protein, 391 aa, Artificial Sequence
  Synthetic polypeptide
MDQTKFPIVNAELSFFGHAHLGTGDPYTPGFPSFNHTQFPPSRSSGLPNIPVQTISRAAAEKLFGNMEGDCPSDWKTDSTCRMVTSESKNVKLTVSNVLKEIKILNIFGVIKGFVEPDHYVVVGAQRDAWGPGAAKSGVGTALLLKLAQMFSDMVLKDGFQPSRSIIFASWSAGDFGSVGATEWLEGYLSSLHLKAFTYINLDKAVLGTSNFKVSASPLLYTLIEKTMQNVKHPVTGQFLYQDSNWASKVEKLTLDNAAFPFLAYSGIPAVSFCFCEDTDYPYLGTTMDTYKELIERIPELNKVARAAAEVAGQFVIKLTHDVELNLDYERYNSQLLSFVRDLNQYRADIKEMGLSLQWLYSARGGCSELRSRHCTPAWATRAKLCLNNNK

SEQ ID NO: 544 - protein, 390 aa, Artificial Sequence
  Synthetic polypeptide
MGGRVFLVFLAFCVWLTLPGAETQDSRGCARWCPQDSSCVNATACRCNPGFSSFSEIITTPMETCDDINECATLSKVSCGKFSDCWNTEGSYDCVCSPGYEPVSGAKTFKNESENTCQDVDECQQNPRLCKSYGTCVNTLGSYTCQCLPGFKLKPEDPKLCTDVNECTSGQNPCHSSTHCLNNVGSYQCRCRPGWQPIPGSPNGPNNTVCEDVDECSSGQHQCDSSTVCFNTVGSYSCRCRPGWKPRHGIPNNQKDTVCEDMTFSTWTPPPGVHSQTLSRFFDKVQDLGRDYKPGLANNTIQSILQALDELLEAPGDLETLPRLQQHCVASHLLDGLEDVLRGLSKNLSNGLLNFSYPAGTDRCDGTTVAPASWEAEVRGSLEPRRLSLQ

SEQ ID NO: 545 - protein, 390 aa, Artificial Sequence; identical to SEQ ID NO: 544
  Synthetic polypeptide

SEQ ID NO: 546 - protein, 390 aa, Artificial Sequence; identical to SEQ ID NO: 544
  Synthetic polypeptide

SEQ ID NO: 547 - protein, 390 aa, Artificial Sequence; identical to SEQ ID NO: 544
  Synthetic polypeptide

SEQ ID NO: 548 - protein, 390 aa, Artificial Sequence; identical to SEQ ID NO: 544
  Synthetic polypeptide

SEQ ID NO: 549 - protein, 390 aa, Artificial Sequence
  Synthetic polypeptide
MLLPLLLSSLLGGSQAMDGRFWIRVQESVMVPEGLCISVPCSFSYPRQDWTGSTPAYGYWFKAVTETTKGAPVATNHQSREVEMSTRGRFQLTGDPAKGNCSLVIRDAQMQDESQYFFRVERGSYVRYNFMNDGFFLKVTVLSFTPRPQDHNTDLTCHVDFSRKGVSAQRTVRLRVAYAPRDLVISISRDNTPDPPENLRVMVSQANRTVLENLGNGTSLPVLEGQSLCLVCVTHSSPPARLSWTQRGQVLSPSQPSDPGVLELPRVQVEHEGEFTCHARHPLGSQHVSLSLSVHYKKGLISTAFSNGAFLGIGITALLFLCLALIIMKILPKRRTQTETPRPRFSRHSTILDYINVVPTAGPLAQKRNQKATPNSPRTPLPPGHSGSRL

SEQ ID NO: 550 - protein, 389 aa, Artificial Sequence
  Synthetic polypeptide
MSSQPAGNQTSPGATEDYSYGSWYIDEPQGGEELQPEGEVPSCHTSIPPGLYHACLASLSILVLLLLAMLVRRRQLWPDCVRGRPGLPSPVDFLAGDRPRAVPAAVFMVLLSSLCLLLPDEDALPFLTLASAPSQDGKTEAPRGAWKILGLFYYAALYYPLAACATAGHTAAHLLGSTLSWAHLGVQVWQRAECPQVPKIYKYYSLLASLPLLLGLGFLSLWYPVQLVRSFSRRTGAGSKGLQSSYSEEYLRNLLCRKKLGSSYHTSKHGFLSWARVCLRHCIYTPQPGFHLPLKLVLSATLTGTAIYQVALLLLVGVVPTIQKVRAGVTTDVSYLLAGFGIVLSEDKQEVVELVKHHLWALEAAWLSGRSPLSEPQLPLQPSGNSSSV

SEQ ID NO: 551 - protein, 389 aa, Artificial Sequence; identical to SEQ ID NO: 550
  Synthetic polypeptide

SEQ ID NO: 552 - protein, 389 aa, Artificial Sequence; identical to SEQ ID NO: 550
  Synthetic polypeptide

SEQ ID NO: 553 - protein, 388 aa, Artificial Sequence
  Synthetic polypeptide
MSSQPAGNQTSPGATEDYSYGSWYIDEPQGGEELQPEGEVPSCHTSIPPGLYHACLASLSILVLLLLAMLVRRRQLWPDCVRGRPGLPSPVDFLAGDRPRAVPAAVFMVLLSSLCLLLPDEDALPFLTLASAPSQDGKTEAPRGAWKILGLFYYAALYYPLAACATAGHTAAHLLGSTLSWAHLGVQVWQRAECPQVPKIYKYYSLLASLPLLLGLGFLSLWYPVQLVRSFSRRTGAGSKGLQSSYSEEYLRNLLCRKKLGSSYHTSKHGFLSWARVCLRHCIYTPQPGFHLPLKLVLSATLTGTAIYQVALLLLVGVVPTIQKVRAGVTTDVSYLLAGFGIVLSEDKQEVVELVKHHLWALEAWLSGRSPLSEPQLPLQPSGNSSSV

SEQ ID NO: 554 - protein, 388 aa, Artificial Sequence; identical to SEQ ID NO: 553
  Synthetic polypeptide

SEQ ID NO: 555 - protein, 388 aa, Artificial Sequence; identical to SEQ ID NO: 553
  Synthetic polypeptide

SEQ ID NO: 556 - protein, 387 aa, Artificial Sequence
  Synthetic polypeptide
MILQAHLHSLCLLMLYLATGYGQEGKFSGPLKPMTFSIYEGQEPSQIIFQFKANPPAVTFELTGETDNIFVIEREGLLYYNRALDRETRSTHNLQVAALDANGIIVEGPVPITIKVKDINDNRPTFLQSKYEGSVRQNSRPGNSIGTLTAHDRDEENTANSFLNYRIVEQTPKLPMDGLFLIQTYAGMLQLAKQSLKKQDTPQYNLTIEVSDKDFKTLCFVQINVIDINDQIPIFEKSDYGNLTLAEDTNIGSTILTIQATDADEPFTGSSKILYHIIKGDSEGRLGVDTDPHTNTGYVIIKKPLDFETAAVSNIVFKAENPEPLVFGVKYNASSFAKFTLIVTDVNEAPQFSQHVFQAKVSEDVAIGTKVGNVTAKDPEGLDISTQ

SEQ ID NO: 557 - protein, 387 aa, Artificial Sequence
  Synthetic polypeptide
MDSQGDWAAQEKGQRMSSQPAGNQTSPGATEDYSYGSWYIDEPQGGEELQPEGEVPSCHTSIPPGLYHACLASLSILVLLLLAMLVRRRQLWPDCVRGRPGLPSPVDFLAGDRPRAVPAAVFMVLLSSLCLLLPDEDALPFLTLASAPSQDGKTEAPRGAWKILGLFYYAALYYPLAACATAGHTAAHLLGSTLSWAHLGVQVWQRAECPQVPKIYKYYSLLASLPLLLGLGFLSLWYPVQLVRSFSRRTGAGSKGLQSSYSEEYLRNLLCRKKLGSSYHTSKHGFLSWARVCLRHCIYTPQPGFHLPLKLVLSATLTGTAIYQVALLLLVGVVPTIQKVRAGVTTDVSYLLAGFGIVLSEDKQEVVELVKHHLWALEVGASSSELP

SEQ ID NO: 558 - protein, 386 aa, Artificial Sequence
  Synthetic polypeptide
MATKTELSPTARESKNAQDMQVDETLIPRKVPSLCSARYGIALVLHFCNFTTIAQNVIMNITMVAMVNSTSPQSQLNDSSEVLPVDSFGGLSKAPKSLPAKSSILGGQFAIWEKWGPPQERSRLCSIALSGMLLGCFTAILIGGFISETLGWPFVFYIFGGVGCVCCLLWFVVIYDDPVSYPWISTSEKEYIISSLKQQVGSSKQPLPIKAMLRSLPIWSICLGCFSHQWLVSTMVVYIPTYISSVYHVNIRDNGLLSALPFIVAWVIGMVGGYLADFLLTKKFRLITVRKIATILGSLPSSALIVSLPYLNSGYITATALLTLSCGLSTLCQSGIYINVLDIAPRYSSFLMGASRGFSSIAPVIVPTVSGFLLSQENGWCWRPLS

SEQ ID NO: 559 - protein, 386 aa, Artificial Sequence; identical to SEQ ID NO: 558
  Synthetic polypeptide

SEQ ID NO: 560 - protein, 385 aa, Artificial Sequence
  Synthetic polypeptide
MGALARALLLPLLAQWLLRAAPELAPAPFTLPLRVAAATNRVVAPTPGPGTPAERHADGLALALEPALASPAGAANFLAMVDNLQGDSGRGYYLEMLIGTPPQKLQILVDTGSSNFAVAGTPHSYIDTYFDTERSSTYRSKGFDVTVKYTQGSWTGFVGEDLVTIPKGFNTSFLVNIATIFESENFFLPGIKWNGILGLAYATLAKPSSSLETFFDSLVTQANIPNVFSMQMCGAGLPVAGSGTNGGSLVLGGIEPSLYKGDIWYTPIKEEWYYQIEILKLEIGGQSLNLDCREYNADKAIVDSGTTLLRLPQKVFDAVVEAVARASLIPEFSDGFWTGSQLACWTNSETPWSYFPKISIYLRDENSSRSFRITILPQSLTLFIS

SEQ ID NO: 561 - protein, 385 aa, Artificial Sequence; identical to SEQ ID NO: 560
  Synthetic polypeptide

SEQ ID NO: 562 - protein, 384 aa, Artificial Sequence
  Synthetic polypeptide
MGCSAKARWAAGALGVAGLLCAVLGAVMIVMVPSLIKQQVLKGAAVMMENKPMTLKLIMTLAFTTLGERAFMNRTVGEIMWGYKDPLVNLINKYFPGMFPFKDKFGLFAELNNSDSGLFTVFTGVQNISRIHLVDKWNGLSKVDFWHSDQCNMINGTSGQMWPPFMTPESSLEFYSPEACRSMKLMYKESGVFEGIPTYRFVAPKTLFANGSIYPPNEGFCPCLESGIQNVSTCRFSAPLFLSHPHFLNADPVLAEAVTGLHPNQEAHSLFLDIHPVTGIPMNCSVKLQLSLYMKSVAGIGQTGKIEPVVLPLLWFAESGAMEGETLHTFYTQLVLMPKVMHYAQYVLLALGCVLLLVPVICQIRSQARHGVSRLESQRFGRLR

SEQ ID NO: 563 - protein, 382 aa, Artificial Sequence
  Synthetic polypeptide
MVFVGFGFLMVFLQRYGFSSVGFTFLLAAFALQWSTLVQGFLHSFHGGHIHVGVESMINADFCAGAVLISFGAVLGKTGPTQLLLMALLEVVLFGINEFVLLHLLGVRVWGGMESGVGGGQGQPLSQERGGGGGVLPLTPPPQVRDAGGSMTIHTFGAYFGLVLSRVLYRPQLEKSKHRQGSVYHSDLFAMIGTIFLWIFWPSFNAALTALGAGQHRTALNTYYSLAASTLGTFALSALVGEDGRLDMVHIQNAALAGGVVVGTSSEMMLTPFGALAAGFLAGTVSTLGYKFFTPILESKFKVQDTCGVHNLHGMPGVLGALLGVLVAGLATHEAYGDGLESVFPLIAEGQRSATSQAMHQLFGLFVTLMFASVGGGLGGLL

SEQ ID NO: 564 - protein, 382 aa, Artificial Sequence
  Synthetic polypeptide
MVCFRLFPVPGSGLVLVCLVLGAVRSYALELNLTDSENATCLYAKWQMNFTVRYETTNKTYKTVTISDHGTVTYNGSICGDDQNGPKIAVQFGPGFSWIANFTKAASTYSIDSVSFSYNTGDNTTFPDAEDKGILTVDELLAIRIPLNDLFRCNSLSTLEKNDVVQHYWDVLVQAFVQNGTVSTNEFLCDKDKTSTVAPTIHTTVPSPTTTPTPKEKPEAGTYSVNNGNDTCLLATMGLQLNITQDKVASVININPNTTHSTGSCRSHTALLRLNSSTIKYLDFVFAVKNENRFYLKEVNISMYLVNGSVFSIANNNLSYWDAPLGSSYMCNKEQTVSVSGAFQINTFDLRVQPFNVTQGKYSTGHIWQPQLSGFLTEPRSK

SEQ ID NO: 565 - protein, 382 aa, Artificial Sequence; identical to SEQ ID NO: 564
  Synthetic polypeptide

SEQ ID NO: 566 - protein, 382 aa, Artificial Sequence; identical to SEQ ID NO: 564
  Synthetic polypeptide

SEQ ID NO: 567 - protein, 381 aa, Artificial Sequence
  Synthetic polypeptide
MSSQPAGNQTSPGATEDYSYGSWYIDEPQGGEELQPEGEVPSCHTSIPPGLYHACLASLSILVLLLLAMLVRRRQLWPDCVRGRPGLPSPVDFLAGDRPRAVPAAVFMVLLSSLCLLLPDEDALPFLTLASAPSQGAWKILGLFYYAALYYPLAACATAGHTAAHLLGSTLSWAHLGVQVWQRAECPQVPKIYKYYSLLASLPLLLGLGFLSLWYPVQLVRSFSRRTGAGSKGLQSSYSEEYLRNLLCRKKLGSSYHTSKHGFLSWARVCLRHCIYTPQPGFHLPLKLVLSATLTGTAIYQVALLLLVGVVPTIQKVRAGVTTDVSYLLAGFGIVLSEDKQEVVELVKHHLWALEAAWLSGRSPLSEPQLPLQPSGNSSSV

SEQ ID NO: 568 - protein, 381 aa, Artificial Sequence
  Synthetic polypeptide
MNTRPQHSERTSTMDRVYEIPEEPNVDPVSSLEEDVIRGANPRFTFPFSILFSTFLYCGEAASALYMVRIYRKNSETYWMTYTFSFFMFSSIMVQLTLIFVHRDLAKDKPLSLFMHLILLGPVIRCLEAMIKYLTLWKKEEQEEPYVSLTRKKMLIDGEEVLIEWEVGHSIRTLAMHRNAYKRMSQIQAFLGSVPQLTYQLYVSLISAEVPLGRVVLMVFSLVSVTYGATLCNMLAIQIKYDDYKIRLGPLEVLCITIWRTLEITSRLLILVLFSATLKLKAVPFLVLNFLIILFEPWIKFWRSGAQMPNNIEKNFSRVGTLVVLISVTILYAGINFSCWSALQLRLADRDLVDKGQNWGHMGLHYSVRSFVHGKSFCLEP

SEQ ID NO: 569 - protein, 381 aa, Artificial Sequence
  Synthetic polypeptide
MHRSFLQARRSRNTTRPALLRLSDYLLTNYRKGVRPVRDWRKPTTVSIDVIVYAILNVDEKNQVLTTYIWYRQYWTDEFLQWNPEDFDNITKLSIPTDSIWVPDILINEFVDVGKSPNIPYVYIRHQGEVQNYKPLQVVTACSLDIYNFPFDVQNCSLTFTSWLHTIQDINISLWRLPEKVKSDRSVFMNQGEWELLGVLPYFREFSMESSNYYAEMKFYVVIRRRPLFYVVSLLLPSIFLMVMDIVGFYLPPNSGERVSFKITLLLGYSVFLIIVSDTLPATAIGTPLIGVYFVVCMALLVISLAETIFIVRLVHKQDLQQPVPAWLRHLVLERIAWLLCLREQSTSQRPPATSQATKTDDCSVGWAWSCTPVVLATSGG

SEQ ID NO: 570 - protein, 380 aa, Artificial Sequence
  Synthetic polypeptide
MSSQPAGNQTSPGATEDYSYGSWYIDEPQGGEELQPEGEVPSCHTSIPPGLYHACLASLSILVLLLLAMLVRRRQLWPDCVRGRPGLPSPVDFLAGDRPRAVPAAVFMVLLSSLCLLLPDEDALPFLTLASAPSQGAWKILGLFYYAALYYPLAACATAGHTAAHLLGSTLSWAHLGVQVWQRAECPQVPKIYKYYSLLASLPLLLGLGFLSLWYPVQLVRSFSRRTGAGSKGLQSSYSEEYLRNLLCRKKLGSSYHTSKHGFLSWARVCLRHCIYTPQPGFHLPLKLVLSATLTGTAIYQVALLLLVGVVPTIQKVRAGVTTDVSYLLAGFGIVLSEDKQEVVELVKHHLWALEAWLSGRSPLSEPQLPLQPSGNSSSV

SEQ ID NO: 571 - protein, 380 aa, Artificial Sequence
  Synthetic polypeptide
MSSQPAGNQTSPGATEDYSYGSWYIDEPQGGEELQPEGEVPSCHTSIPPGLYHACLASLSILVLLLLAMLVRRRQLWPDCVRGRPGLPRPRAVPAAVFMVLLSSLCLLLPDEDALPFLTLASAPSQDGKTEAPRGAWKILGLFYYAALYYPLAACATAGHTAAHLLGSTLSWAHLGVQVWQRAECPQVPKIYKYYSLLASLPLLLGLGFLSLWYPVQLVRSFSRRTGAGSKGLQSSYSEEYLRNLLCRKKLGSSYHTSKHGFLSWARVCLRHCIYTPQPGFHLPLKLVLSATLTGTAIYQVALLLLVGVVPTIQKVRAGVTTDVSYLLAGFGIVLSEDKQEVVELVKHHLWALEAAWLSGRSPLSEPQLPLQPSGNSSSV

SEQ ID NO: 572 - protein, 380 aa, Artificial Sequence
  Synthetic polypeptide
MFDTTPHSGRSTPSSSPSLRKRLQLLPPSRPPPEPEPGTMVEKGSDSSSEKGGVPGTPSTQSLGSRNFIRNSKKMQSWYSMLSPTYKQRNEDFRKLFSKLPEAERLIVDYSCALQREILLQGRLYLSENWICFYSNIFRWETTISIQLKEVTCLKKEKTAKLIPNAIQICTESEKHFFTSFGARDRCFLLIFRLWQNALLEKTLSPRELWHLVHQCYGSELGLTSEDEDYVSPLQLNGLGTPKEVGDVIALSDITSSGAADRSQEPSPVGSRRGHVTPNLSRASSDADHGAEEDKEEQVDSQPDASSSQTVTPVAEPPSTEPTQPDGPTTLGPLDLLPSEELLTDTSNSSSSTGEEAWQGEHKHRLKAACRGSHPGHTTS

SEQ ID NO: 573 - protein, 379 aa, Artificial Sequence
  Synthetic polypeptide
MSSQPAGNQTSPGATEDYSYGSWYIDEPQGGEELQPEGEVPSCHTSIPPGLYHACLASLSILVLLLLAMLVRRRQLWPDCVRGRPGLPRPRAVPAAVFMVLLSSLCLLLPDEDALPFLTLASAPSQDGKTEAPRGAWKILGLFYYAALYYPLAACATAGHTAAHLLGSTLSWAHLGVQVWQRAECPQVPKIYKYYSLLASLPLLLGLGFLSLWYPVQLVRSFSRRTGAGSKGLQSSYSEEYLRNLLCRKKLGSSYHTSKHGFLSWARVCLRHCIYTPQPGFHLPLKLVLSATLTGTAIYQVALLLLVGVVPTIQKVRAGVTTDVSYLLAGFGIVLSEDKQEVVELVKHHLWALEAWLSGRSPLSEPQLPLQPSGNSSSV

SEQ ID NO: 574 - protein, 376 aa, Artificial Sequence
  Synthetic polypeptide
MVLSQEEPDSARGTSEAQPLGPAPTGAAPPPGPGPSDSPEAAVEKVEVELAGPATAEPHEPPEPPEGGWGWLVMLAAMWCNGSVFGIQNACGVLFVSMLETFGSKDDDKMVFKTAWVGSLSMGMIFFCCPIVSVFTDLFGCRKTAVVGAAVGFVGLMSSSFVSSIEPLYLTYGIIFACGCSFAYQPSLVILGHYFKKRLGLVNGIVTAGSSVFTILLPLLLRVLIDSVGLFYTLRVLCIFMFVLFLAGFTYRPLATSTKDKESGGSGSSLFSRKKFSPPKKIFNFAIFKVTAYAVWAVGIPLALFGYFVPYVHLMKHVNERFQDEKNKEVVLMCIGVTSGVGRLLFGRIADYVPGVKKVYLQRKKKGRKNKERKKK

SEQ ID NO: 575 - protein, 376 aa, Artificial Sequence
  Synthetic polypeptide
MAAGVAAWLPFARAAAIGWMPVASGPMPAPPRQERKRTQDALIVLNVSGTRFQTWQDTLERYPDTLLGSSERDFFYHPETQQYFFDRDPDIFRHILNFYRTGKLHYPRHECISAYDEELAFFGLIPEIIGDCCYEEYKDRRRENAERLQDDADTDTAGESALPTMTARQRVWRAFENPHTSTMALVFYYVTGFFIAVSVIANVVETVPCGSSPGHIKELPCGERYAVAFFCLDTACVMIFTVEYLLRLAAAPSRYRFVRSVMSIIDVVAILPYYIGLVMTDNEDVSGAFVTLRVFRVFRIFKFSRHSQGLRILGYTLKSCASELGFLLFSLTMAIIIFATVMFYAEKGSSASKFTSIPAAFWYTIVTMTTLGLGIE

SEQ ID NO: 576 - protein, 376 aa, Artificial Sequence
  Synthetic polypeptide
MRCALALSALLLLLSTPPLLPSSPSPSPSPSQNETATQTTTDSSNKTAPTPASSVTIMATDTAQQSTVPTSKANEILASVKATTLGVSSDSPGTTTLAQQVSGPVNTTVARGGGSGNPTTTIESPKSTKSADTTTVATSTATAKPNTTSSQNGAEDTTNSGGKSSHSVTTDLTSTKAEHLTTPHPTSPLSPRQPTSTHPVATPTSSGHDHLMKISSSSSTVAIPGYTFTSPGMTTTLLETVFHHVSQAGLELLTSGDLPTLASQSAGITASSVISQRTQQTSSQMPASSTAPSSQETVQPTSPATALRTPTLPETMSSSPTAASTTHRYPKTPSPTVAHESNWAKCEDLETQTQSEKQLVLNLTGNTLCMSQLKMR

SEQ ID NO: 577 - protein, 375 aa, Artificial Sequence
  Synthetic polypeptide
MPSYQGYILESAPVGATISDSLNLTSPLRIVALDKDIEDVPPSGVPTKDPELHLFLNDYTSVFTVTQTGITRYLTLLQPVDREEQQTYTFSITAFDGVQESEPVIVNIQVMDANDNTPTFPEISYDVYVYTDMRPGDSVIQLTAVDADEGSNGEITYEILVGAQGDFIINKTTGLITIAPGVEMIVGRTYALTVQAADNAPPAERRNSICTVYIEVLPPNNQSPPRFPQLMYSLEISEAMRVGAVLLNLQATDREGDSITYAIENGDPQRVFNLSETTGILTLGKALDRESTDRYILIITASDGRPDGTSTATVNIVVTDVNDNAPVFDPYLPRNLSVVEEEANAFVGQVKAHRRKELAVSEIRLRTSTVELMLK

SEQ ID NO: 578 - protein, 374 aa, Artificial Sequence
  Synthetic polypeptide
MRCALALSALLLLLSTPPLLPSSPSPSPSPSQNATQTTTDSSNKTAPTPASSVTIMATDTAQQSTVPTSKANEILASVKATTLGVSSDSPGTTTLAQQVSGPVNTTVARGGGSGNPTTTIESPKSTKSADTTTVATSTATAKPNTTSSQNGAEDTTNSGGKSSHSVTTDLTSTKAEHLTTPHPTSPLSPRQPTSTHPVATPTSSGHDHLMKISSSSSTVAIPGYTFTSPGMTTTLLETVFHHVSQAGLELLTSGDLPTLASQSAGITASSVISQRTQQTSSQMPASSTAPSSQETVQPTSPATALRTPTLPETMSSSPTAASTTHRYPKTPSPTVAHESNWAKCEDLETQTQSEKQLVLNLTGNTLCMSQLKMR

SEQ ID NO: 579 - protein, 373 aa, Artificial Sequence
  Synthetic polypeptide
MFDTTPHSGRSTPSSSPSLRKRLQLLPPSRPPPEPEPGTMVEKGSDSSSEKGGVPGTPSTQSLGSRNFIRNSKMLSPTYKQRNEDFRKLFSKLPEAERLIVDYSCALQREILLQGRLYLSENWICFYSNIFRWETTISIQLKEVTCLKKEKTAKLIPNAIQICTESEKHFFTSFGARDRCFLLIFRLWQNALLEKTLSPRELWHLVHQCYGSELGLTSEDEDYVSPLQLNGLGTPKEVGDVIALSDITSSGAADRSQEPSPVGSRRGHVTPNLSRASSDADHGAEEDKEEQVDSQPDASSSQTVTPVAEPPSTEPTQPDGPTTLGPLDLLPSEELLTDTSNSSSSTGEEAWQGEHKHRLKAACRGSHPGHTTS

SEQ ID NO: 580 - protein, 372 aa, Artificial Sequence
  Synthetic polypeptide
MSSQPAGNQTSPGATEDYSYGSWYIDEPQGGEELQPEGEVPSCHTSIPPGLYHACLASLSILVLLLLAMLVRRRQLWPDCVRGRPGLPSPVDFLAGDRPRAVPAAVFMVLLSSLCLLLPDEDALPFLTLASAPSQDGKTEAPRGAWKILGLFYYAALYYPLAACATAGHTAAHLLGSTLSWAHLGVQVWQRAECPQVPKIYKYYSLLASLPLLLGLGFLSLWYPVQLVRSFSRRTGAGSKGLQSSYSEEYLRNLLCRKKLGSSYHTSKHGFLSWARVCLRHCIYTPQPGFHLPLKLVLSATLTGTAIYQVALLLLVGVVPTIQKVRAGVTTDVSYLLAGFGIVLSEDKQEVVELVKHHLWALEVGASSSELP

SEQ ID NO: 581 - protein, 372 aa, Artificial Sequence; identical to SEQ ID NO: 580
  Synthetic polypeptide

SEQ ID NO: 582 - protein, 372 aa, Artificial Sequence; identical to SEQ ID NO: 580
  Synthetic polypeptide

SEQ ID NO: 583 - protein, 370 aa, Artificial Sequence
  Synthetic polypeptide
MHAALAGPLLAALLATARARPQPPDGGQCRPPGSQRDLNSFLWTIRRDPPAYLFGTIHVPYTRVWDFIPDNSKAAFQASTRVYFELDLTDPYTISALASCQLLPHGENLQDVLPHELYWRLKRHLDYVKLMMPSWMTPAQRGKGLYADYLFNAIAGNWERKRPVWVMLMVNSLTERDVRFRGVPVLDLYLAQQAEKMKKTTGAVEQVEEQCHPLNNGLNFSQVLFALNQTLLQQESVRAGSLQASYTTEDLIKHYNCGDLSAVIFNHDTSQLPNFINTTLPPHEQVTAQEIDSYFRQELIYKRNERMGKRVMALLRENEDKICFFAFGAGHFLGNNTVIDILRQAGLEVDHTPAGQAIHSTSTRPDMRGV

SEQ ID NO: 584 - protein, 368 aa, Artificial Sequence
  Synthetic polypeptide
MDRVYEIPEEPNVDPVSSLEEDVIRGANPRFTFPFSILFSTFLYCGEAASALYMVRIYRKNSETYWMTYTFSFFMFSSIMVQLTLIFVHRDLAKDKPLSLFMHLILLGPVIRCLEAMIKYLTLWKKEEQEEPYVSLTRKKMLIDGEEVLIEWEVGHSIRTLAMHRNAYKRMSQIQAFLGSVPQLTYQLYVSLISAEVPLGRVVLMVFSLVSVTYGATLCNMLAIQIKYDDYKIRLGPLEVLCITIWRTLEITSRLLILVLFSATLKLKAVPFLVLNFLIILFEPWIKFWRSGAQMPNNIEKNFSRVGTLVVLISVTILYAGINFSCWSALQLRLADRDLVDKGQNWGHMGLHYSVRSFVHGKSFCLEP

SEQ ID NO: 585 - protein, 365 aa, Artificial Sequence
  Synthetic polypeptide
MEPRPTAPSSGAPGLAGVGETPSAAALAAARVELPGTAVPSVPEDAAPASRDGGGVRDEGPAAAGDGLGRPLGPTPSQSRFQVDLVSENAGRAAAAAAAAAAAAAAAGAGAGAKQTPADGEASGESEPAKGSEEAKGRFRVNFVDPAASSSAEDSLSDAAGVGVDGPNVSFQNGGDTVLSEGSSLHSGGGGGSGHHQHYYYDTHTNTYYLRTFGHNTMDAVPRIDHYRHTAAQLGEKLLRPSLAELHDELEKEPFEDGFANGEESTPTRDAVVTYTAESKGVVKFGWIKGVLVRCMLNIWGVMLFIRLSWIVGQAGIGLSVLVIMMATVVTTITGLSTSAIATNGFVRGGNQEVDEICSSDNCST

SEQ ID NO: 586 - protein, 365 aa, Artificial Sequence; identical to SEQ ID NO: 585
  Synthetic polypeptide

SEQ ID NO: 587 - protein, 365 aa, Artificial Sequence; identical to SEQ ID NO: 585
  Synthetic polypeptide

SEQ ID NO: 588 - protein, 364 aa, Artificial Sequence
  Synthetic polypeptide
MSSQPAGNQTSPGATEDYSYGSWYIDEPQGGEELQPEGEVPSCHTSIPPGLYHACLASLSILVLLLLAMLVRRRQLWPDCVRGRPGLPSPVDFLAGDRPRAVPAAVFMVLLSSLCLLLPDEDALPFLTLASAPSQGAWKILGLFYYAALYYPLAACATAGHTAAHLLGSTLSWAHLGVQVWQRAECPQVPKIYKYYSLLASLPLLLGLGFLSLWYPVQLVRSFSRRTGAGSKGLQSSYSEEYLRNLLCRKKLGSSYHTSKHGFLSWARVCLRHCIYTPQPGFHLPLKLVLSATLTGTAIYQVALLLLVGVVPTIQKVRAGVTTDVSYLLAGFGIVLSEDKQEVVELVKHHLWALEVGASSSELP

SEQ ID NO: 589 - protein, 364 aa, Artificial Sequence
  Synthetic polypeptide
MGGSAPPDSSWRGSLKVPYNVGPGFTGNFSTQKVKMHIHSTNEVTRIYNVIGTLRGAVEPDRYVILGGHRDSWVFGGIDPQSGAAVVHEIVRSFGTLKKEGWRPRRTILFASWDAEEFGLLGSTEWAEENSRLLQERGVAYINADSSIEGNYTLRVDCTPLMYSLVHNLTKELKSPDEGFEGKSLYESWTKKSPSPEFSGMPRISKLGSGNDFEVFFQRLGIASGRARYTKNWETNKFSGYPLYHSVYETYELVEKFYDPMFKYHLTVAQVRGGMVFELANSIVLPFDCRDYAVVLRKYADKIYSISMKHPQEMKTYSVSFDSLFSAVKNFTEIASKFSERLQDFDKSKKKSQFWKRKAAWRKI

SEQ ID NO: 590 - protein, 363 aa, Artificial Sequence
  Synthetic polypeptide
MSSQPAGNQTSPGATEDYSYGSWYIDEPQGGEELQPEGEVPSCHTSIPPGLYHACLASLSILVLLLLAMLVRRRQLWPDCVRGRPGLPRPRAVPAAVFMVLLSSLCLLLPDEDALPFLTLASAPSQDGKTEAPRGAWKILGLFYYAALYYPLAACATAGHTAAHLLGSTLSWAHLGVQVWQRAECPQVPKIYKYYSLLASLPLLLGLGFLSLWYPVQLVRSFSRRTGAGSKGLQSSYSEEYLRNLLCRKKLGSSYHTSKHGFLSWARVCLRHCIYTPQPGFHLPLKLVLSATLTGTAIYQVALLLLVGVVPTIQKVRAGVTTDVSYLLAGFGIVLSEDKQEVVELVKHHLWALEVGASSSELP

SEQ ID NO: 591 - protein, 363 aa, Artificial Sequence
  Synthetic polypeptide
MQPRRAQAPGAQLLPALALLLLLLGAGPRGSSLANPVPAAPLSAPGPCAAQPCRNGGVCTSRPEPDPQHPAPAGEPGYSCTCPAGISGANCQLVADPCASNPCHHGNCSSSSSSSSDGYLCICNEGYEGPNCEQALPSLPATGWTESMAPRQLQPVPATQEPDKILPRSQATVTLPTWQPKTGQKVVEMKWDQVEVIPDIACGNASSNSSAGGRLVSFEVPQNTSVKIRQDATASLILLWKVTATGFQQCSLIDGRSVTPLQASGGLVLLEEMLALGNNHFIGFVNDSVTKSIVALRLTLVVKVSTCVPGESHANDLECSGKGKCTTKPSEVQWLTPVIPALWEAEAGGSPEVSSSRPAWPTW

SEQ ID NO: 592 - protein, 363 aa, Artificial Sequence
  Synthetic polypeptide
QLSSACSAQELVKLLNELFARFDKLAAKYHQLRIKILGDCYYCICGLPDYREDHAVCSILMGLAMVEAISYVREKTKTGVDMRVGVHTGTVLGGVLGQKRWQYDVWSTDVTVANKMEAGGIPGGSKIEERLYSCVVAPTLRLRWERVHISQSTMDCLKGEFDVEPGDGGSRCDYLEEKGIETYLIIASKPEVKKTATQNGLNGSALPNGAPASSKSSSPALIETKEPNGSAHSSGSTSEKPEEQDAQADNPSFPNPRRRLRLQDLADRVVDASEDEHELNQLLNEALLERESAQVVKKRNTFLLSMRFMDPEMETRYSVEKEKQSGAAFSCSCVVLLCTALVEILIDPWPLQAPAASVSSSVK

SEQ ID NO: 593 - protein, 362 aa, Artificial Sequence
  Synthetic polypeptide
MPANYTCTRPDGDNTDFRYFIYAVTYTVILVPGLIGNILALWVFYGYMKETKRAVIFMINLAIADLLQVLSLPLRIFYYLNHDWPFGPGLCMFCFYLKYVNMYASIYFLVCISVRRFWFLMYPFRFHDCKQKYDLYISIAGWLIICLACVLFPLLRTSDDTSGNRTKCFVDLPTRNVNLAQSVVMMTIGELIGFVTPLLIVLYCTWKTVLSLQDKYPMAQDLGEKQKALKMILTCAGVFLICFAPYHFSFPLDFLVKSNEIKSCLARRVILIFHSVALCLASLNSCLDPVIYYFSTNEFRRRLSRQDLHDSIQLHAKSFQKKKKKKKKKKKKKKKKKKKKKKDYQSEQATYRMGENFCNLSI

SEQ ID NO: 594 - protein, 361 aa, Artificial Sequence
  Synthetic polypeptide
MELAALCRWGLLLALLPPGAASTQDNYLSTDVGSCTLVCPLHNQEVTAEDGTQRCEKCSKPCARVCYGLGMEHLREVRAVTSANIQEFAGCKKIFGSLAFLPESFDGDPASNTAPLQPEQLQVFETLEEITGYLYISAWPDSLPDLSVFQNLQVIRGRILHNGAYSLTLQGLGISWLGLRSLRELGSGLALIHHNTHLCFVHTVPWDQLFRNPHQALLHTANRPEDECVGEGLACHQLCARGHCWGPGPTQCVNCSQFLRGQECVEECRVLQGLPREYVNARHCLPCHPECQPQNGSVTCFGPEADQCVACAHYKDPPFCVARCPSGVKPDLSYMPIWKFPDEEGACQPCPINCTHSVVVR

SEQ ID NO: 595 - protein, 361 aa, Artificial Sequence
  Synthetic polypeptide
MPPPRLLFFLLFLTPMEVRPEEPLVVKVEEGDNAVLQCLKGTSDGPTQQLTWSRESPLKPFLKLSLGLPGLGIHMRPLAIWLFIFNVSQQMGGFYLCQPGPPSEKAWQPGWTVNVEGSGELFRWNVSDLGGLGCGLKNRSSEGPSSPSGKLMSPKLYVWAKDRPEIWEGEPPCLPPRDSLNQSLSQDLTMAPGSTLWLSCGVPPDSVSRGPLSWTHVHPKGPKSLLSLELKDDRPARDMWVMETGLLLPRATAQDAGKYYCHRGNLTMSFHLEITARPVLWHWLLRTGGWKVSAVTLAYLIFCLCSLVGILHLQRALVLRRKRKRMTDPTRRGSLLRLYCFKYCPTSKPSSKATSSVKNSL

SEQ ID NO: 596 - protein, 361 aa, Artificial Sequence; identical to SEQ ID NO: 595
  Synthetic polypeptide

SEQ ID NO: 597 - protein, 361 aa, Artificial Sequence; identical to SEQ ID NO: 595
  Synthetic polypeptide

SEQ ID NO: 598 - protein, 359 aa, Artificial Sequence
  Synthetic polypeptide
MVFVGFGFLMVFLQRYGFSSVGFTFLLAAFALQWSTLVQGFLHSFHGGHIHVGVESMINADFCAGAVLISFGAVLGKTGPTQLLLMALLEVVLFGINEFVLLHLLGVRDAGGSMTIHTFGAYFGLVLSRVLYRPQLEKSKHRQGSVYHSDLFAMIGTIFLWIFWPSFNAALTALGAGQHRTALNTYYSLAASTLGTFALSALVGEDGRLDMVHIQNAALAGGVVVGTSSEMMLTPFGALAAGFLAGTVSTLGYKFFTPILESKFKVQDTCGVHNLHGMPGVLGALLGVLVAGLATHEAYGDGLESVFPLIAEGQRSATSQAMHQLFGLFVTLMFASVGGGLGGIILALQGCCDYSGKQD

SEQ ID NO: 599 - protein, 357 aa, Artificial Sequence
  Synthetic polypeptide
QTHNSVIGVPIRETPILDDYDCEEDEEPPRRANHVSREDEFGSQVTHTLDSLGHPGEEKVDFEKKAAAEATQETVESLMQKFKESFRANTPIEIGQLQPPLRSTSAGKRKRRSKSRGGISFGRAKGTSGSEADDETQLTFYTEQYRSRRRSKGLLKSPVNKTALTLIAVSSCILAMVCGSQMSCPLTVKVTLHVPEHFIADGSSFVVSEGSYLDISDWLNPAKLSLYYQINATSPWVRDLCGQRTTDACEQLCDPETGECSCHEGYAPDPVHRHLCVRSDWGQSEGPWPYTTLERGYDLVTGEQAPEKILSLGQGLWLPVSKSFVVPPVELSINPLASCKTDVLVTEDPADVRSETP

SEQ ID NO: 600 - protein, 356 aa, Artificial Sequence
  Synthetic polypeptide
MKKKLVVLGLLAVVLVLVIVGLCLWLPSASKEPDNHVYTRAAVAADAKQCSKIGRDALRDGGSAVDAAIAALLCVGLMNAHSMGIGGGLFLTIYNSTTRKAEVINAREVAPRLAFATMFNSSEQSQKGGLSVAVPGEIRGYELAHQRHGRLPWARLFQPSIQLARQGFPVGKGLAAALENKRTVIEQQPVLCEVFCRDRKVLREGERLTLPQLADTYETLAIEGAQAFYNGSLTAQIVKDIQAAGGIVTAEDLNNYRAELIEHPLNISLGDVVLYMPSAPLSGPVLALILNILKGYNFSRESVESPEQKGLTYHRIVEAFRFAYAKRTLLGDPKFVDVTECQACSANSRNIFCMKE

SEQ ID NO: 601 - protein, 356 aa, Artificial Sequence; identical to SEQ ID NO: 600
  Synthetic polypeptide

SEQ ID NO: 602 - protein, 356 aa, Artificial Sequence; identical to SEQ ID NO: 600
  Synthetic polypeptide

SEQ ID NO: 603 - protein, 356 aa, Artificial Sequence; identical to SEQ ID NO: 600
  Synthetic polypeptide

SEQ ID NO: 604 - protein, 356 aa, Artificial Sequence; identical to SEQ ID NO: 600
  Synthetic polypeptide

SEQ ID NO: 605 - protein, 356 aa, Artificial Sequence; identical to SEQ ID NO: 600
  Synthetic polypeptide

SEQ ID NO: 606 - protein, 356 aa, Artificial Sequence; identical to SEQ ID NO: 600
  Synthetic polypeptide

SEQ ID NO: 607 - protein, 352 aa, Artificial Sequence
  Synthetic polypeptide
MECLYYFLGFLLLAARLPLDAAKRFHDVLGNERPSAYMREHNQLNGWSSDENDWNEKLYPVWKRGDMRWKNSWKGGRVQAVLTSDSPALVGSNITFAVNLIFPRCQKEDANGNIVYEKNCRNGQYFQKLGRCSVRVSVNTANVTLGPQLMEVTVYRRHGRAYVPIAQVKDVYVVTDQIPVFVTMFQKNDRNSSDETFLKDLPIMFDVLIHDPSHFLNYSTINYKWSFGDNTGLFVSTNHTVNHTYVLNGTFSLNLTVKAAAPGPCPPPPPPPRPSKPTPSLAKTWNEPKCPSMIDWIKKMWHIYTIEYYAVIKKDEFMSFVGTWMKLETIILSKLSQGQKTKRRMFSFTGGN

SEQ ID NO: 608 - protein, 350 aa, Artificial Sequence
  Synthetic polypeptide
MNECHYDKHMDFFYNRSNTDTVDDWTGTKLVIVLCVGTFFCLFIFFSNSLVIAAVIKNRKFHFPFYYLLANLAAADFFAGIAYVFLMFNTGPVSKTLTVNRWFLRQGLLDSSLTASLTNLLVIAVERHMSIMRMRVHSNLTKKRVTLLILLVWAIAIFMGAVPTLGWNCLCNISACSSLAPIYSRSYLVFWTVSNLMAFLIMVVVYLRIYVYVKRKTNVLSPHTSGSISRRRTPMKLMKTVMTVLGAFVVCWTPGLVVLLLDGLNCRQCGVQHVKRWFLLLALLNSVVNPIIYSYKDEDMYGTMKKMICCFSQENPERRPSRIPSTVLSRSDTGSQYIEDSISQDRSTAL

SEQ ID NO: 609 - protein, 350 aa, Artificial Sequence; identical to SEQ ID NO: 608
  Synthetic polypeptide

SEQ ID NO: 610 - protein, 350 aa, Artificial Sequence
  Synthetic polypeptide
MVFVGFGFLMVFLQRYGFSSVGFTFLLAAFALQWSTLVQGFLHSFHGGHIHVGVESMINADFCAGAVLISFGAVLGKTGPTQLLLMALLEVVLFGINEFVLLHLLGVRVWGGMESGVGGGQGQPLSQERGGGGGVLPLTPPPQVRDAGGSMTIHTFGAYFGLVLSRVLYRPQLEKSKHRQGSVYHSDLFAMIGTIFLWIFWPSFNAALTALGAGQHRTALNTYYSLAASTLGTFALSALVGEDGRLDMPILESKFKVQDTCGVHNLHGMPGVLGALLGVLVAGLATHEAYGDGLESVFPLIAEGQRSATSQAMHQLFGLFVTLMFASVGGGLGGIILALQGCCDYSGKQD

SEQ ID NO: 611 - protein, 348 aa, Artificial Sequence
  Synthetic polypeptide
MALLLCFVLLCGVVDFARSLSITTPEEMIEKAKGETAYLPCKFTLSPEDQGPLDIEWLISPADNQKVDQVIILYSGDKIYDDYYPDLKGRVHFTSNDLKSGDASINVTNLQLSDIGTYQCKVKKAPGVANKKIHLVVLVKPSGARCYVDGSEEIGSDFKIKCEPKEGSLPLQYEWQKLSDSQKMPTSWLAEMTSSVISVKNASSEYSGTYSCTVRNRVGSDQCLLRLNVVPPSNKAGLIAGAIIGTLLALALIGLIIFCCRKKRREEKYEKEVHHDIREDVPPPKSRTSTARSYIGSNHSSLGSMSPSNMEGYSKTQYNQVPSEDFERTPQSPTLPPAKAQGELSLKF

SEQ ID NO: 612 - protein, 348 aa, Artificial Sequence; identical to SEQ ID NO: 611
  Synthetic polypeptide

SEQ ID NO: 613 - protein, 348 aa, Artificial Sequence
  Synthetic polypeptide
MEKLRIKYSEMYTIVPAEIESQVEECRKALEDIDEKISNEVLKSSPSYAMRRKIEEINNGLHNVEKMLQQKSKNIEKAQEIQKKMWDELDLWHSKLNELDSEVQDIVEQDPGQAQEWMDNLMIPFQQYQQVSQRAECRTSQLNKATVKMEEYSDLLKSTEAWIENTSHLLANPADYDSLRTLSHHASTVQDSKCFRSGPRPNIYVSYYVTVIQMALEDSEQKHNLLHSIFMDLEDLSIIFETDELTQSIQELSNQVTALQQKIMESLPQIQRMADERWLTPVIPALWEAEAGGSPAVRSWRPAWPTWRNSVSTKNIKINWAWWHVPVIPAIQEAEAGESLEPGRRRLQ

SEQ ID NO: 614 - protein, 348 aa, Artificial Sequence; identical to SEQ ID NO: 613
  Synthetic polypeptide

SEQ ID NO: 615 - protein, 348 aa, Artificial Sequence
  Synthetic polypeptide
MPANFTEGSFDSSGTGQTLDSSPVACTETVTFTEVVEGKEWGSFYYSFKTEQLITLWVLFVFTIVGNSVVLFSTWRRKKKSRMTFFVTQLAITDSFTGLVNILTDINWRFTGDFTAPDLVCRVVRYLQVVLLYASTYVLVSLSIDRYHAIVYPMKFLQGEKQARVLIVIAWSLSFLFSIPTLIIFGKRTLSNGEVQCWALWPDDSYWTPYMTIVAFLVYFIPLTIISIMYGIVIRTIWIKSKTYETVISNCSDGKLCSSYNRGLISKAKIKAIKYSIIIILAFICCWSPYFLFDILDNFNLLPDTQERFYASVIIQNLPALNSAINPLIYCVFSSSISFPCRIIDGND

SEQ ID NO: 616 - protein, 348 aa, Artificial Sequence; identical to SEQ ID NO: 615
  Synthetic polypeptide

SEQ ID NO: 617 - protein, 348 aa, Artificial Sequence; identical to SEQ ID NO: 615
  Synthetic polypeptide

SEQ ID NO: 618 - protein, 347 aa, Artificial Sequence
  Synthetic polypeptide
MPANYTCTRPDGDNTDFRYFIYAVTYTVILVPGLIGNILALWVFYGYMKETKRAVIFMINLAIADLLQVLSLPLRIFYYLNHDWPFGPGLCMFCFYLKYVNMYASIYFLVCISVRRFWFLMYPFRFHDCKQKYDLYISIAGWLIICLACVLFPLLRTSDDTSGNRTKCFVDLPTRNVNLAQSVVMMTIGELIGFVTPLLIVLYCTWKTVLSLQDKYPMAQDLGEKQKALKMILTCAGVFLICFAPYHFSFPLDFLVKSNEIKSCLARRVILIFHSVALCLASLNSCLDPVIYYFSTNEFRRRLSRQDLHDSIQLHAKSFVTKKKKKKKKKKKKKKKKKKKKKKRLSE

SEQ ID NO: 619 - protein, 345 aa, Artificial Sequence
  Synthetic polypeptide
MVFVGFGFLMVFLQRYGFSSVGFTFLLAAFALQWSTLVQGFLHSFHGGHIHVGVESMINADFCAGAVLISFGAVLGKTGPTQLLLMALLEVVLFGINEFVLLHLLGVRDAGGSMTIHTFGAYFGLVLSRVLYRPQLEKSKHRQGSVYHSDLFAMIGTIFLWIFWPSFNAALTALGAGQHRTALNTYYSLAASTLGTFALSALVGEDGRLDMVHIQNAALAGGVVVGTSSEMMLTPFGALAAGFLAGTVSTLGYKFFTPILESKFKVQDTCGVHNLHGMPGVLGALLGVLVAGLATHEAYGDGLESVFPLIAEGQRSATSQAMHQLFGLFVTLMFASVGGGLGGLL

SEQ ID NO: 620 - protein, 343 aa, Artificial Sequence
  Synthetic polypeptide
MAIAYLGSSCPSQPPSSLALSLSPTPSDFEQESGIETAMRFSPDVALAVSTTPAVLPTTNIQPVGTPFEELPSERPTLEPATSPLVVTEVPEEPSQRATTVSTTMATTAATSTGDPTVATVPATVATATPSTPAAPPFTATTAVIRTTGVRRLLPLPLTTVATARATTPEAPSPPTTAAVLDTEAPTPRLVSTATSRPRALPRPATTQEPDIPERSTLPLGTTAPGPTEVAQTPTPETFLTTIRDEPEVPVSGGPSGDFELPEEETTQPDTANEVVAVGGAAAKASSPPGTLPKGARPGPGLLDNAIDSGSSAAQLPQKSILERKEVLVAWRSRKSMVLKSSR

SEQ ID NO: 621 - protein, 343 aa, Artificial Sequence
  Synthetic polypeptide
MSPWSWFLLQTLCLLPTGAASRRGAPGTANCELKPQQSELNSFLWTIKRDPPSYFFGTIHVPYTRVWDFIPDNSKEAFLQSSIVYFELDLTDPYTISALTSCQMLPQGENLQDVLPRDIYCRLKRHLEYVKLMMPLWMTPDQRGKGLYADYLFNAIAGNWERKRPVWVMLMVNSLTEVDIKSRGVPVLDLFLAQEAERLRKQTGAVEKVEEQCHPLNGLNFSQVIFALNQTLLQQESLRAGSLQIPYTTEDLIKHYNCGDLSSVILSHDSSQVPNFINATLPPQERITAQEIDSYLRRELIYKRNERIGKRVKALLEEFPDKGFFFAFGAGSCSHITSSGRSY

SEQ ID NO: 622 - protein, 343 aa, Artificial Sequence; identical to SEQ ID NO: 621
  Synthetic polypeptide

SEQ ID NO: 623 - protein, 342 aa, Artificial Sequence
  Synthetic polypeptide
MRCALALSALLLLLSTPPLLPSSPSPSPSPSQNATQTTTDSSNKTAPTPASSVTIMATDTAQQSTVPTSKANEILASVKATTLGVSSDSPGTTTLAQQVSGPVNTTVARGGGSGNPTTTIESPKSTKSADTTTVATSTATAKPNTTSSQNGAEDTTNSGGKSSHSVTTDLTSTKAEHLTTPHPTSPLSPRQPTSTHPVATPTSSGHDHLMKISSSSSTVAIPGYTFTSPGMTTTLPSSVISQRTQQTSSQMPASSTAPSSQETVQPTSPATALRTPTLPETMSSSPTAASTTHRYPKTPSPTVAHESNWAKCEDLETQTQSEKQLVLNLTGNTLCMSQLKMR

SEQ ID NO: 624 - protein, 342 aa, Artificial Sequence
  Synthetic polypeptide
MECLYYFLGFLLLAARLPLDAAKRFHDVLGNERPSAYMREHNQLNGWSSDENDWNEKLYPVWKRGDMRWKNSWKGGRVQAVLTSDSPALVGSNITFAVNLIFPRCQKEDANGNIVYEKNCRNEAGLSADPYVYNWTAWSEDSDGENGTGQSHHNVFPDGKPFPHHPGWRRWNFIYVFHTLGQYFQKLGRCSVRVSVNTANVTLGPQLMEVTVYRRHGRAYVPIAQVKDVYVVTDQIPVFVTMFQKNDRNSSDETFLKDLPIMFDVLIHDPSHFLNYSTINYKWSFGDNTGLFVSTNHTVNHTYVLNGTFSLNLTVKAAAPGPCPPPPPPPRPSKPTPSLGGN

SEQ ID NO: 625 - protein, 342 aa, Artificial Sequence; identical to SEQ ID NO: 624
  Synthetic polypeptide

SEQ ID NO: 626 - protein, 341 aa, Artificial Sequence
  Synthetic polypeptide
MYRDPEAASPGAPSRDVLLVSAIITVSLSVTVVLCGLCHWCQRKLGKRYKNSLETVGTPDSGRGRSEKKAINDLDRDFWNNNESTVQQKWSSYPPKEFILNISPYAPYGDPRLSLNGTLLSGAKVAAAAGLAVEREGRLGEKPAPVPPPGEDALRSGGAAPSEPGSGGKAGRGRWRTVQSHLAAGKLNLSKLPAGGKAVNTAPVPGQTPHDESDRRTEPRSSVSDLVNSLTSEMLMLSPGSEEDEAHEGCSRENLGRIQFSVGYNFQESTLTVKIMKAQELPAKDFSGTSDPFVKIYLLPDKKHKLETKVKRKNLNPHWNETFLFEAGSLGKYFKPSEPHL

SEQ ID NO: 627 - protein, 341 aa, Artificial Sequence
  Synthetic polypeptide
MGGRVFLVFLAFCVWLTLPGAETQDSRGCARWCPQDSSCVNATACRCNPGFSSFSEIITTPMETCDDINECATLSKVSCGKFSDCWNTEGSYDCVCSPGYEPVSGAKTFKNESENTCQDVDECQQNPRLCKSYGTCVNTLGSYTCQCLPGFKLKPEDPKLCTDVDECSSGQHQCDSSTVCFNTVGSYSCRCRPGWKPRHGIPNNQKDTVCEDMTFSTWTPPPGVHSQTLSRFFDKVQDLGRDYKPGLANNTIQSILQALDELLEAPGDLETLPRLQQHCVASHLLDGLEDVLRGLSKNLSNGLLNFSYPAGTDRCDGTTVAPASWEAEVRGSLEPRRLSLQ

SEQ ID NO: 628 - protein, 341 aa, Artificial Sequence; identical to SEQ ID NO: 627
  Synthetic polypeptide

SEQ ID NO: 629 - protein, 341 aa, Artificial Sequence; identical to SEQ ID NO: 627
  Synthetic polypeptide

SEQ ID NO: 630 - protein, 340 aa, Artificial Sequence
  Synthetic polypeptide
MPPPRLLFFLLFLTPMEVRPEEPLVVKVEEGDNAVLQCLKGTSDGPTQQLTWSRESPLKPFLKLSLGLPGLGIHMRPLAIWLFIFNVSQQMGGFYLCQPGPPSEKAWQPGWTVNVEGSGELFRWNVSDLGGLGCGLKNRSSEGPSSPSGKLMSPKLYVWAKDRPEIWEGEPPCLPPRDSLNQSLSQDLTMAPGSTLWLSCGVPPDSVSRGPLSWTHVHPKGPKSLLSLELKDDRPARDMWVMETGLLLPRATAQDAGKYYCHRGNLTMSFHLEITARPVLWHWLLRTGGWKVSAVTLAYLIFCLCSLVGILHLQRGVLCSVSTVSNTAQPQSPAPKLPPL

SEQ ID NO: 631 - protein, 340 aa, Artificial Sequence; identical to SEQ ID NO: 630
  Synthetic polypeptide

SEQ ID NO: 632 - protein, 340 aa, Artificial Sequence; identical to SEQ ID NO: 630
  Synthetic polypeptide

SEQ ID NO: 633 - protein, 338 aa, Artificial Sequence
  Synthetic polypeptide
MRPTLLWSLLLLLGVFAAAAAAPPAQLTLETYQEWCNDSAATHDPLSQLPAPQHPKIRLYNAEQVLSWEPVALSNSTRPVVYQVQFKYTDSKWFTADIMSIGVNCTQITATECDFTAASPSAGFPMDFNVTLRLRAELGALHSAWVTMPWFQHYRNVTVGPPENIEVTPGEGSLIIRFSSPFDIADTSTAFFCYYVHYWEKGGIQQVKGPFRSNSISLDNLKPSRVYCLQVQAQLLWNKSNIFRVGHLSNISCYETMADASTELQQVILISVGTFSLLSVLAGACFFLVLKYRGLIKYWFHTPPSIPLQIEEQSEDLVVVLTLANEPEPLGQVTQPVP

SEQ ID NO: 634 - protein, 337 aa, Artificial Sequence
  Synthetic polypeptide
MRPTLLWSLLLLLGVFAAAAAAPPAQLTLETYQEWCNDSAATHDPLSQLPAPQHPKIRLYNAEQVLSWEPVALSNSTRPVVYQVQFKYTDSKWFTADIMSIGVNCTQITATECDFTAASPSAGFPMDFNVTLRLRAELGALHSAWVTMPWFQHYRNVTVGPPENIEVTPGEGSLIIRFSSPFDIADTSTAFFCYYVHYWEKGGIQQVKGPFRSNSISLDNLKPSRVYCLQVQAQLLWNKSNIFRVGHLSNISCYETMADASTELQQVILISVGTFSLLSVLAGACFFLVLKYRGLIKYWFHTPPSIPLQIEESEDLVVVLTLANEPEPLGQVTQPVP

SEQ ID NO: 635 - protein, 337 aa, Artificial Sequence
  Synthetic polypeptide
MPANFTEGSFDSSGTGQTLDSSPVACTETVTFTEVVEGKEWGSFYYSFKTEQLITLWVLFVFTIVGNSVVLFSTWRRKKKSRMTFFVTQLAITDINWRFTGDFTAPDLVCRVVRYLQVVLLYASTYVLVSLSIDRYHAIVYPMKFLQGEKQARVLIVIAWSLSFLFSIPTLIIFGKRTLSNGEVQCWALWPDDSYWTPYMTIVAFLVYFIPLTIISIMYGIVIRTIWIKSKTYETVISNCSDGKLCSSYNRGLISKAKIKAIKYSIIIILAFICCWSPYFLFDILDNFNLLPDTQERFYASVIIQNLPALNSAINPLIYCVFSSSISFPCRIIDGND

SEQ ID NO: 636 - protein, 336 aa, Artificial Sequence
  Synthetic polypeptide
MALTPPLLLLSAGTMTLGSPRKGLLMLLMALVTQGKGRYGEVWRGLWHGESVAVKIFSSRDEQSWFRETEIYNTVLLRHDNILGFIASDMTSRNSSTQLWLITHYHEHGSLYDFLQRQTLEPHLALRLAVSAACGLAHLHVEIFGTQGKPAIAHRDFKSRNVLVKSNLQCCIADLGLAVMHSQGSDYLDIGNNPRVGTKRYMAPEVLDEQIRTDCFESYKWTDIWAFGLVLWEIARRTIVNGIVEDYRPPFYDVVPNDPSFEDMKKVVCVDQQTPTIPNRLAADPVLPTRHQLAAKRNPQAHTPPATLDSLLLPFLLTFIGKASFSPPTHSSAHAP

SEQ ID NO: 637 - protein, 336 aa, Artificial Sequence
  Synthetic polypeptide
MVFVGFGFLMVFLQRYGFSSVGFTFLLAAFALQWSTLVQGFLHSFHGGHIHVGVESMINADFCAGAVLISFGAVLGKTGPTQLLLMALLEVVLFGINEFVLLHLLGVRVWGGMESGVGGGQGQPLSQERGGGGGVLPLTPPPQVRDAGGSMTIHTFGAYFGLVLSRVLYRPQLEKSKHRQGSVYHSDLFAMIGTIFLWIFWPSFNAALTALGAGQHRTALNTYYSLAASTLGTFALSALVGEDGRLDMPILESKFKVQDTCGVHNLHGMPGVLGALLGVLVAGLATHEAYGDGLESVFPLIAEGQRSATSQAMHQLFGLFVTLMFASVGGGLGGLL

SEQ ID NO: 638 - protein, 335 aa, Artificial Sequence
  Synthetic polypeptide
MNFTVRYETTNKTYKTVTISDHGTVTYNGSICGDDQNGPKIAVQFGPGFSWIANFTKAASTYSIDSVSFSYNTGDNTTFPDAEDKGILTVDELLAIRIPLNDLFRCNSLSTLEKNDVVQHYWDVLVQAFVQNGTVSTNEFLCDKDKTSTVAPTIHTTVPSPTTTPTPKEKPEAGTYSVNNGNDTCLLATMGLQLNITQDKVASVININPNTTHSTGSCRSHTALLRLNSSTIKYLDFVFAVKNENRFYLKEVNISMYLVNGSVFSIANNNLSYWDAPLGSSYMCNKEQTVSVSGAFQINTFDLRVQPFNVTQGKYSTGHIWQPQLSGFLTEPRSK

SEQ ID NO: 639 - protein, 335 aa, Artificial Sequence
  Synthetic polypeptide
MTMAGGRRGLVAPQNTFLENIVRRSNDTNFVLGNAQIVDWPIVYSNDGFCKLSGYHRAEVMQKSSTCSFMYGELTDKDTIEKVRQTFENYEMNSFEILMYKKNRTPVWFFVKIAPIRNEQDKVVLFLCTFSDITAFKQPIEDDSCKGWGKFARLTRALTSSRGVLQQLAPSVQKGENVHKHSRLAEVLQLGSDILPQYKQEAPKTPPHIILHYCVFKTTWDWIILILTFYTAILVPYNVSFKTRQNNVAWLVVDSIVDVIFLVDIVLNFHTTFVGPAGEVISDPKLIRMNYLKTWFVIDLLSCLPYDVINAFENVDEGEEPRWLNRNSSSLQLPV

SEQ ID NO: 640 - protein, 335 aa, Artificial Sequence; identical to SEQ ID NO: 639
  Synthetic polypeptide

SEQ ID NO: 641 - protein, 334 aa, Artificial Sequence
  Synthetic polypeptide
MGYSRAVEIGPDQDLDVVEITENSQELRMRNSSGPCLSGSLVSLHCLACGKSLKTPRVVGVEEASVDSWPWQVSIQYDKQHVCGGSILDPHWVLTAAHCFRKHTDVFNWKVRAGSDKLGSFPSLAVAKIIIIEFNPMYPKDNDIALMKLQFPLTFSGTVRPICLPFFDEELTPATPLWIIGWGFTKQNGGKMSDILLQASVQVIDSTRCNADDAYQGEVTEKMMCAGIPEGGVDTCQGDSGGPLMYQSDQWHVVGIVSWGYGCGGPSTPGVYTKDRTIQRSCNSPGTGLVIQQPAVPLMELRSARHTHRLTTCVCFLSFPALQPLSPLCPFPWD

SEQ ID NO: 642 - protein, 326 aa, Artificial Sequence
  Synthetic polypeptide
MGGRRCVPGTLPMRAAPPGAKRLHVPLRAKGVGRSGHAPRLESVRTSYYAVLYPMVYPMKITGNRAVMALVYIWLHSLIGCLPPLFGWSSVEFDEFKWMCVAAWHREPGYTAFWQIWCALFPFLVMLVCYGFIFRVARVKARKVHCGTVVIVEEDAQRTGRKNSSTSTSSSGSRRNAFQGVVYSANQCKALITILVVLGAFMVTWGPYMVVIASEALWGKSSVSPSLETWATWLSFASAVCHPLIYGLWNKTVRKELLGMCFGDRYYREPFVQRQRTSRLFSISNRITDLGLSPHLTALMAGGQPLGHSSSTGDTGFSCSQDSGQL

SEQ ID NO: 643 - protein, 323 aa, Artificial Sequence
  Synthetic polypeptide
MNPDLDTGHNTSAPAHWGELKNANFTGPNQTSSNSTLPQLDITRAISVGLVLGAFILFAIVGNILVILSVACNRHLRTPTNYFIVNLAMADLLLSFTVLPFSAALEVLGYWVLGRIFCDIWAAVDVLCCTASILSLCAISIDRYIGVRYSLQYPTLVTRRKAILALLSVWVLSTVISIGPLLGWKEPAPNDDKECGVTEEPFYALFSSLGSFYIPLAVILVMYCRVYIVAKRTTKNLEAGVMKEMSNSKELTLRIHSKNFHEDTLSSTKAKGHNPRSSIAVKLFKFSREKKAAKTLGIVVGMFILCWLPFFIALPLELFTSTP

SEQ ID NO: 644 - protein, 323 aa, Artificial Sequence
  Synthetic polypeptide
MDDAVQITKISMDSWFILVLLGSGLICVSANNATTVAPSVGITRLINSSTAEPVKEEAKTSNPTSSLTSLSVAPTFSPNITLGPTYLTTVNSSDSDNGTTRTASTNSIGITISPNGTWLPDNQFTDARTEPWEGNSSTAATTPETFPPSGNSDSKDRRDETPIIAVMVALSSLLVIVFIIIVLYMLRFKKYKQAGSHSNSFRLSNGRTEDVEPQSVPLLARSPSTNRKYPPLPVDKLEEEINRRMADDNKLFREEFNALPACPIQATCEAASKEENKEKNRYVNILPYDHSRVHLTPVEGVPDSDYINASFINVGALQVSIDG

SEQ ID NO: 645 - protein, 319 aa, Artificial Sequence
  Synthetic polypeptide
MRPTLLWSLLLLLGVFAAAAAAPPDPLSQLPAPQHPKIRLYNAEQVLSWEPVALSNSTRPVVYQVQFKYTDSKWFTADIMSIGVNCTQITATECDFTAASPSAGFPMDFNVTLRLRAELGALHSAWVTMPWFQHYRNVTVGPPENIEVTPGEGSLIIRFSSPFDIADTSTAFFCYYVHYWEKGGIQQVKGPFRSNSISLDNLKPSRVYCLQVQAQLLWNKSNIFRVGHLSNISCYETMADASTELQQVILISVGTFSLLSVLAGACFFLVLKYRGLIKYWFHTPPSIPLQIEEQSEDLVVVLTLANEPEPLGQVTQPVP

SEQ ID NO: 646 - protein, 318 aa, Artificial Sequence
  Synthetic polypeptide
MRPTLLWSLLLLLGVFAAAAAAPPDPLSQLPAPQHPKIRLYNAEQVLSWEPVALSNSTRPVVYQVQFKYTDSKWFTADIMSIGVNCTQITATECDFTAASPSAGFPMDFNVTLRLRAELGALHSAWVTMPWFQHYRNVTVGPPENIEVTPGEGSLIIRFSSPFDIADTSTAFFCYYVHYWEKGGIQQVKGPFRSNSISLDNLKPSRVYCLQVQAQLLWNKSNIFRVGHLSNISCYETMADASTELQQVILISVGTFSLLSVLAGACFFLVLKYRGLIKYWFHTPPSIPLQIEESEDLVVVLTLANEPEPLGQVTQPVP

SEQ ID NO: 647 - protein, 317 aa, Artificial Sequence
  Synthetic polypeptide
MIQTVPDPAAHIKEALSVVSEDQSLFECAYGTPHLAKTEMTASSSSDYGQTSKMSPRVPQQDWLSQPPARVTIKMECNPSQVNGSRNSPDECSVAKGGKMVGSPDTVGMNYGSYMEEKHMPPPNMTTNERRVIVPADPTLWSTDHVRQWLEWAVKEYGLPDVNILLFQNIDGKELCKMTKDDFQRLTPSYNADILLSHLHYLRETPLPHLTSDDVDKALQNSPRLMHARNTGGAAFIFPNTSVYPEATQRITTRPDLPYEPPRRSAWTGHGHPTPQSKAAQPSPSTVPKTEDQRPQLDPYQILGPTSSRLANPGWTQ

SEQ ID NO: 648 - protein, 317 aa, Artificial Sequence; identical to SEQ ID NO: 647
  Synthetic polypeptide

SEQ ID NO: 649 - protein, 316 aa, Artificial Sequence
  Synthetic polypeptide
MQLFRWIGTGLLCTGLSAFLLVACLLDFQRALALFVLTCVVLTFLGHRLLKRLLGPKLRRFLKPQGHPRLLLWFKRGLALAAFLGLVLWLSLDTSQRPEQLVSFAGICVFVALLFACSKHHCAVSWRAVSWGLGLQFVLGLLVIRTEPGFIAFEWLGEQIRIFLSYTKAGSSFVFGEALVKDVFAFQVLPIIVFFSCVISVLYHVGLMQWVILKIAWLMQVTMGTTATETLSVAGNIFVSQTEAPLLIRPYLADMTLSEVHVVMTGGYATIAGSLLGAYISFGHFGRPRRVDHLRSGVQDQPGQHGETLSLQKYKN

SEQ ID NO: 650 - protein, 316 aa, Artificial Sequence
  Synthetic polypeptide
MPLLPAALTSSMLYFQMVIMAGTVMLAYYFEYTDTFTVNVQGFFCHDSAYRKPYPGPEDSSAVPPVLLYSLAAGVPVLVIIVGETAVFCLQLATRDFENQEKTILTGDCCYINPLVRRTVRFLGIYTFGLFATDIFVNAGQVVTGNLAPHFLALCKPNYTALGCQQYTQFISGEEACTGNPDLIMRARKTFPSKEAALSVYAAMYLTMYITNTIKAKGTRLAKPVLCLGLMCLAFLTGLNRVAEYRNHWSDVIAGFLVGISIAVFLVVCVVNNFKGRQAENEHIHMDNLAQMPMISIPRVESPLEKVTSVQEFQNS

SEQ ID NO: 651 - protein, 312 aa, Artificial Sequence
  Synthetic polypeptide
MDSWFILVLLGSGLICVSANNATTVAPSVGITRLINSSTAEPVKEEAKTSNPTSSLTSLSVAPTFSPNITLGPTYLTTVNSSDSDNGTTRTASTNSIGITISPNGTWLPDNQFTDARTEPWEGNSSTAATTPETFPPSGNSDSKDRRDETPIIAVMVALSSLLVIVFIIIVLYMLRFKKYKQAGSHSNSFRLSNGRTEDVEPQSVPLLARSPSTNRKYPPLPVDKLEEEINRRMADDNKLFREEFNALPACPIQATCEAASKEENKEKNRYVNILPYDHSRVHLTPVEGVPDSDYINASFINVGALQVSIDG

SEQ ID NO: 652 - protein, 312 aa, Artificial Sequence; identical to SEQ ID NO: 651
  Synthetic polypeptide

SEQ ID NO: 653 - protein, 312 aa, Artificial Sequence
  Synthetic polypeptide
MELAALCRWGLLLALLPPGAASTQDNYLSTDVGSCTLVCPLHNQEVTAEDGTQRCEKCSKPCARVCYGLGMEHLREVRAVTSANIQEFAGCKKIFGSLAFLPESFDGDPASNTAPLQPEQLQVFETLEEITGYLYISAWPDSLPDLSVFQNLQVIRGRILHNGAYSLTLQGLGISWLGLRSLRELGSGLALIHHNTHLCFVHTVPWDQLFRNPHQALLHTANRPEDECVGEGLACHQLCARGHCWGPGPTQCVNCSQFLRGQECVEECRVLQGLPREYVNARHCLPCHPECQPQNGSVTCFGPNEIKQGLAQ

SEQ ID NO: 654 - protein, 312 aa, Artificial Sequence
  Synthetic polypeptide
MRVNEKYSTLPAEDRSVHIINICAIEDIGYLPSEGTLLNSLSVDPDAECKYGLYFRDGRRKVDYILVYHHKRPSGNRTLVRRVQHSDTPSGARSVKQDHPLPGKGASLDAGSGEPPMDYHEDDKRFRREEYEGNLLEAGLELERDEDTKIHGVGFVKIHAPWNVLCREAEFLKLKMPTKKMYHINETRGLLKKINSVLQKITDPIQPKVAEHRPQTMKRLSYPFSREKQHLFDLSDKDSFFDSKTRSTIVYEILKRTTCTKAKYSMGITSLLANGVYAAAYPLHDGDYNGENVEFNDRKPTQPTLKKCLWDE

SEQ ID NO: 655 - protein, 312 aa, Artificial Sequence; identical to SEQ ID NO: 654
  Synthetic polypeptide

SEQ ID NO: 656 - protein, 311 aa, Artificial Sequence
  Synthetic polypeptide
MALTPPLLLLSAGTMTLGSPRKGLLMLLMALVTQGKGRYGEVWRGLWHGESVAVKIFSSRDEQSWFRETEIYNTVLLRHDNILGFIASDMTSRNSSTQLWLITHYHEHGSLYDFLQRQTLEPHLALRLAVSAACGLAHLHVEIFGTQGKPAIAHRDFKSRNVLVKSNLQCCIADLGLAVMHSQGSDYLDIGNNPRVGTKRYMAPEVLDEQIRTDCFESYKWTDIWAFGLVLWEIARRTIVNGIVEDYRPPFYDVVPNDPSFEDMKKVVCVDQQTPTIPNRLAADPLTQHEDKDEDFMIIHFHLMDSKYISS

SEQ ID NO: 657 - protein, 311 aa, Artificial Sequence
  Synthetic polypeptide
MPLLPAALTSSMLYFQMVIMAGTVMLAYYFEYTDTFTVNVQGFFCHDSAYRKPYPGPEDSSAVPPVLLYSLAAGVPVLVIIVGETAVFCLQLATRDFENQEKTILTGDCCYINPLVRRTVRFLGIYTFGLFATDIFVNAGQVVTGNLAPHFLALCKPNYTALGCQQYTQFISGEEACTGNPDLIMRARKTFPSKEAALSVYAAMYLTMYITNTIKAKGTRLAKPVLCLGLMCLAFLTGLNRVAEYRNHWSDVIAGFLVGISIAVFLVVCVVNNFKGRQAENEHIHMDNLAQMPMISIPRVESPLEKEFQNS

SEQ ID NO: 658 - protein, 311 aa, Artificial Sequence; identical to SEQ ID NO: 657
  Synthetic polypeptide

SEQ ID NO: 659 - protein, 311 aa, Artificial Sequence
  Synthetic polypeptide
MECLYYFLGFLLLAARLPLDAAKQAGLSADPYVYNWTAWSEDSDGENGTGQSHHNVFPDGKPFPHHPGWRRWNFIYVFHTLGQYFQKLGRCSVRVSVNTANVTLGPQLMEVTVYRRHGRAYVPIAQVKDVYVVTDQIPVFVTMFQKNDRNSSDETFLKDLPIMFDVLIHDPSHFLNYSTINYKWSFGDNTGLFVSTNHTVNHTYVLNGTFSLNLTVKAAAPGPCPPPPPPPRPSKPTPSLAKTWNEPKCPSMIDWIKKMWHIYTIEYYAVIKKDEFMSFVGTWMKLETIILSKLSQGQKTKRRMFSFTGGN

SEQ ID NO: 660 - protein, 310 aa, Artificial Sequence
  Synthetic polypeptide
MASTIKEALSVVSEDQSLFECAYGTPHLAKTEMTASSSSDYGQTSKMSPRVPQQDWLSQPPARVTIKMECNPSQVNGSRNSPDECSVAKGGKMVGSPDTVGMNYGSYMEEKHMPPPNMTTNERRVIVPADPTLWSTDHVRQWLEWAVKEYGLPDVNILLFQNIDGKELCKMTKDDFQRLTPSYNADILLSHLHYLRETPLPHLTSDDVDKALQNSPRLMHARNTGGAAFIFPNTSVYPEATQRITTRPDLPYEPPRRSAWTGHGHPTPQSKAAQPSPSTVPKTEDQRPQLDPYQILGPTSSRLANPGWTQ

SEQ ID NO: 661 - protein, 308 aa, Artificial Sequence
  Synthetic polypeptide
MRLREPLLSGSAAMPGASLQRACRLLVAVCALHLGVTLVYYLAGRDLSRLPQLVGVSTPLQGGSNSAAAIGQSSGELRTGGARPPPPLGASSQPRPGGDSSPVVDSGPGPASNLTSVPVPHTTALSLPACPEESPLLVGPMLIEFNMPVDLELVAKQNPNVKMGGRYAPRDCVSPHKVAIIIPFRNRQEHLKYWLYYLHPVLQRQQLDYGIYVINQAGDTIFNRAKLLNVGFQEALKDYDYTCFVFSDVDLIPMNDHNAYRCFSQPRHISVAMDKFGFSWAWWQAPVVPAPQEAEAEESLEPGRRKLQ

SEQ ID NO: 662 - protein, 308 aa, Artificial Sequence
  Synthetic polypeptide
MSTPGVNSSASLSPDRLNSPVTIPAVMFIFGVVGNLVAIVVLCKSRKEQKETTFYTLVCGLAVTDLLGTLLVSPVTIATYMKGQWPGGQPLCEYSTFILLFFSLSGLSIICAMSVERYLAINHAYFYSHYVDKRLAGLTLFAVYASNVLFCALPNMGLGSSRLQYPDTWCFIDWTTNVTAHAAYSYMYAGFSSFLILATVLCNVLVCGALLRMHRQFMRRTSLGTEQHHAAAAASVASRGHPAASPALPRLSDFRRRRSFRRIAGAEIQMVILLIATSLVVLICSIPLVFPKLQMKNLYHSATYRVAI

SEQ ID NO: 663 - protein, 307 aa, Artificial Sequence
  Synthetic polypeptide
MALLLCFVLLCGVVDFARSLSITTPEEMIEKAKGETAYLPCKFTLSPEDQGPLDIEWLISPADNQKVDQVIILYSGDKIYDDYYPDLKGRVHFTSNDLKSGDASINVTNLQLSDIGTYQCKVKKAPGVANKKIHLVVLVKPSGARCYVDGSEEIGSDFKIKCEPKEGSLPLQYEWQKLSDSQKMPTSWLAASNKAGLIAGAIIGTLLALALIGLIIFCCRKKRREEKYEKEVHHDIREDVPPPKSRTSTARSYIGSNHSSLGSMSPSNMEGYSKTQYNQVPSEDFERTPQSPTLPPAKAQGELSLKF

SEQ ID NO: 664 - protein, 307 aa, Artificial Sequence
  Synthetic polypeptide
MAGAPRGGGGGGGGAGEPGGAERAAGTSRRRGLRACDEEFACPELEALFRGYTLRLEQAATLKALAVLSLLAGALALAELLGAPGPAPGLAKGSHPVHCVLFLALLVVTNVRSLQVPQLQQVGQLALLFSLTFALLCCPFALGGPARGSAGAAGGPATAEQGVWQLLLVTFVSYALLPVRSLLAIGFGLVVAASHLLVTATLVPAKRPRLWRTLGANALLFVGVNMYGVFVRILTERSQRKAFLQARSCIEDRLRLEDENEKQERLLMSLLPRNVAMEMKEDFLKPPERIFHKIYIQRHDNVRRERV

SEQ ID NO: 665 - protein, 307 aa, Artificial Sequence
  Synthetic polypeptide
MWLKVGGLLRGTGGQLGQTVGWPCGALGPGPHRWGPCGGSWAQKFYQDGPGRGLGEEDIRRAREARPRKTPRPQLSDRSRERKVPASRISRLANFGGLAVGLGLGVLAEMAKKSMPGGRLQSEGGSGLDSSPFLSEANAERIVQTLCTVRGAALKVGQMLSIQDNSFISPQLQHIFERVRQSADFMPRWQMLRVLEEELGRDWQAKVASLEEVPFAAASIGQVHQGLLRDGTEVAVKIQYPGIAQSIQSDVQNLLAVLKMSAALPAGLFAEQSLQALQQELAWECDYRREAACAQNFRLWEKVVEAF

SEQ ID NO: 666 - protein, 303 aa, Artificial Sequence
  Synthetic polypeptide
MGLAMVEAISYVREKTKTGVDMRVGVHTGTVLGGVLGQKRWQYDVWSTDVTVANKMEAGGIPGGSKIEERLYSCVVAPTLRLRWERVHISQSTMDCLKGEFDVEPGDGGSRCDYLEEKGIETYLIIASKPEVKKTATQNGLNGSALPNGAPASSKSSSPALIETKEPNGSAHSSGSTSEKPEEQDAQADNPSFPNPRRRLRLQDLADRVVDASEDEHELNQLLNEALLERESAQVVKKRNTFLLSMRFMDPEMETRYSVEKEKQSGAAFSCSCVVLLCTALVEILIDPWPLQAPAASVSSSVK

SEQ ID NO: 667 - protein, 303 aa, Artificial Sequence
  Synthetic polypeptide
MDSWFILVLLGSGLICVSANNATTVAPSVGITRLINSSTAEPVKEEAKTSNPTSSLTSLSVAPTFSPNITLGPTYLTTVNSSDSDNGTTRTASTNSIGITISPNGTWLPDNQFTDARTEPWEGNSSTAATTPETFPPSDETPIIAVMVALSSLLVIVFIIIVLYMLRFKKYKQAGSHSNSFRLSNGRTEDVEPQSVPLLARSPSTNRKYPPLPVDKLEEEINRRMADDNKLFREEFNALPACPIQATCEAASKEENKEKNRYVNILPYDHSRVHLTPVEGVPDSDYINASFINVGALQVSIDG

SEQ ID NO: 668 - protein, 303 aa, Artificial Sequence; identical to SEQ ID NO: 667
  Synthetic polypeptide

SEQ ID NO: 669 - protein, 303 aa, Artificial Sequence; identical to SEQ ID NO: 667
  Synthetic polypeptide

SEQ ID NO: 670 - protein, 301 aa, Artificial Sequence
  Synthetic polypeptide
MQGARAPRDQGRSPGRMSALGRSSVILLTYVLAATELTCLFMQFSIVPYLSRKLGLDSIAFGYLQTTFGVLQLLGGPVFGRFADQRGARAALTLSFLAALALYLLLAAASSPALPGVYLLFASRLPGALMHTLPAAQMVITDLSAPEERPAALGRLGLCFGVGVILGSLLGGTLVSAYGIQCPAILAALATLLGAVLSFTCIPASTKGAKTDAQAPLPGGPRASVFDLKAIASLLRLPDVPRIFLVKVASNCPTGLFMVMFSIISMDFFQLEAAQAGYLMSFFGLLQMAKVPALQGPWQMR

SEQ ID NO: 671 - protein, 301 aa, Artificial Sequence; identical to SEQ ID NO: 670
  Synthetic polypeptide

SEQ ID NO: 672 - protein, 301 aa, Artificial Sequence; identical to SEQ ID NO: 670
  Synthetic polypeptide

SEQ ID NO: 673 - protein, 300 aa, Artificial Sequence
  Synthetic polypeptide
MGLPWGQPHLGLQMLLLALNCLRPSLSLGEWGSWMDASSQTQGAGGPAGVIGPWAPAPLRLGEAAPGTPTPVSVAHLLSPVATELVPYTPQITAWDLEGKVTATTFSLEQPRCVFDGLASASDTVWLVVAFSNASRGFQNPETLADIPASPQLLTDGHYMTLPLSPDQLPCGDPMAGSGGAPVLRVGHDHGCHQQPFCNAPLPGPGPYREDPRIHRHLARAAKWQHDRHYLHPLFSGRPPTLGLLGSLYHALLQPVVAGGGPGAAADRLLHGQALHDPPHPTQRGRHTAETCLLPLRLLP

SEQ ID NO: 674 - protein, 300 aa, Artificial Sequence; identical to SEQ ID NO: 673
  Synthetic polypeptide

SEQ ID NO: 675 - protein, 300 aa, Artificial Sequence; identical to SEQ ID NO: 673
  Synthetic polypeptide

SEQ ID NO: 676 - protein, 300 aa, Artificial Sequence; identical to SEQ ID NO: 673
  Synthetic polypeptide

SEQ ID NO: 677 - protein, 300 aa, Artificial Sequence; identical to SEQ ID NO: 673
  Synthetic polypeptide

SEQ ID NO: 678 - protein, 300 aa, Artificial Sequence; identical to SEQ ID NO: 673
  Synthetic polypeptide

SEQ ID NO: 679 - protein, 298 aa, Artificial Sequence
  Synthetic polypeptide
MRLAVLFSGALLGLLAAQGTGNDCPHKKSATLLPSFTVTPTVTESTGTTSHRTTKSHKTTTHRTTTTGTTSHGPTTATHNPTTTSHGNVTVHPTSNSTATSQGPSTATHSPATTSHGNATVHPTSNSTATSPGFTSSAHPEPPPPSPSPSPTSKETIGDYTWTNGSQPCVHLQAQIQIRVMYTTQGGGEAWGISVLNPNKTKVQGSCEGAHPHLLLSFPYGHLSFGFMQDLQQKVVYLSYMAVEYNVSFPHAAQWTFSAQNASLRDLQAPLGQSFSCSNSSIILSPAVRSLRPAWPTW

SEQ ID NO: 680 - protein, 298 aa, Artificial Sequence
  Synthetic polypeptide
MAKATSGAAGLRLLLLLLLPLLGKVALGLYFSRDAYWEKLYVDQAAGTPLLYVHALRDAPEEVPSFRLGQHLYGTYRTRLHENNWICIQEDTGLLYLNRSLDHSSWEKLSVRNRGFPLLTVYLKVFLSPTSLREGECQWPGCARVYFSFFNTSFPACSSLKPRELCFPETRPSFRIRENRPPGTFHQFRLLPVQFLCPNISVAYRLLEGEGLPFRCAPDSLEVSTRWALDREQREKYELVAVCTVHAGAREEVVMVPFPVTVYDEDDSAPTFPAGVDTASAVVEFKRKEAGAARCPGG

SEQ ID NO: 681 - protein, 298 aa, Artificial Sequence; identical to SEQ ID NO: 680
  Synthetic polypeptide

SEQ ID NO: 682 - protein, 297 aa, Artificial Sequence
  Synthetic polypeptide
MGYSRAVEIGPDQDLDVVEITENSQELRMRNSSGPCLSGSLVSLHCLACGKSLKTPRVVGVEEASVDSWPWQVSIQYDKQHVCGGSILDPHWVLTAAHCFRKHTDVFNWKVRAGSDKLGSFPSLAVAKIIIIEFNPMYPKDNDIALMKLQFPLTFSGTVRPICLPFFDEELTPATPLWIIGWGFTKQNGGKMSDILLQASVQVIDSTRCNADDAYQGEVTEKMMCAGIPEGGVDTCQDRTIQRSCNSPGTGLVIQQPAVPLMELRSARHTHRLTTCVCFLSFPALQPLSPLCPFPWD

SEQ ID NO: 683 - protein, 297 aa, Artificial Sequence
  Synthetic polypeptide
MAAAASPAFLLRLPLLLLLSSWCRTGLADPHSLCYDITVIPKFRPGPRWCAVQGQVDEKTFLHYDCGSKTVTPVSPLGKKLNVTTAWKAQNPVLREVVDILTEQLLDIQLENYIPKEPLTLQARMSCEQKAEGHGSGSWQLSFDGQIFLLFDSENRMWTTVHPGARKMKEKWENDKDMTMSFHYISMGDCTGWLEDFLMGMDSTLEPSAGAPPTMSSGTAQPRATATTLILCCLLIMCLLICSRHSLTQSHGHHPQSLQPPPHPPLLHPTWLLRRVLWSDRKNQAMQRQELKGHGEK

SEQ ID NO: 684 - protein, 297 aa, Artificial Sequence
  Synthetic polypeptide
MYRDPEAASPGAPSRDVLLVSAIITVSLSVTVVLCGLCHWCQRKLGKRYKNSLETVGTPDSGRGRSEKKAINGTLLSGAKVAAAAGLAVEREGRLGEKPAPVPPPGEDALRSGGAAPSEPGSGGKAGRGRWRTVQSHLAAGKLNLSKLPAGGKAVNTAPVPGQTPHDESDRRTEPRSSVSDLVNSLTSEMLMLSPGSEEDEAHEGCSRENLGRIQFSVGYNFQESTLTVKIMKAQELPAKDFSGTSDPFVKIYLLPDKKHKLETKVKRKNLNPHWNETFLFEAGSLGKYFKPSEPHL

SEQ ID NO: 685 - protein, 297 aa, Artificial Sequence
  Synthetic polypeptide
MGGRVFLVFLAFCVWLTLPGAETQDSRGCARWCPQDSSCVNATACRCNPGFSSFSEIITTPMETCDDINECATLSKVSCGKFSDCWNTEGSYDCVCSPGYEPVSGAKTFKNESENTCQDVDECSSGQHQCDSSTVCFNTVGSYSCRCRPGWKPRHGIPNNQKDTVCEDMTFSTWTPPPGVHSQTLSRFFDKVQDLGRDYKPGLANNTIQSILQALDELLEAPGDLETLPRLQQHCVASHLLDGLEDVLRGLSKNLSNGLLNFSYPAGTDRCDGTTVAPASWEAEVRGSLEPRRLSLQ

SEQ ID NO: 686 - protein, 297 aa, Artificial Sequence; identical to SEQ ID NO: 685
  Synthetic polypeptide

SEQ ID NO: 687 - protein, 296 aa, Artificial Sequence
  Synthetic polypeptide
MSPGASRGPRGSQAPLIAPLCCAAAALGMLLWSPACQAFNLDVEKLTVYSGPKGSYFGYAVDFHIPDARTASVLVGAPKANTSQPDIVEGGAVYYCPWPAEGSAQCRQIPFDTTNNRKIRVNGTKEPIEFKSNQWFGATVKAHKGKVVACAPLYHWRTLKPTPEKDPVGTCYVAIQNFSAYAEFSPCRNSNADPEGQGYCQAGFSLDFYKNGDLIVGGPGSFYWQGQVITASVADIIANYSFKDILRKLAGEKQTEVAPASYDDSYLGYSVAAGEFTGDSQQGYDNLSGSYLLIFK

SEQ ID NO: 688 - protein, 294 aa, Artificial Sequence
  Synthetic polypeptide
MQGARAPRDQGRSPGRMSALGRSSVILLTYVLAATELTCLFMQFSIVPYLSRKLGLDSIAFGYLQTTFGVLQLLGGPVFGRFADQRGARAALTLSFLAALALYLLLAAASSPALPGVYLLFASRLPGALMHTLPAAQMVITDLSAPEERPAALGRLGLCFGVGVILGSLLGGTLVSAYGIQCPAILAALATLLGAVLSFTCIPASTKGAKTDAQAPLPGGPRASVFDLKAIASLLRLPDVPRIFLVKVASNCPTGLFMVMFSIISMDFFQLEAAQAGYLMSFFGLLQMGPWQMR

SEQ ID NO: 689 - protein, 294 aa, Artificial Sequence; identical to SEQ ID NO: 688
  Synthetic polypeptide

SEQ ID NO: 690 - protein, 294 aa, Artificial Sequence; identical to SEQ ID NO: 688
  Synthetic polypeptide

SEQ ID NO: 691 - protein, 294 aa, Artificial Sequence
  Synthetic polypeptide
MIQTVPDPAAHIKEALSVVSEDQSLFECAYGTPHLAKTEMTASSSSDYGQTSKMSPRVPQQDWLSQPPARVTIKMECNPSQVNGSRNSPDECSVAKGGKMVGSPDTVGMNYGSYMEEKHMPPPNMTTNERRVIVPADPTLWSTDHVRQWLEWAVKEYGLPDVNILLFQNIDGKELCKMTKDDFQRLTPSYNADILLSHLHYLRETPLPHLTSDDVDKALQNSPRLMHARNTGGAAFIFPNTSVYPEATQRITTRPAAQPSPSTVPKTEDQRPQLDPYQILGPTSSRLANPGWTQ

SEQ ID NO: 692 - protein, 294 aa, Artificial Sequence
  Synthetic polypeptide
MSPWSWFLLQTLCLLPTGAASRRGAPGTANCELKPQQSELNSFLWTIKRDPPSYFFGTIHVPYTRVWDFIPDNSKEAFLQSSIVYFELDLTDPYTISALTSCQMLPQGENLQDVLPRDIYCRLKRHLEYVKLMMPLWMTPDQRGKGLYADYLFNAIAGNWERKRPVWVMLMVNSLTEVDIKSRGVPVLDLFLAQEAERLRKQTGAVEKVEEQCHPLNGLNFSQVPNFINATLPPQERITAQEIDSYLRRELIYKRNERIGKRVKALLEEFPDKGFFFAFGAGSCSHITSSGRSY

SEQ ID NO: 693 - protein, 293 aa, Artificial Sequence
  Synthetic polypeptide
MIQTVPDPAAHIKEALSVVSEDQSLFECAYGTPHLAKTEMTASSSSDYGQTSKMSPRVPQQDWLSQPPARVTIKMECNPSQVNGSRNSPDECSVAKGGKMVGSPDTVGMNYGSYMEEKHMPPPNMTTNERRVIVPADPTLWSTDHVRQWLEWAVKEYGLPDVNILLFQNIDGKELCKMTKDDFQRLTPSYNADILLSHLHYLRETPLPHLTSDDVDKALQNSPRLMHARNTDLPYEPPRRSAWTGHGHPTPQSKAAQPSPSTVPKTEDQRPQLDPYQILGPTSSRLANPGWTQ

SEQ ID NO: 694 - protein, 293 aa, Artificial Sequence; identical to SEQ ID NO: 693
  Synthetic polypeptide

SEQ ID NO: 695 - protein, 291 aa, Artificial Sequence
  Synthetic polypeptide
MGYSRAVEIGPDQDLDVVEITENSQELRMRNSSGPCLSGSLVSLHCLACGKSLKTPRVVGVEEASVDSWPWQVSIQYDKQHVCGGSILDPHWVLTAAHCFRKHTDVFNWKVRAGSDKLGSFPSLAVAKIIIIEFNPMYPKDNDIALMKLQFPLTFSGTVRPICLPFFDEELTPATPLWIIGWGFTKQNGGKMSDILLQASVQVIDSTRCNADDAYQGEVTEKMMCAGIPEGGVDTCQGDSGGPLMYQSDQWHVVGIVSWGYGCGGPSTPGVYTKVSAYLNWIYNVWKGQVL

SEQ ID NO: 696 - protein, 291 aa, Artificial Sequence
  Synthetic polypeptide
MGLPWGQPHLGLQMLLLALNCLRPSLSLELVPYTPQITAWDLEGKVTATTFSLEQPRCVFDGLASASDTVWLVVAFSNASRGFQNPETLADIPASPQLLTDGHYMTLPLSPDQLPCGDPMAGSGGAPVLRVGHDHGCHQQPFCNAPLPGPGPYRVKFLLMDTRGSPRAETKWSDPITLHQGKTPGSIDTWPGRRSGSMIVITSILSSLAGLLLLAFLAASTMRFSSLWWPEEAPEQLRIGSFMGKRYMTHHIPPREAATLPKRACFPFAFCRDCQLLEGSPAMLPVQPAKL

SEQ ID NO: 697 - protein, 291 aa, Artificial Sequence; identical to SEQ ID NO: 696
  Synthetic polypeptide

SEQ ID NO: 698 - protein, 291 aa, Artificial Sequence; identical to SEQ ID NO: 696
  Synthetic polypeptide

SEQ ID NO: 699 - protein, 291 aa, Artificial Sequence; identical to SEQ ID NO: 696
  Synthetic polypeptide

SEQ ID NO: 700 - protein, 291 aa, Artificial Sequence
  Synthetic polypeptide
MDQTKFPIVNAELSFFGHAHLGTGDPYTPGFPSFNHTQFPPSRSSGLPNIPVQTISRAAAEKLFGNMEGDCPSDWKTDSTCRMVTSESKNVKLTVSNVLKEIKILNIFGVIKGFVEPDHYVVVGAQRDAWGPGAAKSGVGTALLLKLAQMFSDMVLKDGFQPSRSIIFASWSAGDFGSVGATEWLEGYLSSLHLKAFTYINLDKAVLGTSNFKVSASPLLYTLIEKTMQNVKHPVTGQFLYQDSNWASKVEKLTLDNAAFPFLAYSGIPAVSFCFCEARGSHDCITALQPG

SEQ ID NO: 701 - protein, 291 aa, Artificial Sequence
  Synthetic polypeptide
MDQTKFPIVNAELSFFGHAHLGTGDPYTPGFPSFNHTQFPPSRSSGLPNIPVQTISRAAAEKLFGNMEGDCPSDWKTDSTCRMVTSESKNVKLTVSNVLKEIKILNIFGVIKGFVEPDHYVVVGAQRDAWGPGAAKSGVGTALLLKLAQMFSDMVLKDGFQPSRSIIFASWSAGDFGSVGATEWLEGYLSSLHLKAFTYINLDKAVLGTSNFKVSASPLLYTLIEKTMQNVKHPVTGQFLYQDSNWASKVEKLTLDNAAFPFLAYSGIPAVSFCFCEAAGSHDCITALQPG

SEQ ID NO: 702 - protein, 290 aa, Artificial Sequence
  Synthetic polypeptide
MATKTELSPTARESKNAQDMQVDETLIPRKVPSLCSARYGIALVLHFCNFTTIAQNVIMNITMVAMVNSTSPQSQLNDSSEVLPVDSFGGLSKAPKSLPAKAPVYDWSPQIQGIIFGAVGYGGILTMAPSGYLAGRVGTKRVVGISLFATSFLTLCIPLATDFGIVLLIVTRIVQGLSQSSILGGQFAIWEKWGPPQERSRLCSIALSGMLLGCFTAILIGGFISETLGWPFVFYIFGGVGCVCCLLWFVVIYDDPVSYPWISTSEKEYIISSLKQQAELPCPGNHPETH

SEQ ID NO: 703 - protein, 290 aa, Artificial Sequence
  Synthetic polypeptide
MLVPVGWMNESYYAVLYPMVYPMKITGNRAVMALVYIWLHSLIGCLPPLFGWSSVEFDEFKWMCVAAWHREPGYTAFWQIWCALFPFLVMLVCYGFIFRVARVKARKVHCGTVVIVEEDAQRTGRKNSSTSTSSSGSRRNAFQGVVYSANQCKALITILVVLGAFMVTWGPYMVVIASEALWGKSSVSPSLETWATWLSFASAVCHPLIYGLWNKTVRKELLGMCFGDRYYREPFVQRQRTSRLFSISNRITDLGLSPHLTALMAGGQPLGHSSSTGDTGFSCSQDSGQL

SEQ ID NO: 704 - protein, 288 aa, Artificial Sequence
  Synthetic polypeptide
MDQTKFPIVNAELSFFGHAHLGTGDPYTPGFPSFNHTQFPPSRSSGLPNIPVQTISRAAAEKLFGNMEGDCPSDWKTDSTCRMVTSESKNVKLTVSNVLKEIKILNIFGVIKGFVEPDHYVVVGAQRDAWGPGAAKSGVGTALLLKLAQMFSDMVLKDGFQPSRSIIFASWSAGDFGSVGATEWLEGYLSSLHLKAFTYINLDKAVLGTSNFKVSASPLLYTLIEKTMQNVKHPVTGQFLYQDSNWASKVEKLTLDNAAFPFLAYSGIPAVSFCFCEAAGSHDCIAAL

SEQ ID NO: 705 - protein, 287 aa, Artificial Sequence
  Synthetic polypeptide
MRLLALAAAALLARAPAPEVCAALNVTVSPGPVVDYLEGENATLLCHVSQKRRKDSLLAVRWFFAHSFDSQEALMVKMTKLRVVQYYGNFSRSAKRRRLRLLEEQRGALYRLSVLTLQPSDQGHYVCRVQEISRHRNKWTAWSNGSSATEMRVISLKASEESSFEKTKETWAFFEDLYVYAVLVCCVGILSILLFMLVIVWQSVFNKRKSRVRHYLVKCPQNSSGETVTSVTSLAPLQPKKGKRQKEKPDIPPAVPAKAPIAPTFHKPKLLKPQRKVTLPVVNIYPH

SEQ ID NO: 706 - protein, 287 aa, Artificial Sequence
  Synthetic polypeptide
MASTIKEALSVVSEDQSLFECAYGTPHLAKTEMTASSSSDYGQTSKMSPRVPQQDWLSQPPARVTIKMECNPSQVNGSRNSPDECSVAKGGKMVGSPDTVGMNYGSYMEEKHMPPPNMTTNERRVIVPADPTLWSTDHVRQWLEWAVKEYGLPDVNILLFQNIDGKELCKMTKDDFQRLTPSYNADILLSHLHYLRETPLPHLTSDDVDKALQNSPRLMHARNTGGAAFIFPNTSVYPEATQRITTRPAAQPSPSTVPKTEDQRPQLDPYQILGPTSSRLANPGWTQ

SEQ ID NO: 707 - protein, 286 aa, Artificial Sequence
  Synthetic polypeptide
MASTIKEALSVVSEDQSLFECAYGTPHLAKTEMTASSSSDYGQTSKMSPRVPQQDWLSQPPARVTIKMECNPSQVNGSRNSPDECSVAKGGKMVGSPDTVGMNYGSYMEEKHMPPPNMTTNERRVIVPADPTLWSTDHVRQWLEWAVKEYGLPDVNILLFQNIDGKELCKMTKDDFQRLTPSYNADILLSHLHYLRETPLPHLTSDDVDKALQNSPRLMHARNTDLPYEPPRRSAWTGHGHPTPQSKAAQPSPSTVPKTEDQRPQLDPYQILGPTSSRLANPGWTQ

SEQ ID NO: 708 - protein, 285 aa, Artificial Sequence
  Synthetic polypeptide
MARKQNRNSKELGLVPLTDDTSHAGPPGPGRALLECDHLRSGVPGGRRRKDWSCSLLVASLAGAFGSSFLYGYNLSVVNAPTPYIKAFYNESWERRHGRPIDPDTLTLLWSVTVSIFAIGGLVGTLIVKMIGKVLGRKHTLLANNGFAISAALLMACSLQAGAFEMLIVGRFIMGIDGGVALSVLPMYLSEISPKEIRGSLGQVTAIFICIGVFTGQLLGLPELLGKESTWPYLFGVIVVPAVVQLLSLPFLPDSPRYLLLEKHNEARAVKGVVADACNLSYLGG

SEQ ID NO: 709 - protein, 284 aa, Artificial Sequence
  Synthetic polypeptide
MRLAVLFSGALLGLLAAQGTGNDCPHKKSATLLPSFTVTPTVTESTGTTSHRTTKSHKTTTHRTTTTGTTSHGPTTATHNPTTTSHGNVTVHPTSNSTATSQGPSTATHSPATTSHGNATVHPTSNSTATSPGFTSSAHPEPPPPSPSPSPTSKETIGDYTWTNGSQPCVHLQAQIQIRVMYTTQGGGEAWGISVLNPNKTKVQGSCEGAHPHLLLSFPYGHLSFGFMQDLQQKVVYLSYMAVEYNVSFPHAAQWTFSAQNASLRDLQAPLGQSFSCSEPSSRH

SEQ ID NO: 710 - protein, 284 aa, Artificial Sequence
  Synthetic polypeptide
MLTRPSQVLLNSLSVDPDAECKYGLYFRDGRRKVDYILVYHHKRPSGNRTLVRRVQHSDTPSGARSVKQDHPLPGKGASLDAGSGEPPMDYHEDDKRFRREEYEGNLLEAGLELERDEDTKIHGVGFVKIHAPWNVLCREAEFLKLKMPTKKMYHINETRGLLKKINSVLQKITDPIQPKVAEHRPQTMKRLSYPFSREKQHLFDLSDKDSFFDSKTRSTIVYEILKRTTCTKAKYSMGITSLLANGVYAAAYPLHDGDYNGENVEFNDRKPTQPTLKKCLWDE

SEQ ID NO: 711 - protein, 284 aa, Artificial Sequence
  Synthetic polypeptide
MECLYYFLGFLLLAARLPLDAAKRFHDVLGNERPSAYMREHNQLNGWSSDENDWNEKLYPVWKRGDMRWKNSWKGGRVQAVLTSDSPALVGSNITFAVNLIFPRCQKEDANGNIVYEKNCRNGQYFQKLGRCSVRVSVNTANVTLGPQLMEVTVYRRHGRAYVPIAQVKDVYVVTDQIPVFVTMFQKNDRNSSDETFLKDLPIMFDVLIHDPSHFLNYSTINYKWSFGDNTGLFVSTNHTVNHTYVLNGTFSLNLTVKAAAPGPCPPPPPPPRPSKPTPSLGGN

SEQ ID NO: 712 - protein, 283 aa, Artificial Sequence
  Synthetic polypeptide
MVDLCNSTKGICLTGPSGPPGPPGAGGLPGHNGLDGQPGPQGPKGEKGANGKRGKMGIPGAAGNPGERGEKGDHGELGLQGNEGPPGQKGEKGDKGDVSNDVLLAGAKGDQGPPGPPGPPGPPGPPGPPGSRRAKGPRQPSMFNGQCPGETCAIPNDDTLVGKADEKASEHHSPQAESMITSIGNPVQVLKVTETFGTWIRESANKSDDRIWVTEHFSGIMVKEFKDQPSLLNGSYTFIHLPYYFHGCGHVVYNNSLYYHKGGSNTLVRADTLRSIRVCRLNE

SEQ ID NO: 713 - protein, 282 aa, Artificial Sequence
  Synthetic polypeptide
MGLPWGQPHLGLQMLLLALNCLRPSLSLGEWGSWMDASSQTQGAGGPAGVIGPWAPAPLRLGEAAPGTPTPVSVAHLLSPVATELVPYTPQITAWDLEGKVTATTFSLEQPRCVFDGLASASDTVWLVVAFSNASRGFQNPETLADIPASPQLLTDGHYMTLPLSPDQLPCGDPMAGSGGAPVLRVGHDHGCHQQPFCNAPLPGPGPYREDPRIHRHLARAAKWQHDRHYLHPLFSGRPPTLGLLGSLYHALKRACFPFAFCRDCQLLEGSPAMLPVQPAKL

SEQ ID NO: 714 - protein, 282 aa, Artificial Sequence; identical to SEQ ID NO: 713
  Synthetic polypeptide

SEQ ID NO: 715 - protein, 282 aa, Artificial Sequence; identical to SEQ ID NO: 713
  Synthetic polypeptide

SEQ ID NO: 716 - protein, 282 aa, Artificial Sequence; identical to SEQ ID NO: 713
  Synthetic polypeptide

SEQ ID NO: 717 - protein, 282 aa, Artificial Sequence; identical to SEQ ID NO: 713
  Synthetic polypeptide

SEQ ID NO: 718 - protein, 282 aa, Artificial Sequence; identical to SEQ ID NO: 713
  Synthetic polypeptide

SEQ ID NO: 719 - protein, 282 aa, Artificial Sequence
  Synthetic polypeptide
MPANFTEGSFDSSGTGQTLDSSPVACTETVTFTEVVEGKEWGSFYYSFKTEQLITLWVLFVFTIVGNSVVLFSTWRRKKKSRMTFFVTQLAITEKQARVLIVIAWSLSFLFSIPTLIIFGKRTLSNGEVQCWALWPDDSYWTPYMTIVAFLVYFIPLTIISIMYGIVIRTIWIKSKTYETVISNCSDGKLCSSYNRGLISKAKIKAIKYSIIIILAFICCWSPYFLFDILDNFNLLPDTQERFYASVIIQNLPALNSAINPLIYCVFSSSISFPCRIIDGND

SEQ ID NO: 720 - protein, 282 aa, Artificial Sequence
  Synthetic polypeptide
MKPGCAAGSPGNEWIFFSTDEITTRYRNTMSNGGLQRSVILSALILLRAVTGFSGDGRAIWSKNPNFTPVNESQLFLYDTFPKNFFWGIGTGALQVEGSWKKDGKGPSIWDHFIHTHLKNVSSTNGSSDSYIFLEKDLSALDFIGVSFYQFSISWPRLFPDGIVTVANAKGLQYYSTLLDALVLRNIEPIVTLYHWDLPLALQEKYGGWKNDTIIDIFNDYATYCFQMFGDRVKYWITIHNPYLVAWHGYGTGMHAPGEKGNLAAVYTVGHNLIKNGTFESL

SEQ ID NO: 721 - protein, 279 aa, Artificial Sequence
  Synthetic polypeptide
MCCSTHLFQPLQLAGGLEWPWSNLLCFLTPVKLHPEVWGLFPNQQSQEHAAFRFALSQLTEPPKLLPQIDIVNISDSFEMTYRFCSQFSKGVYAIFGFYERRTVNMLTSFCGALHVCFITPSFPVDTSNQFVLQLRPELQDALISIIDHYKWQKFVYIYDADRGLSVLQKVLDTAAEKNWQVTAVNILTTTEEGYRMLFQDLEKKKERLVVVDCESERLNAILGQIIKLEKNGIGYHYILANLASCFCCKTFPELQDQVWVHSFCSIITCVILAFLTRP

SEQ ID NO: 722 - protein, 279 aa, Artificial Sequence; identical to SEQ ID NO: 721
  Synthetic polypeptide

SEQ ID NO: 723 - protein, 277 aa, Artificial Sequence
  Synthetic polypeptide
MSPWSWFLLQTLCLLPTGAASRRGAPGTANCELKPQQSELNSFLWTIKRDPPSYFFGTIHVPYTRVWDFIPDNSKEAFLQSSIVYFELDLTDPYTISALTSCQMLPQGENLQDVLPRDIYCRLKRHLEYVKLMMPLWMTPDQRGKGLYADYLFNAIAGNWERKRPVWVMLMVNSLTEVDIKSRGVPVLDLFLAQEAERLRKQTGAVEKVEEQCHPLNGLNFSQHFSFLLPCDEGHVCFLFCHGCKFPEASSALQNRESIKPSSFINYPVLGMSLLAA

SEQ ID NO: 724 - protein, 277 aa, Artificial Sequence; identical to SEQ ID NO: 723
  Synthetic polypeptide

SEQ ID NO: 725 - protein, 277 aa, Artificial Sequence; identical to SEQ ID NO: 723
  Synthetic polypeptide

SEQ ID NO: 726 - protein, 276 aa, Artificial Sequence
  Synthetic polypeptide
MAQKEGGRTVPCCSRPKVAALTAGTLLLLTAIGAASWAIVAVLLRSDQEPLYPVQVSSADARLMVFDKTEGTWRLLCSSRSNARVAGLSCEEMGFLRALTHSELDVRTAGANGTSGFFCVDEGRLPHTQRLLEVISVCDCPRGRFLAAICQDCGRRKLPVDRIVGGRDTSLGRWPWQVSLRYDGAHLCGGSLLSGDWVLTAAHCFPERNRVLSRWRVFAGAVAQASPHGLQLGVQAVVYHGGYLPFRDPNSEENSNDIALVHLSSPLPLTGQEVYT

SEQ ID NO: 727 - protein, 276 aa, Artificial Sequence; identical to SEQ ID NO: 726
  Synthetic polypeptide

SEQ ID NO: 728 - protein, 273 aa, Artificial Sequence
  Synthetic polypeptide
MRRQWGALLLGALLCAHGLASSPECACGRSHFTCAVSALGECTCIPAQWQCDGDNDCGDHSDEDGCILPTCSPLDFHCDNGKCIRRSWVCDGDNDCEDDSDEQDCPPRECEEDEFPCQNGYCIRSLWHCDGDNDCGDNSDEQCDMRKCSDKEFRCSDGSCIAEHWYCDGDTDCKDGSDEENCPSAVPAPPCNLEEFQCAYGRCILDIYHCDGDDDCGDWSDESDCSSHQPCRSGEFMCDSGLCINAGWRCDGDADCDDQSDERNCTGCGGACL

SEQ ID NO: 729 - protein, 272 aa, Artificial Sequence
  Synthetic polypeptide
MRLAVLFSGALLGLLAAQGTGNDCPHKKSATLLPSFTVTPTVTESTGTTSHRTTKSHKTTTHRTTTTGTTSHGPTTATHNPTTTSHGNVTVHPTSNSTATSQGPSTATHSPATTSHGNATVHPTSNSTATSPGFTSSAHPEPPPPSPSPSPTSKETIGDYTWTNGSQPCVHLQAQIQIRVMYTTQGGGEAWGISVLNPNKTKVQGSCEGAHPHLLLSFPYGHLSFGFMQDLQQKVVYLSYMAVEVAVSRHRATKPRSRHCTPAWATEPDCLK

SEQ ID NO: 730 - protein, 272 aa, Artificial Sequence
  Synthetic polypeptide
MGLPWGQPHLGLQMLLLALNCLRPSLSLELVPYTPQITAWDLEGKVTATTFSLEQPRCVFDGLASASDTVWLVVAFSNASRGFQNPETLADIPASPQLLTDGHYMTLPLSPDQLPCGDPMAGSGGAPVLRVGHDHGCHQQPFCNAPLPGPGPYRVKFLLMDTRGSPRAETKWSDPITLHQGKTPGSIDTWPGRRSGSMIVITSILSSLAGLLLLAFLAASTMRLNVPASPSPSAVIVSFLRAPQPCFLYSLQNCESIKPLFFINSPVSSSSL

SEQ ID NO: 731 - protein, 272 aa, Artificial Sequence; identical to SEQ ID NO: 730
  Synthetic polypeptide

SEQ ID NO: 732 - protein, 272 aa, Artificial Sequence
  Synthetic polypeptide
MGLPWGQPHLGLQMLLLALNCLRPSLSLELVPYTPQITAWDLEGKVTATTFSLEQPRCVFDGLASASDTVWLVVAFSNASRGFQNPETLADIPASPQLLTDGHYMTLPLSPDQLPCGDPMAGSGGAPVLRVGHDHGCHQQPFCNAPLPGPGPYRVKFLLMDTRGSPRAETKWSDPITLHQGKTPGSIDTWPGRRSGSMIVITSILSSLAGLLLLAFLAASTMRLNVPASPSPSAVIVSFLRAPQPCFLYSLQNCESIKPLFFINSPVSSSSS

SEQ ID NO: 733 - protein, 272 aa, Artificial Sequence; identical to SEQ ID NO: 732
  Synthetic polypeptide

SEQ ID NO: 734 - protein, 272 aa, Artificial Sequence
  Synthetic polypeptide
MISPDPRPSPGLARWAESYEAKCERRQEIRESRRCRPNVTTCRQVGKTLRIQQREQLQRARLQQFFRRRNLELEEKGKAQHPQAREQGPSRRPGQVTVLKEPLSCARRISSPREQVTGTSSEVFPAQHPPPSGICRDLSDHLSSQAGGLPPQDTPIKKPPKHHRGTQTKAEGPTIKNDASQQTNYGVAVLDKEIIQLSDYLKEALQRELVLKQKMVILQDLLSTLIQASDSSWKGQLNEDKLKGKLRSLENQLYTCTQLRIWHTEAQCVFVE

SEQ ID NO: 735 - protein, 272 aa, Artificial Sequence; identical to SEQ ID NO: 734
  Synthetic polypeptide

SEQ ID NO: 736 - protein, 272 aa, Artificial Sequence; identical to SEQ ID NO: 734
  Synthetic polypeptide

SEQ ID NO: 737 - protein, 272 aa, Artificial Sequence
  Synthetic polypeptide
MVYPMKITGNRAVMALVYIWLHSLIGCLPPLFGWSSVEFDEFKWMCVAAWHREPGYTAFWQIWCALFPFLVMLVCYGFIFRVARVKARKVHCGTVVIVEEDAQRTGRKNSSTSTSSSGSRRNAFQGVVYSANQCKALITILVVLGAFMVTWGPYMVVIASEALWGKSSVSPSLETWATWLSFASAVCHPLIYGLWNKTVRKELLGMCFGDRYYREPFVQRQRTSRLFSISNRITDLGLSPHLTALMAGGQPLGHSSSTGDTGFSCSQDSGQL

SEQ ID NO: 738 - protein, 272 aa, Artificial Sequence
  Synthetic polypeptide
MEPGRTQIKLDPRYTADLLEVLKTNYGIPSACFSQPPTAAQLLRALGPVELALTSILTLLALGSIAIFLEDAVYLYKNTLCPIKRRTLLWKSSAPTVVSVLCCFGLWIPRSLVLVEMTITSFYAVCFYLLMLVMVEGFGGKEAVLRTLRDTPMMVHTGPCCCCCPCCPRLLLTRKKLQLLMLGPFQYAFLKITLTLVGLFLVPDGIYDPADISEGSTALWINTFLGVSTLLALWTLGIISRQARLHLGEQNMGAKFALFQGFAVLAGLVSSS

SEQ ID NO: 739 - protein, 271 aa, Artificial Sequence
  Synthetic polypeptide
MRLAVLFSGALLGLLAESTGTTSHRTTKSHKTTTHRTTTTGTTSHGPTTATHNPTTTSHGNVTVHPTSNSTATSQGPSTATHSPATTSHGNATVHPTSNSTATSPGFTSSAHPEPPPPSPSPSPTSKETIGDYTWTNGSQPCVHLQAQIQIRVMYTTQGGGEAWGISVLNPNKTKVQGSCEGAHPHLLLSFPYGHLSFGFMQDLQQKVVYLSYMAVEYNVSFPHAAQWTFSAQNASLRDLQAPLGQSFSCSNSSIILSPAVRSLRPAWPTW

SEQ ID NO: 740 - protein, 271 aa, Artificial Sequence
  Synthetic polypeptide
MVCFRLFPVPGSGLVLVCLVLGILTVDELLAIRIPLNDLFRCNSLSTLEKNDVVQHYWDVLVQAFVQNGTVSTNEFLCDKDKTSTVAPTIHTTVPSPTTTPTPKEKPEAGTYSVNNGNDTCLLATMGLQLNITQDKVASVININPNTTHSTGSCRSHTALLRLNSSTIKYLDFVFAVKNENRFYLKEVNISMYLVNGSVFSIANNNLSYWDAPLGSSYMCNKEQTVSVSGAFQINTFDLRVQPFNVTQGKYSTGHIWQPQLSGFLTEPRSK

SEQ ID NO: 741 - protein, 269 aa, Artificial Sequence
  Synthetic polypeptide
MQHIFAFFCTGFLGAVVGANFPNNIQIGGLFPNQQSQEHAAFRFALSQLTEPPKLLPQIDIVNISDSFEMTYRFCSQFSKGVYAIFGFYERRTVNMLTSFCGALHVCFITPSFPVDTSNQFVLQLRPELQDALISIIDHYKWQKFVYIYDADRGLSVLQKVLDTAAEKNWQVTAVNILTTTEEGYRMLFQDLEKKKERLVVVDCESERLNAILGQIIKLEKNGIGYHYILANLASCFCCKTFPELQDQVWVHSFCSIITCVILAFLTRP

SEQ ID NO: 742 - protein, 269 aa, Artificial Sequence; identical to SEQ ID NO: 741
  Synthetic polypeptide

SEQ ID NO: 743 - protein, 266 aa, Artificial Sequence
  Synthetic polypeptide
MHRRRSRSCREDQKPVMDDQRDLISNNEQLPMLGRRPGAPESKCSRGALYTGFSILVTLLLAGQATTAYFLYQQQGRLDKLTVTSQNLQLENLRMKLPKPPKPVSKMRMATPLLMQALPMGALPQGPMQNATKYGNMTEDHVMHLLQNADPLKVYPPLKGSFPENLRHLKNTMETIDWKVFESWMHHWLLFEMSRHSLEQKPTDAPPKVLTKCQEEVSHIPAVHPGSFRPKCDENGNYLPLQCYGSIGYCWGWGPHWMHNVMSVLS

SEQ ID NO: 744 - protein, 266 aa, Artificial Sequence
  Synthetic polypeptide
MGLRIHFVVDPHGWCCMGLIVFVWLYNIVLIPKIVLFPHYEEGHIPGILIIIFYGISIFCLVALVRASITDPGRLPENPKIPHGEREFWELCNKCNLMRPKRSHHCSRCGHCVRRMDHHCPWINNCVGEDNHWLFLQLCFYTELLTCYALMFSFCHYYYFLPLKKRNLDLFVFRHELAIMRLAAFMGITMLVGITGLFYTQLIGIITMLFHCQGLPPHIFLENTCSPLWTIQLSLPGGTLSLTFPEDFLLHVLQGHHLSCFHYSMN

SEQ ID NO: 745 - protein, 266 aa, Artificial Sequence
  Synthetic polypeptide
MYRDPEAASPGAPSRDVLLVSAIITVSLSVTVVLCGLCHWCQRKLGKRYKNSLETVGTPDSGRGRSEKKAINDLDRDFWNNNESTVQQKWSSYPPKEFILNISPYAPYGDPRLSLKLPAGGKAVNTAPVPGQTPHDESDRRTEPRSSVSDLVNSLTSEMLMLSPGSEEDEAHEGCSRENLGRIQFSVGYNFQESTLTVKIMKAQELPAKDFSGTSDPFVKIYLLPDKKHKLETKVKRKNLNPHWNETFLFEAGSLGKYFKPSEPHL

SEQ ID NO: 746 - protein, 266 aa, Artificial Sequence
  Synthetic polypeptide
MWLKVGGLLRGTGGQLGQTVGWPCGALGPGPHRWGPCGGSWAQKFYQDGPGRGLGEEDIRRAREARPRKTPRPQLSDRSRERKVPASRISRLANFGGLAVGLGLGVLAEMAKKSMPGGRLQSDNSFISPQLQHIFERVRQSADFMPRWQMLRVLEEELGRDWQAKVASLEEVPFAAASIGQVHQGLLRDGTEVAVKIQYPGIAQSIQSDVQNLLAVLKMSAALPAGLFAEQSLQALQQELAWECDYRREAACAQNFRLWEKVVEAF

SEQ ID NO: 747 - protein, 266 aa, Artificial Sequence; identical to SEQ ID NO: 746
  Synthetic polypeptide

SEQ ID NO: 748 - protein, 264 aa, Artificial Sequence
  Synthetic polypeptide
MLTPLGKFSTAKFAVRLPRVWEARAPSLSGAPAPTPPAPPPSRSSRLGLWPRCFLIFPQLRILLLGPQESNNSTGTMWKVSALLFVLGSASLWVLAEGASTGQPEDDTETTGLEGGVAMPGAEDDVVTPGTSEDRYKSGLTTLVATSVNSVTGIRIEDLPTSESTVHAQEQSPSATASNVATSHSTEKVDGDTQTTVEKDGLSTVTLVGIIVGVLLAIGFIGAIIVVVMRKMSGRYSSFGLGEVSCHVVRMLKQPYGDTHMTKN

SEQ ID NO: 749 - protein, 262 aa, Artificial Sequence
  Synthetic polypeptide
MCPGLPRPMSRSSFQLFLQPFFICYKLNICSTRLSSSPMARSPGNVCVPPTGWSLECLQDWASFLRLAIPSMLMLCMEWWAYEVGSFLSGILGMVELGAQSIVYELAIIVYMVPAGFSVAASVRVGNALGAGDMEQARKSSTVSLLITVLFAVAFSVLLLSCKDHVGYIFTTDRDIINLVAQVVPIYAVSHLFEALACTSGGVLRGSGNQKVGAIVNTIGYYVVGLPIGIALMFATTLGVMAGETACCKLGPALSITAERTC

SEQ ID NO: 750 - protein, 262 aa, Artificial Sequence
  Synthetic polypeptide
MSWPRRLLLRYLFPALLLHGLGEGSALLHPDSRSHPRSLEKSAWRAFKESQCHHMLKHLHNGARITVQMPPTIEGHWVSTGCEVRSGPEFITRSYRFYHNNTFKAYQFYYGSNRCTNPTYTLIIRGKIRLRQASWIIRGGTEADYQLHNVQVICHTEAVAEKLGQQVNRTCPGFLADGGPWVQDVAYDLWREENGCECTKAVNFAMHELQLIRVEKQYLHHNLDHLVEELFLGDIHTDATQRMFYRPSSYQPPLQNAKEPLQ

SEQ ID NO: 751 - protein, 261 aa, Artificial Sequence
  Synthetic polypeptide
MAGPRPSPWARLLLAALISVSLSGTLANRCKKAPVKSCTECVRVDKDCAYCTDEMFRDRRCNTQAELLAAGCQRESIVVMESSFQITEETQIDTTLRRSQMSPQGLRVRLRPGEERHFELEVFEPLESPVDLYILMDFSNSMSDDLDNLKKMGQNLARVLSQLTSDYTIGFGKFVDKVSVPQTDMRPEKLKEPWPNSDPPFSFKNVISLTEDVDEFRNKLQGERISGNLDAPEGGFDAILQTAVCTKTQKLAGCDARLWPQ

SEQ ID NO: 752 - protein, 261 aa, Artificial Sequence; identical to SEQ ID NO: 751
  Synthetic polypeptide

SEQ ID NO: 753 - protein, 261 aa, Artificial Sequence; identical to SEQ ID NO: 751
  Synthetic polypeptide

SEQ ID NO: 754 - protein, 261 aa, Artificial Sequence; identical to SEQ ID NO: 751
  Synthetic polypeptide

SEQ ID NO: 755 - protein, 261 aa, Artificial Sequence; identical to SEQ ID NO: 751
  Synthetic polypeptide

SEQ ID NO: 756 - protein, 261 aa, Artificial Sequence
  Synthetic polypeptide
MAMDEYLWMVILGFIIAFILAFSVGANDVANSFGTAVGSGVVTLRQACILASIFETTGSVLLGAKVGETIRKGIIDVNLYNETVETLMAGEVSAMVGSAVWQLIASFLRLPISGTHCIVGSTIGFSLVAIGTKGVQWMELVKIVASWFISPLLSGFMSGLLFVLIRIFILKKEDPVPNGLRALPVFYAATIAINVFSIMYTGAPVLGLVLPMWAIALISFGVALLFAFFVWLFVCPWMRRKITGKWVTKLSKFMRWTTTQQ

SEQ ID NO: 757 - protein, 261 aa, Artificial Sequence; identical to SEQ ID NO: 756
  Synthetic polypeptide

SEQ ID NO: 758 - protein, 261 aa, Artificial Sequence; identical to SEQ ID NO: 756
  Synthetic polypeptide

SEQ ID NO: 759 - protein, 260 aa, Artificial Sequence
  Synthetic polypeptide
MASESSPLLAYRLLGEEGVALPANGAGGPGGASARKLSTFLGVVVPTVLSMFSIVVFLRIGFVVGHAGLLQALAMLLVAYFILALTVLSVCAIATNGAVQGGGAYFMISRTLGPEVGGSIGLMFYLANVCGCAVSLLGLVESVLDVFGADATGPSGLRVLPQGYGWNLLYGSLLLGLVGGVCTLGAGLYARASFLTFLLVSGSLASVLISFVAVGPRDIRLTPRPGPNGSSLPPRFGHFTGFNSSTLKDNLGAGHAGLHL

SEQ ID NO: 760 - protein, 260 aa, Artificial Sequence; identical to SEQ ID NO: 759
  Synthetic polypeptide

SEQ ID NO: 761 - protein, 260 aa, Artificial Sequence; identical to SEQ ID NO: 759
  Synthetic polypeptide

SEQ ID NO: 762 - protein, 260 aa, Artificial Sequence
  Synthetic polypeptide
MAMDEYLWMVILGFIIAFILAFSVGANDVANSFGTAVGSGVVTLRQACILASIFETTGSVLLGAKVGETIRKGIIDVNLYNETVETLMAGEVSAMVGSAVWQLIASFLRLPISGTHCIVGSTIGFSLVAIGTKGVQWMELVKIVASWFISPLLSGFMSGLLFVLIRIFILKKEDPVPNGLRALPVFYAATIAINVFSIMYTGAPVLGLVLPMWAIALISFGVALLFAFFVWLFVCPWMRRKITGKGFRVCPLAAGHNLDA

SEQ ID NO: 763 - protein, 260 aa, Artificial Sequence; identical to SEQ ID NO: 762
  Synthetic polypeptide

SEQ ID NO: 764 - protein, 260 aa, Artificial Sequence; identical to SEQ ID NO: 762
  Synthetic polypeptide

SEQ ID NO: 765 - protein, 258 aa, Artificial Sequence
  Synthetic polypeptide
MALLLCFVLLCGVVDFARSLSITTPEEMIEKAKGETAYLPCKFTLSPEDQGPLDIEWLISPADNQKVDQVIILYSGDKIYDDYYPDLKGRVHFTSNDLKSGDASINVTNLQLSDIGTYQCKVKKAPGVANKKIHLVVLVKPSGARCYVDGSEEIGSDFKIKCEPKEGSLPLQYEWQKLSDSQKMPTSWLAGKMCHLQRAVRPLPEATSAVIIHPWGPCLLPTWKDIPRLSITKYQVKTLNALLRVRLSHLLRHRESSP

SEQ ID NO: 766 - protein, 258 aa, Artificial Sequence
  Synthetic polypeptide
MAMDEYLWMVILGFIIAFILAFSVGANDVANSFGTAVGSGVVTLRQACILASIFETTGSVLLGAKVGETIRKGIIDVNLYNETVETLMAGEVSAMVGSAVWQLIASFLRLPISGTHCIVGSTIGFSLVAIGTKGVQWMELVKIVASWFISPLLSGFMSGLLFVLIRIFILKKEDPVPNGLRALPVFYAATIAINVFSIMYTGAPVLGLVLPMWAIALISFGVALLFAFFVWLFVCPWMRRKITAQSGNNPCVGQQANG

SEQ ID NO: 767 - protein, 258 aa, Artificial Sequence; identical to SEQ ID NO: 766
  Synthetic polypeptide

SEQ ID NO: 768 - protein, 258 aa, Artificial Sequence; identical to SEQ ID NO: 766
  Synthetic polypeptide

SEQ ID NO: 769 - protein, 257 aa, Artificial Sequence
  Synthetic polypeptide
MRLAVLFSGALLGLLAESTGTTSHRTTKSHKTTTHRTTTTGTTSHGPTTATHNPTTTSHGNVTVHPTSNSTATSQGPSTATHSPATTSHGNATVHPTSNSTATSPGFTSSAHPEPPPPSPSPSPTSKETIGDYTWTNGSQPCVHLQAQIQIRVMYTTQGGGEAWGISVLNPNKTKVQGSCEGAHPHLLLSFPYGHLSFGFMQDLQQKVVYLSYMAVEYNVSFPHAAQWTFSAQNASLRDLQAPLGQSFSCSEPSSRH

SEQ ID NO: 770 - protein, 257 aa, Artificial Sequence
  Synthetic polypeptide
MTSVAKVYYSQTTQTESRPLMGPGIRRRRVLTKDGRSNVRMEHIADKRFLYLKDLWTTFIDMQWRYKLLLFSATFAGTWFLFGVVWYLVAVAHGDLLELDPPANHTPCVVQVHTLTGAFLFSLESQTTIGYGFRYISEECPLAIVLLIAQLVLTTILEIFITGTFLAKIARPKKRAETIRFSQHAVVASHNGKPCLMIRVANMRKSLLIGCQVTGKLLQTHQTKEGENIRLNQGMERGGGTNRAVNHSTQNSKTGGN

SEQ ID NO: 771 - protein, 257 aa, Artificial Sequence
  Synthetic polypeptide
MGIQAGEPDPPEEPLTSQASVPPHQLRLGSLHPHTPYHIRVACTSSQGPSSWTHWLPVETPEGVPLGPPENISATRNGSQAFVHWQEPRAPLQGTLLGYRLAYQGQDTPEVLMDIGLRQEVTLELQGDGSVSNLTVCVAAYTAAGDGPWSLPVPLEAWRPGQAQPVHQLVKEPSTPAFSWPWWYVLLGAVVAAACVLILALFLVHRRKKETRYGEVFEPTVERGELVVRYRVRKSYSRRTTEATSFSAVFQRLPDVG

SEQ ID NO: 772 - protein, 256 aa, Artificial Sequence
  Synthetic polypeptide
MKLSKKDRGEDEESDSAKKKLDWSCSLLVASLAGAFGSSFLYGYNLSVVNAPTPYIKAFYNESWERRHGRPIDPDTLTLLWSVTVSIFAIGGLVGTLIVKMIGKVLGRKHTLLANNGFAISAALLMACSLQAGAFEMLIVGRFIMGIDGGVALSVLPMYLSEISPKEIRGSLGQVTAIFICIGVFTGQLLGLPELLGKESTWPYLFGVIVVPAVVQLLSLPFLPDSPRYLLLEKHNEARAVKGVVADACNLSYLGG

SEQ ID NO: 773 - protein, 256 aa, Artificial Sequence; identical to SEQ ID NO: 772
  Synthetic polypeptide

SEQ ID NO: 774 - protein, 255 aa, Artificial Sequence
  Synthetic polypeptide
TAKFAVRLPRVWEARAPSLSGAPAPTPPAPPPSRSSRLGLWPRCFLIFPQLRILLLGPQESNNSTGTMWKVSALLFVLGSASLWVLAEGASTGQPEDDTETTGLEGGVAMPGAEDDVVTPGTSEDRYKSGLTTLVATSVNSVTGIRIEDLPTSESTVHAQEQSPSATASNVATSHSTEKVDGDTQTTVEKDGLSTVTLVGIIVGVLLAIGFIGAIIVVVMRKMSGRYSSFGLGEVSCHVVRMLKQPYGDTHMTKN

SEQ ID NO: 775 - protein, 255 aa, Artificial Sequence
  Synthetic polypeptide
MGPGPSRAPRAPRLMLCALALMVAAGGCVVSAFNLDTRFLVVKEAGNPGSLFGYSVALHRQTERQQRYLLLAGAPRELAVPDGYTNRTGAVYLCPLTAHKDDCERMNITVKNDPGHHIIEDMWLGVTVASQGPAGRVLVCAHRYTQVLWSGSEDQRRMVGKCYVRGNDLELDSSDDWQTYHNEMCNSNTDYLETGMCQLGTSGGFTQNTVYFGAPGAYNWKGQAQWLTPVIPALWEAKADGSLEARSLRPAWPTW

SEQ ID NO: 776 - protein, 255 aa, Artificial Sequence; identical to SEQ ID NO: 775
  Synthetic polypeptide

SEQ ID NO: 777 - protein, 252 aa, Artificial Sequence
  Synthetic polypeptide
MISPDPRPSPGLARWAESYEAKCERRQEIRESRRCRPNVTTCRQVGKTLRIQQREQLQRARLQQFFRRRNLELEEKGKAQHPQAREQGPSRRPGQVTGTSSEVFPAQHPPPSGICRDLSDHLSSQAGGLPPQDTPIKKPPKHHRGTQTKAEGPTIKNDASQQTNYGVAVLDKEIIQLSDYLKEALQRELVLKQKMVILQDLLSTLIQASDSSWKGQLNEDKLKGKLRSLENQLYTCTQLRIWHTEAQCVFVE

SEQ ID NO: 778 - protein, 252 aa, Artificial Sequence; identical to SEQ ID NO: 777
  Synthetic polypeptide

SEQ ID NO: 779 - protein, 252 aa, Artificial Sequence; identical to SEQ ID NO: 777
  Synthetic polypeptide

SEQ ID NO: 780 - protein, 252 aa, Artificial Sequence
  Synthetic polypeptide
MARGDAPRDSYHLVGISFFILGLGTLLPWNFFITAIPYFQARLAGAGNSTARILSTNHTGPEDAFNFNNWVTLLSQLPLLLFTLLNSFLYQCVPETVRILGSLLAILLLFALTAALVKVDMSPGPFFSITMASVCFINSFSAVLQGSLFGQLGTMPSTYSTLFLSGQGLAGIFAALAMLLSMASGVDAETSALGYFITPCVGILMSIVCYLSLPHLKFARYYLANKSSQAQAQELETKAELLQSVSTSIKWG

SEQ ID NO: 781 - protein, 252 aa, Artificial Sequence; identical to SEQ ID NO: 780
  Synthetic polypeptide

SEQ ID NO: 782 - protein, 252 aa, Artificial Sequence; identical to SEQ ID NO: 780
  Synthetic polypeptide

SEQ ID NO: 783 - protein, 252 aa, Artificial Sequence; identical to SEQ ID NO: 780
  Synthetic polypeptide

SEQ ID NO: 784 - protein, 252 aa, Artificial Sequence; identical to SEQ ID NO: 780
  Synthetic polypeptide

SEQ ID NO: 785 - protein, 249 aa, Artificial Sequence
  Synthetic polypeptide
MLLHINPAYLFKLLHGFPPWIMPTDGNLGDKNFQMGKPGHREGATMHVKKYLLKGLHRLQKGPGYTYKELLVWYCDNTNTHGPKRIICEGPKKKAMWFLLTLLFAALVCWQWGIFIRTYLSWEVSVSLSVGFKTMDFPAVTICNASPFKYSKIKHLLKDLDELMEAVLERILAPELSHANATRNLNFSIWNHTPLVLIDERNPHHPMVLDLFGDNHNGLTSSSASEKICNAHGCKMAMRLLCCEASMGL

SEQ ID NO: 786 - protein, 248 aa, Artificial Sequence
  Synthetic polypeptide
MGGRVFLVFLAFCVWLTLPGAETQDSRGCARWCPQDSSCVNATACRCNPGFSSFSEIITTPMETCDDINECATLSKVSCGKFSDCWNTEGSYDCVCSPGYEPVSGAKTFKNESENTCQDMTFSTWTPPPGVHSQTLSRFFDKVQDLGRDYKPGLANNTIQSILQALDELLEAPGDLETLPRLQQHCVASHLLDGLEDVLRGLSKNLSNGLLNFSYPAGTDRCDGTTVAPASWEAEVRGSLEPRRLSLQ

SEQ ID NO: 787 - protein, 248 aa, Artificial Sequence; identical to SEQ ID NO: 786
  Synthetic polypeptide

SEQ ID NO: 788 - protein, 245 aa, Artificial Sequence
  Synthetic polypeptide
MRLAVLFSGALLGLLAESTGTTSHRTTKSHKTTTHRTTTTGTTSHGPTTATHNPTTTSHGNVTVHPTSNSTATSQGPSTATHSPATTSHGNATVHPTSNSTATSPGFTSSAHPEPPPPSPSPSPTSKETIGDYTWTNGSQPCVHLQAQIQIRVMYTTQGGGEAWGISVLNPNKTKVQGSCEGAHPHLLLSFPYGHLSFGFMQDLQQKVVYLSYMAVEVAVSRHRATKPRSRHCTPAWATEPDCLK

SEQ ID NO: 789 - protein, 245 aa, Artificial Sequence
  Synthetic polypeptide
MGLPWGQPHLGLQMLLLALNCLRPSLSLELVPYTPQITAWDLEGKVTATTFSLEQPRCVFDGLASASDTVWLVVAFSNASRGFQNPETLADIPASPQLLTDGHYMTLPLSPDQLPCGDPMAGSGGAPVLRVGHDHGCHQQPFCNAPLPGPGPYREDPRIHRHLARAAKWQHDRHYLHPLFSGRPPTLGLLGSLYHALLQPVVAGGGPGAAADRLLHGQALHDPPHPTQRGRHTAETCLLPLRLLP

SEQ ID NO: 790 - protein, 245 aa, Artificial Sequence; identical to SEQ ID NO: 789
  Synthetic polypeptide

SEQ ID NO: 791 - protein, 244 aa, Artificial Sequence
  Synthetic polypeptide
MRLAVLFSGALLGLLAAQGTGNDCPHKKSATLLPSFTVTPTVTESTGTTSHRTTKSHKTTTHRTTTTGTTSHGPTTATHNPTTTSHGNVTVHPTSNSTATSQGPSTATHSPATTSHGNATVHPTSNSTATSPGFTSSAHPEPPPPSPSPSPTSKETIGDYTWTNGSQPCVHLQAQIQIRVMYTTQGGGEAWGISVLNPNKTKVQGSCEGAHPHLLLSFPYGHLSFGFMQEFETSLANMVKPCLY

SEQ ID NO: 792 - protein, 243 aa, Artificial Sequence
  Synthetic polypeptide
MECLYYFLGFLLLAARLPLDAAKQAGLSADPYVYNWTAWSEDSDGENGTGQSHHNVFPDGKPFPHHPGWRRWNFIYVFHTLGQYFQKLGRCSVRVSVNTANVTLGPQLMEVTVYRRHGRAYVPIAQVKDVYVVTDQIPVFVTMFQKNDRNSSDETFLKDLPIMFDVLIHDPSHFLNYSTINYKWSFGDNTGLFVSTNHTVNHTYVLNGTFSLNLTVKAAAPGPCPPPPPPPRPSKPTPSLGGN

SEQ ID NO: 793 - protein, 242 aa, Artificial Sequence
  Synthetic polypeptide
MSRIGGAGLPAAALTGPGRFRMAREEPAPAALAAAGQPGGGRGGERALQGPGVARRGRPSLSRAKLHGLRHMCAGRTAAGGSFQRRALWVLAFCTSFGLLLSWSSNRLLYWLSFPSHTRVHREWSRQLPFPAVTVCNNNPLRFPRLSKGDLYYAGHWLGLLLPNRTARPLVSELLRGDEPRRQWFRKLADFRLFLPPRHFEGISAAFMDRLGHQLEDMLLSCKYRGELCGPHNFSSPERTAR

SEQ ID NO: 794 - protein, 242 aa, Artificial Sequence
  Synthetic polypeptide
MALVPCQVLRMAILLSYCSILCNYKAIEMPSHQTYGGSWKFLTFIDLVIQAVFFGICVLTDLSSLLTRGSGNQEQERQLKKLISLRDWMLAVLAFPVGVFVVAVFWIIYAYDREMIYPKLLDNFIPGWLNHGMHTTVLPFILIEMRTSHHQYPSRSSGLTAICTFSVGYILWVCWVHHVTGMWVYPFLEHIGPGARIIFFGSTTILMNFLYLLGEVLNNYIWDTQKSGFPLHSALILLPTAM

SEQ ID NO: 795 - protein, 242 aa, Artificial Sequence; identical to SEQ ID NO: 794
  Synthetic polypeptide

SEQ ID NO: 796 - protein, 241 aa, Artificial Sequence
  Synthetic polypeptide
MTKNEKKSLNQSLAEWKLFIYNPTTGEFLGRTAKSWGLILLFYLVFYGFLAALFSFTMWVMLQTLNDEVPKYRDQIPSPGLMVFPKPVTALEYTFSRSDPTSYAGYIEDLKKFLKPYTLEEQKNLTVCPDGALFEQKGPVYVACQFPISLLQACSGMNDPDFGYSQGNPCILVKMNRIIGLKPEGVPRIDCVSKNEDIPNVAVYPHNGMIDLKYFPYYGKKLHDSVESTQQQRRFSPDAAP

SEQ ID NO: 797 - protein, 241 aa, Artificial Sequence
  Synthetic polypeptide
MATAERRALGIGFQWLSLATLVLICAGQGGRREDGGPACYGGFDLYFILDKSGSVLHHWNEIYYFVEQLAHKFISPQLRMSFIVFSTRGTTLMKLTEDREQIRQGLEELQKVLPGGDTYMHEGFERASEQIYYENRQGYRTASVIIALTDGELHEDLFFYSEREANRSRDLGAIVYCVGVKDFNETQLARIADSKDHVFPVNDGFQALQGIIHSIEKAHKYWLSFSFATRKLGTKSTLARK

SEQ ID NO: 798 - protein, 241 aa, Artificial Sequence; identical to SEQ ID NO: 797
  Synthetic polypeptide

SEQ ID NO: 799 - protein, 241 aa, Artificial Sequence; identical to SEQ ID NO: 797
  Synthetic polypeptide

SEQ ID NO: 800 - protein, 240 aa, Artificial Sequence
  Synthetic polypeptide
MSIGVNCTQITATECDFTAASPSAGFPMDFNVTLRLRAELGALHSAWVTMPWFQHYRNVTVGPPENIEVTPGEGSLIIRFSSPFDIADTSTAFFCYYVHYWEKGGIQQVKGPFRSNSISLDNLKPSRVYCLQVQAQLLWNKSNIFRVGHLSNISCYETMADASTELQQVILISVGTFSLLSVLAGACFFLVLKYRGLIKYWFHTPPSIPLQIEEQSEDLVVVLTLANEPEPLGQVTQPVP

SEQ ID NO: 801 - protein, 239 aa, Artificial Sequence
  Synthetic polypeptide
MSIGVNCTQITATECDFTAASPSAGFPMDFNVTLRLRAELGALHSAWVTMPWFQHYRNVTVGPPENIEVTPGEGSLIIRFSSPFDIADTSTAFFCYYVHYWEKGGIQQVKGPFRSNSISLDNLKPSRVYCLQVQAQLLWNKSNIFRVGHLSNISCYETMADASTELQQVILISVGTFSLLSVLAGACFFLVLKYRGLIKYWFHTPPSIPLQIEESEDLVVVLTLANEPEPLGQVTQPVP

SEQ ID NO: 802 - protein, 239 aa, Artificial Sequence
  Synthetic polypeptide
MLQGHSSVFQALLGTFFTWGMTAAGAALVFVFSSGQRRILDGSLGFAAGVMLAASYWSLLAPAVEMATSSGGFGAFAFFPVAVGFTLGAAFVYLADLLMPHLGAAEDPQTTLALNFGSTLMKKKSDPEGPALLFPESELSIRIGRAGLLSDKSENGEAYQRKKAAATGLPEGPAVPVPSRGNLAQPGGSSWRRIALLILAITIHNVPEGLAVGVGFGAIEKTASATFESARKPTPKNLP

SEQ ID NO: 803 - protein, 239 aa, Artificial Sequence
  Synthetic polypeptide
MHAALAGPLLAALLATARARPQPPDGGQCRPPGSQRDLNSFLWTIRRDPPAYLFGTIHVPYTRVWDFIPDNSKAAFQASTRVYFELDLTDPYTISALASCQLLPHGENLQDVLPHELYWRLKRHLDYVKLMMPSWMTPAQRGKGLYADYLFNAIAGNWERKRPVWVMLMVNSLTERDVRFRGVPVLDLYLAQQAEKMKKTTGAVEQVEEQCHPLNNGLNFSQNPVQGSARIRAQNCVSK

SEQ ID NO: 804 - protein, 237 aa, Artificial Sequence
  Synthetic polypeptide
MRLAVLFSGALLGLLAAQGTGNDCPHKKSATLLPSFTVTPTVTESTGTTSHRTTKSHKTTTHRTTTTGTTSHGPTTATHNPTTTSHGNVTVHPTSNSTATSQGPSTATHSPATTSHGNATVHPTSNSTATSPGFTSSAHPEPPPPSPSPSPTSKETIGDYTWTNGSQPCVHLQAQIQIRVMYTTQGGGEAWGISVLNPNKTKVQGSCEGAHPHLLLSFPYGHLSFGFMQVDHWRSGV

SEQ ID NO: 805 - protein, 233 aa, Artificial Sequence
  Synthetic polypeptide
MGGSAPPDSSWRGSLKVPYNVGPGFTGNFSTQKVKMHIHSTNEVTRIYNVIGTLRGAVEPDRYVILGGHRDSWVFGGIDPQSGAAVVHEIVRSFGTLKKEGWRPRRTILFASWDAEEFGLLGSTEWAEENSRLLQERGVAYINADSSIEGNYTLRVDCTPLMYSLVHNLTKEPSPMIPPGTVKSEATSDWSRPPSTTQQPCRKVARLFKKKKKKRKKRTSSTQRSPTSKIEGR

SEQ ID NO: 806 - protein, 232 aa, Artificial Sequence
  Synthetic polypeptide
MPVKGGTKCIKYLLFGFNFIFWLAGIAVLAIGLWLRFDSQTKSIFEQETNNNNSSFYTGVYILIGAGALMMLVGFLGCCGAVQESQCMLGLFFGFLLVIFAIEIAAAIWGYSHKDEVIKEVQEFYKDTYNKLKTKDEPQRETLKAIHYALNCCGLAGGVEQFISDICPKKDVLETFTVKSCPDAIKEVFDNKFHIIGAVGIGIAVVMSPASPELPAHEAALPLASATPSRLG

SEQ ID NO: 807 - protein, 232 aa, Artificial Sequence; identical to SEQ ID NO: 806
  Synthetic polypeptide

SEQ ID NO: 808 - protein, 232 aa, Artificial Sequence
  Synthetic polypeptide
MLQGHSSVFQALLGTFFTWGMTAAGAALVFVFSSGQRRILDGSLGFAAGVMLAASYWSLLAPAVEMATSSGGFGAFAFFPVAVGFTLGAAFVYLADLLMPHLGAAEDPQTTLALNFGSTLMKKKSDPEGPALLFPESELSIRIDKSENGEAYQRKKAAATGLPEGPAVPVPSRGNLAQPGGSSWRRIALLILAITIHNVPEGLAVGVGFGAIEKTASATFESARKPTPKNLP

SEQ ID NO: 809 - protein, 231 aa, Artificial Sequence
  Synthetic polypeptide
MRPRAPACAAAALGLCSLLLLLAPGHACPAGCACTDPHTVDCRDRGLPSVPDPFPLDVRKLLVAGNRIQRIPEDFFIFYGDLVYLDFRNNSLRSLEEGTFSGSAKLVFLDLSYNNLTQLGAGAFRSAGRLVKLSLANNNLVGVHEDAFETLESLQVLELNDNNLRSLSVAALAALPALRSLRLDGNPWLCDCDFAHLFSWIQENASKLPKGHTSLVLSPEHAQVPVSSRSP

SEQ ID NO: 810 - protein, 230 aa, Artificial Sequence
  Synthetic polypeptide
MPANYTCTRPDGDNTDFRYFIYAVTYTVILVPGLIGNILALWVFYGYMKETKRAVIFMINLAIADLLQVLSLPLRIFYYLNHDWPFGPGLCMFCFYLKYVNMYASIYFLVCISVRRFWFLMYPFRFHDCKQKYDLYISIAGWLIICLACVLFPLLRTSDDTSGNRTKCFVDLPTRNVNLAQSVVMMTIGELIGFVTPLLIVLYSKKKKKKKKKKKKKKKKKKKKKKRLSE

SEQ ID NO: 811 - protein, 227 aa, Artificial Sequence
  Synthetic polypeptide
MGLPWGQPHLGLQMLLLALNCLRPSLSLELVPYTPQITAWDLEGKVTATTFSLEQPRCVFDGLASASDTVWLVVAFSNASRGFQNPETLADIPASPQLLTDGHYMTLPLSPDQLPCGDPMAGSGGAPVLRVGHDHGCHQQPFCNAPLPGPGPYREDPRIHRHLARAAKWQHDRHYLHPLFSGRPPTLGLLGSLYHALKRACFPFAFCRDCQLLEGSPAMLPVQPAKL

SEQ ID NO: 812 - protein, 227 aa, Artificial Sequence; identical to SEQ ID NO: 811
  Synthetic polypeptide

SEQ ID NO: 813 - protein, 226 aa, Artificial Sequence
  Synthetic polypeptide
MTKNEKKSLNQSLAEWKLFIYNPTTGEFLGRTAKSWGLILLFYLVFYGFLAALFSFTMWVMLQTLNDEVPKYRDQIPSPGLMVFPKPVTALEYTFSRSDPTSYAGYIEDLKKFLKPYTLEEQKNLTVCPDGALFEQKGPVYVACQFPISLLQACSGMNDPDFGYSQGNPCILVKMNRIIGLKPEGVPRIDCVSKNEDIPNVAVYPHNGMIDLKYFPYYGKKLHEWD

SEQ ID NO: 814 - protein, 224 aa, Artificial Sequence
  Synthetic polypeptide
MNTRPQHSERTSTMDRVYEIPEEPNVDPVSSLEEDVIRGANPRFTFPFSILFSTFLYCGEAASALYMVRIYRKNSETYWMTYTFSFFMFSSIMVQLTLIFVHRDLAKDKPLSLFMHLILLGPVIRCLEAMIKYLTLWKKEEQEEPYVSLTRKKMLIDGEEVLIEWEVGHSIRTLAMHRNAYKRMSQIQAFLGSVPQLTYQLYVSLISAEVPLGRGPLYMASLSV

SEQ ID NO: 815 - protein, 222 aa, Artificial Sequence
  Synthetic polypeptide
MYRDPEAASPGAPSRDVLLVSAIITVSLSVTVVLCGLCHWCQRKLGKRYKNSLETVGTPDSGRGRSEKKAIKLPAGGKAVNTAPVPGQTPHDESDRRTEPRSSVSDLVNSLTSEMLMLSPGSEEDEAHEGCSRENLGRIQFSVGYNFQESTLTVKIMKAQELPAKDFSGTSDPFVKIYLLPDKKHKLETKVKRKNLNPHWNETFLFEAGSLGKYFKPSEPHL

SEQ ID NO: 816 - protein, 222 aa, Artificial Sequence
  Synthetic polypeptide
MLRLYVLVMGVSAFTLQPAAHTGAARSCRFRGRHYKREFRLEGEPVALRCPQVPYWLWASVSPRINLTWHKNDSARTVPGEEETRMWAQDGALWLLPALQEDSGTYVCTTRNASYCDKMSIELRVFENTDAFLPFISYPQILTLSTSGVLVCPDLSEFTRDKTDVKIQWYKPWPSDSTSRTCFLCKVAINNFHHLGLFQRLNGIMCMKHPVQCLTYKWCSIN

SEQ ID NO: 817 - protein, 222 aa, Artificial Sequence; identical to SEQ ID NO: 816
  Synthetic polypeptide

SEQ ID NO: 818 - protein, 222 aa, Artificial Sequence; identical to SEQ ID NO: 816
  Synthetic polypeptide

SEQ ID NO: 819 - protein, 222 aa, Artificial Sequence; identical to SEQ ID NO: 816
  Synthetic polypeptide

SEQ ID NO: 820 - protein, 222 aa, Artificial Sequence
  Synthetic polypeptide
MGKAAAAVAFGAEVGVRLALFAAFLVTELLPPFQRLIQPEEMWLYRNPYVEAEYFPTKPMFVIAFLSPLSLIFLAKFLKKADTRDSRQACLAASLALALNGVFTNTIKLIVGRPRPDFFYRCFPDGLAHSDLMCTGDKDVVNEGRKSFPSGHSSFAFAGLAFASFYLAGKLHCFTPQGRGKSWRFCAFLSPLLFAAVIALSRTCDYKHHWQGKNKKRTKEHV

SEQ ID NO: 821 - protein, 222 aa, Artificial Sequence; identical to SEQ ID NO: 820
  Synthetic polypeptide

SEQ ID NO: 822 - protein, 221 aa, Artificial Sequence
  Synthetic polypeptide
MTQAGRRGPGTPEPRPRTQPMASPRLGTFCCPTRDAATQLVLSFQPRAFHALCLGSGGLRLALGLLQLLPGRRPAGPGSPATSPPASVRILRAAAACDLLGCLGMVIRSTVWLGFPNFVDSVSDMNHTEIWPAAFCVGSAMWIQLLYSACFWWLFCYAVDAYLVIRRSAGLSTILLYHIMAWGLATLLCVEGAAMLYYPSVSRDQHSVALRTNPAFFRFCK

SEQ ID NO: 823 - protein, 218 aa, Artificial Sequence
  Synthetic polypeptide
MLEKFCNSTFWNSSFLDSPEADLPLCFEQTVLVWIPLGYLWLLAPWQLLHVYKSRTKRSSTTKLYLAKQVFVGFLLILAAIELALVLTEDSGQATVPAVRYTNPSLYLGTWLLVLLIQYSRQWCVQKNSWFLSLFWILSILCGTFQFQTLIRTLLQGDNSNLAYSCLFFISYGFQILILIFSAFSENNESSNNPSSIASFLSSITYSWYDRNKKRRRR

SEQ ID NO: 824 - protein, 218 aa, Artificial Sequence; identical to SEQ ID NO: 823
  Synthetic polypeptide

SEQ ID NO: 825 - protein, 218 aa, Artificial Sequence
  Synthetic polypeptide
MVLLRVLILLLSWAAGMGGQYGNPLNKYIRHYEGLSYNVDSLHQKHQRAKRAVSHEDQFLRLDFHAHGRHFNLRMKRDTSLFSDEFKVETSNKVLDYDTSHIYTGHIYGEEGSFSHGSVIDGRFEGFIQTRGGTFYVEPAERYIKDRTLPFHSVIYHEDDINYPHKYGPQGGCADHSVFERMRKYQMTGVEEVTQTLLLAPASSMSCACSPFTFCPCL

SEQ ID NO: 826 - protein, 218 aa, Artificial Sequence
  Synthetic polypeptide
MVGSPDTVGMNYGSYMEEKHMPPPNMTTNERRVIVPADPTLWSTDHVRQWLEWAVKEYGLPDVNILLFQNIDGKELCKMTKDDFQRLTPSYNADILLSHLHYLRETPLPHLTSDDVDKALQNSPRLMHARNTGGAAFIFPNTSVYPEATQRITTRPDLPYEPPRRSAWTGHGHPTPQSKAAQPSPSTVPKTEDQRPQLDPYQILGPTSSRLANPGWTQ

SEQ ID NO: 827 - protein, 217 aa, Artificial Sequence
  Synthetic polypeptide
MRLAVLFSGALLGLLAESTGTTSHRTTKSHKTTTHRTTTTGTTSHGPTTATHNPTTTSHGNVTVHPTSNSTATSQGPSTATHSPATTSHGNATVHPTSNSTATSPGFTSSAHPEPPPPSPSPSPTSKETIGDYTWTNGSQPCVHLQAQIQIRVMYTTQGGGEAWGISVLNPNKTKVQGSCEGAHPHLLLSFPYGHLSFGFMQEFETSLANMVKPCLY

SEQ ID NO: 828 - protein, 217 aa, Artificial Sequence
  Synthetic polypeptide
MHRRRSRSCREDQKPVMDDQRDLISNNEQLPMLGRRPGAPESKCSRGALYTGFSILVTLLLAGQATTAYFLYQQQGRLDKLTVTSQNLQLENLRMKLPKPPKPVSKMRMATPLLMQALPMGALPQGPMQNATKYGNMTEDHVMHLLQNADPLKVYPPLKGSFPENLRHLKNTMETIDWKVFESWMHHWLLFEMSRHSLEQKPTDAPPKVPFPLGFRV

SEQ ID NO: 829 - protein, 217 aa, Artificial Sequence; identical to SEQ ID NO: 828
  Synthetic polypeptide

SEQ ID NO: 830 - protein, 216 aa, Artificial Sequence
  Synthetic polypeptide
MRPRLWLLLAAQLTVLHGNSVLQQTPAYIKVQTNKMVMLSCEAKISLSNMRIYWLRQRQAPSSDSHHEFLALWDSAKGTIHGEEVEQEKIAVFRDASRFILNLTSVKPEDSGIYFCMIVGSPELTFGKGTQLSVVDFLPTTAQPTKKSTLKKRVCRLPRPETQKGPLCSPITLGLLVAGVLVLLVSLGVAIHLCCRRRRARLRFMKQKFNIVCLKI

SEQ ID NO: 831 - protein, 216 aa, Artificial Sequence; identical to SEQ ID NO: 830
  Synthetic polypeptide

SEQ ID NO: 832 - protein, 216 aa, Artificial Sequence; identical to SEQ ID NO: 830
  Synthetic polypeptide

SEQ ID NO: 833 - protein, 216 aa, Artificial Sequence
  Synthetic polypeptide
MEATAASWQVAVPVLGGASRPLGPRGAASLLRAPLQMEEAILVPCVLGLLLLPILAMLMALCVHCHRLPGSYDSTSSDSLYPRGIQFKRPHTVAPWPPAYPPVTSYPPLSQPDLLPIPRSPQPLGGSHRTPSSRRDSDGANSVASYENEEPACEDADEDEDDYHNPGYLVVLPDSTPATSTAAPSAPALSTPGIRDSAFSRAEVGRSSEPRRSRLR

SEQ ID NO: 834 - protein, 216 aa, Artificial Sequence
  Synthetic polypeptide
MVLLRVLILLLSWAAGMGGQYGNPLNKYIRHYEGLSYNVDSLHQKHQRAKRAVSHEDQFLRLDFHAHGRHFNLRMKRDTSLFSDEFKVETSNKVLDYDTSHIYTGHIYGEEGSFSHGSVIDGRFEGFIQTRGGTFYVEPAERYIKDRTLPFHSVIYHEDDINYPHKYGPQGGCADHSVFERMRKYQMTGVEEVTQHVMCLLPLHLLPMLISFLRPL

SEQ ID NO: 835 - protein, 216 aa, Artificial Sequence
  Synthetic polypeptide
MKKAEMGRFSISPDEDSSSYSSNSDFNYSYPTKQAALKSHYADVDPENQNFLLESNLGKKKYETEFHPGTTSFGMSVFNLSNAIVGSGILGLSYAMANTGIALFIILLTFVSIFSLYSVHLLLKTANEGGSLLYEQLGYKAFGLVGKLAASGSITMQNIGAMSSYLFIVKYELPLVIQALTNIEDKTGLQCHLQDTSNMYVQVLQSPKHFGPKHFE

SEQ ID NO: 836 - protein, 215 aa, Artificial Sequence
  Synthetic polypeptide
MLEKFCNSTFWNSSFLDSPEADLPLCFEQTVLVWIPLGYLWLLAPWQLLHVYKSRTKRSSTTKLYLAKQVFVGFLLILAAIELALVLTEDSGQATVPAVRYTNPSLYLGTWLLVLLIQYSRQWCVQKNSWFLSLFWILSILCGTFQFQTLIRTLLQGDNSNLAYSCLFFISYGFQILILIFSAFSENNESSNNPSSIASFLSSITYSWYDSYLGG

SEQ ID NO: 837 - protein, 215 aa, Artificial Sequence; identical to SEQ ID NO: 836
  Synthetic polypeptide

SEQ ID NO: 838 - protein, 215 aa, Artificial Sequence
  Synthetic polypeptide
MRPRAPACAAAALGLCSLLLLLAPGHACPAGCACTDPHTVDCRDRGLPSVPDPFPLDVRKLLVAGNRIQRIPEDFFIFYGDLVYLDFRNNSLRSLEEGTFSGSAKLVFLDLSYNNLTQLGAGAFRSAGRLVKLSLANNNLVGVHEDAFETLESLQVLELNDNNLRSLSVAALAALPALRSLRLDGNPWLCDCDFAHLFSWIQENASKLPKGSACQ

SEQ ID NO: 839 - protein, 215 aa, Artificial Sequence; identical to SEQ ID NO: 838
  Synthetic polypeptide

SEQ ID NO: 840 - protein, 215 aa, Artificial Sequence; identical to SEQ ID NO: 838
  Synthetic polypeptide

SEQ ID NO: 841 - protein, 213 aa, Artificial Sequence
  Synthetic polypeptide
MLQGHSSVFQALLGTFFTWGMTAAGAALVFVFSSGQRRILDGSLGFAAGVMLAASYWSLLAPAVEMATSSGGFGAFAFFPVAVGFTLGAAFVYLADLLMPHLGAAEDPQTTLALNFGSTLMKKKSDPEGPALLFPESELSIRIGRAGLLSDKSENGEAYQRKKAAATGLPEGPAVPVPSRGNLAQPGGSSWRRIALLILAITIHNVPGDLRIK

SEQ ID NO: 842 - protein, 212 aa, Artificial Sequence
  Synthetic polypeptide
MATKTELSPTARESKNAQDMQVDETLIPRKVPSLCSARYGIALVLHFCNFTTIAQNVIMNITMVAMVNSTSPQSQLNDSSEVLPVDSFGGLSKAPKSLPAKSSILGGQFAIWEKWGPPQERSRLCSIALSGMLLGCFTAILIGGFISETLGWPFVFYIFGGVGCVCCLLWFVVIYDDPVSYPWISTSEKEYIISSLKQQAELPCPGNHPETH

SEQ ID NO: 843 - protein, 212 aa, Artificial Sequence; identical to SEQ ID NO: 842
  Synthetic polypeptide

SEQ ID NO: 844 - protein, 211 aa, Artificial Sequence
  Synthetic polypeptide
MDRVYEIPEEPNVDPVSSLEEDVIRGANPRFTFPFSILFSTFLYCGEAASALYMVRIYRKNSETYWMTYTFSFFMFSSIMVQLTLIFVHRDLAKDKPLSLFMHLILLGPVIRCLEAMIKYLTLWKKEEQEEPYVSLTRKKMLIDGEEVLIEWEVGHSIRTLAMHRNAYKRMSQIQAFLGSVPQLTYQLYVSLISAEVPLGRGPLYMASLSV

SEQ ID NO: 845 - protein, 210 aa, Artificial Sequence
  Synthetic polypeptide
MRLAVLFSGALLGLLAESTGTTSHRTTKSHKTTTHRTTTTGTTSHGPTTATHNPTTTSHGNVTVHPTSNSTATSQGPSTATHSPATTSHGNATVHPTSNSTATSPGFTSSAHPEPPPPSPSPSPTSKETIGDYTWTNGSQPCVHLQAQIQIRVMYTTQGGGEAWGISVLNPNKTKVQGSCEGAHPHLLLSFPYGHLSFGFMQVDHWRSGV

SEQ ID NO: 846 - protein, 209 aa, Artificial Sequence
  Synthetic polypeptide
MEEAILVPCVLGLLLLPILAMLMALCVHCHRLPGSYDSTSSDSLYPRGIQFKRPHTVAPWPPAYPPVTSYPPLSQPDLLPIPRSPQPLGGSHRTPSSRRDSDGANSVASYENEGASGIRGAQAGWGVWGPSWTRLTPVSLPPEPACEDADEDEDDYHNPGYLVVLPDSTPATSTAAPSAPALSTPGIRDSAFSRAEVGRSSEPRRSRLR

SEQ ID NO: 847 - protein, 208 aa, Artificial Sequence
  Synthetic polypeptide
MEEAILVPCVLGLLLLPILAMLMALCVHCHRLPGSYDSTSSDSLYPRGIQFKRPHTVAPWPPAYPPVTSYPPLSQPDLLPIPSPQPLGGSHRTPSSRRDSDGANSVASYENEGASGIRGAQAGWGVWGPSWTRLTPVSLPPEPACEDADEDEDDYHNPGYLVVLPDSTPATSTAAPSAPALSTPGIRDSAFSRAEVGRSSEPRRSRLR

SEQ ID NO: 848 - protein, 207 aa, Artificial Sequence
  Synthetic polypeptide
MKKAEMGRFSISPDEDSSSYSSNSDFNYSYPTKQAALKSHYADVDPENQNFLLESNLGKKKYETEFHPGTTSFGMSVFNLSNAIVGSGILGLSYAMANTGIALFIILLTFVSIFSLYSVHLLLKTANEGGSLLYEQLGYKAFGLVGKLAASGSITMQNIGAMSSYLFIVKYELPLVIQALTNIEDKTGYSKVQNTSVPSILNKGYST

SEQ ID NO: 849 - protein, 206 aa, Artificial Sequence
  Synthetic polypeptide
MALLLCFVLLCGVVDFARSLSITTPEEMIEKAKGETAYLPCKFTLSPEDQGPLDIEWLISPADNQKVDQVIILYSGDKIYDDYYPDLKGRVHFTSNDLKSGDASINVTNLQLSDIGTYQCKVKKAPGVANKKIHLVVLGKMCHLQRAVRPLPEATSAVIIHPWGPCLLPTWKDIPRLSITKYQVKTLNALLRVRLSHLLRHRESSP

SEQ ID NO: 850 - protein, 206 aa, Artificial Sequence
  Synthetic polypeptide
MLQGHSSVFQALLGTFFTWGMTAAGAALVFVFSSGQRRILDGSLGFAAGVMLAASYWSLLAPAVEMATSSGGFGAFAFFPVAVGFTLGAAFVYLADLLMPHLGAAEDPQTTLALNFGSTLMKKKSDPEGPALLFPESELSIRIDKSENGEAYQRKKAAATGLPEGPAVPVPSRGNLAQPGGSSWRRIALLILAITIHNVPGDLRIK

SEQ ID NO: 851 - protein, 206 aa, Artificial Sequence; identical to SEQ ID NO: 850
  Synthetic polypeptide

SEQ ID NO: 852 - protein, 206 aa, Artificial Sequence; identical to SEQ ID NO: 850
  Synthetic polypeptide

SEQ ID NO: 853 - protein, 204 aa, Artificial Sequence
  Synthetic polypeptide
MHVKKYLLKGLHRLQKGPGYTYKELLVWYCDNTNTHGPKRIICEGPKKKAMWFLLTLLFAALVCWQWGIFIRTYLSWEVSVSLSVGFKTMDFPAVTICNASPFKYSKIKHLLKDLDELMEAVLERILAPELSHANATRNLNFSIWNHTPLVLIDERNPHHPMVLDLFGDNHNGLTSSSASEKICNAHGCKMAMRLLCCEASMGL

SEQ ID NO: 854 - protein, 204 aa, Artificial Sequence; identical to SEQ ID NO: 853
  Synthetic polypeptide

SEQ ID NO: 855 - protein, 204 aa, Artificial Sequence; identical to SEQ ID NO: 853
  Synthetic polypeptide

SEQ ID NO: 856 - protein, 204 aa, Artificial Sequence; identical to SEQ ID NO: 853
  Synthetic polypeptide

SEQ ID NO: 857 - protein, 203 aa, Artificial Sequence
  Synthetic polypeptide
MQGARAPRDQGRSPGRMSALGRSSVILLTYVLAATELTCLFMQFSIVPYLSRKLGLDSIAFGYLQTTFGVLQLLGGPVFGRIQCPAILAALATLLGAVLSFTCIPASTKGAKTDAQAPLPGGPRASVFDLKAIASLLRLPDVPRIFLVKVASNCPTGLFMVMFSIISMDFFQLEAAQAGYLMSFFGLLQMAKVPALQGPWQMR

SEQ ID NO: 858 - protein, 203 aa, Artificial Sequence
  Synthetic polypeptide
GKAAAAVAFGAEVGVRLALFAAFLVTELLPPFQRLIQPEEMWLYRNPYVEAEYFPTKPMFKADTRDSRQACLAASLALALNGVFTNTIKLIVGRPRPDFFYRCFPDGLAHSDLMCTGDKDVVNEGRKSFPSGHSSFAFAGLAFASFYLAGKLHCFTPQGRGKSWRFCAFLSPLLFAAVIALSRTCDYKHHWQGKNKKRTKEHV

SEQ ID NO: 859 - protein, 201 aa, Artificial Sequence
  Synthetic polypeptide
MASPRLGTFCCPTRDAATQLVLSFQPRAFHALCLGSGGLRLALGLLQLLPGRRPAGPGSPATSPPASVRILRAAAACDLLGCLGMVIRSTVWLGFPNFVDSVSDMNHTEIWPAAFCVGSAMWIQLLYSACFWWLFCYAVDAYLVIRRSAGLSTILLYHIMAWGLATLLCVEGAAMLYYPSVSRDQHSVALRTNPAFFRFCK

SEQ ID NO: 860 - protein, 200 aa, Artificial Sequence
  Synthetic polypeptide
MTYRFCSQFSKGVYAIFGFYERRTVNMLTSFCGALHVCFITPSFPVDTSNQFVLQLRPELQDALISIIDHYKWQKFVYIYDADRGLSVLQKVLDTAAEKNWQVTAVNILTTTEEGYRMLFQDLEKKKERLVVVDCESERLNAILGQIIKLEKNGIGYHYILANLASCFCCKTFPELQDQVWVHSFCSIITCVILAFLTRP

SEQ ID NO: 861 - protein, 199 aa, Artificial Sequence
  Synthetic polypeptide
MEEAILVPCVLGLLLLPILAMLMALCVHCHRLPGSYDSTSSDSLYPRGIQFKRPHTVAPWPPAYPPVTSYPPLSQPDLLPIPRSPQPRRDSDGANSVASYENEGASGIRGAQAGWGVWGPSWTRLTPVSLPPEPACEDADEDEDDYHNPGYLVVLPDSTPATSTAAPSAPALSTPGIRDSAFSRAEVGRSSEPRRSRLR

SEQ ID NO: 862 - protein, 199 aa, Artificial Sequence
  Synthetic polypeptide
MRKSPGLSDCLWAWILLLSTLTGRSYGQPSLQDELKDNTTVFTRILDRLLDGYDNRLRPGLGERVTEVKTDIFVTSFGPVSDHDMEYTIDVFFRQSWKDERLKFKGPMTVLRLNNLMASKIWTPDTFFHNGKKSVAHNMTMPNKLLRITEDGTLLYTMRLTVRAECPMHLEDFPMDAHACPLKFGSFKLVFLKLVKLLP

SEQ ID NO: 863 - protein, 199 aa, Artificial Sequence; identical to SEQ ID NO: 862
  Synthetic polypeptide

SEQ ID NO: 864 - protein, 199 aa, Artificial Sequence; identical to SEQ ID NO: 862
  Synthetic polypeptide

SEQ ID NO: 865 - protein, 199 aa, Artificial Sequence; identical to SEQ ID NO: 862
  Synthetic polypeptide

SEQ ID NO: 866 - protein, 199 aa, Artificial Sequence; identical to SEQ ID NO: 862
  Synthetic polypeptide

SEQ ID NO: 867 - protein, 199 aa, Artificial Sequence; identical to SEQ ID NO: 862
  Synthetic polypeptide

SEQ ID NO: 868 - protein, 199 aa, Artificial Sequence
  Synthetic polypeptide
MKVGVLWLISFFTFTDGHGGFLGKNDGIKTKKELIVNKKKHLGPVEEYQLLLQVTYRDSKEKRDLRNFLKLLKPPLLWSHGLIRIIRAKATTDCNSLNGVLQCTCEDSYTWFPPSCLDPQNCYLHTAGALPSCECHLNNLSQSVNFCERTKIWGTFKINERFTNDLLNSSSAIYSKYANGIEIQQCCPSTCRDPILEPS

SEQ ID NO: 869 - protein, 199 aa, Artificial Sequence; identical to SEQ ID NO: 868
  Synthetic polypeptide

SEQ ID NO: 870 - protein, 198 aa, Artificial Sequence
  Synthetic polypeptide
MEPPGDWGPPPWRSTPKTDVLRLVLYLTFLGAPCYAPALPSCKEDEYPVGSECCPKCSPGYRVKEACGELTGTVCEPCPPGTYIAHLNGLSKCLQCQMCDPAMGLRASRNCSRTENAVCGCSPGHFCIVQDGDHCAACRAYATSSPGQRVQKGGTESQDTLCQNCPPGTFSPNGTLEECQHQTKKCRLTGSLDGEFHS

SEQ ID NO: 871 - protein, 198 aa, Artificial Sequence; identical to SEQ ID NO: 870
  Synthetic polypeptide

SEQ ID NO: 872 - protein, 198 aa, Artificial Sequence; identical to SEQ ID NO: 870
  Synthetic polypeptide

SEQ ID NO: 873 - protein, 198 aa, Artificial Sequence; identical to SEQ ID NO: 870
  Synthetic polypeptide

SEQ ID NO: 874 - protein, 198 aa, Artificial Sequence; identical to SEQ ID NO: 870
  Synthetic polypeptide

SEQ ID NO: 875 - protein, 198 aa, Artificial Sequence; identical to SEQ ID NO: 870
  Synthetic polypeptide

SEQ ID NO: 876 - protein, 198 aa, Artificial Sequence
  Synthetic polypeptide
MAKKSMPGGRLQSEGGSGLDSSPFLSEANAERIVQTLCTVRGAALKVGQMLSIQDNSFISPQLQHIFERVRQSADFMPRWQMLRVLEEELGRDWQAKVASLEEVPFAAASIGQVHQGLLRDGTEVAVKIQYPGIAQSIQSDVQNLLAVLKMSAALPAGLFAEQSLQALQQELAWECDYRREAACAQNFRLWEKVVEAF

SEQ ID NO: 877 - protein, 197 aa, Artificial Sequence
  Synthetic polypeptide
MECLYYFLGFLLLAARLPLDAAKRFHDVLGNERPSAYMREHNQLNGWSSDENDWNEKLYPVWKRGDMRWKNSWKGGRVQAVLTSDSPALVGSNITFAVNLIFPRCQKEDANGNIVYEKNCRNEAGLSADPYVYNWTAWSEDSDGENGTGQSHHNVFPDGKPFPHHPGWRRWNFIYVFHTLGQDFQTSLATMVKPHLY

SEQ ID NO: 878 - protein, 197 aa, Artificial Sequence; identical to SEQ ID NO: 877
  Synthetic polypeptide

SEQ ID NO: 879 - protein, 197 aa, Artificial Sequence; identical to SEQ ID NO: 877
  Synthetic polypeptide

SEQ ID NO: 880 - protein, 196 aa, Artificial Sequence
  Synthetic polypeptide
MQGARAPRDQGRSPGRMSALGRSSVILLTYVLAATELTCLFMQFSIVPYLSRKLGLDSIAFGYLQTTFGVLQLLGGPVFGRIQCPAILAALATLLGAVLSFTCIPASTKGAKTDAQAPLPGGPRASVFDLKAIASLLRLPDVPRIFLVKVASNCPTGLFMVMFSIISMDFFQLEAAQAGYLMSFFGLLQMGPWQMR

SEQ ID NO: 881 - protein, 196 aa, Artificial Sequence
  Synthetic polypeptide
MDYHEDDKRFRREEYEGNLLEAGLELERDEDTKIHGVGFVKIHAPWNVLCREAEFLKLKMPTKKMYHINETRGLLKKINSVLQKITDPIQPKVAEHRPQTMKRLSYPFSREKQHLFDLSDKDSFFDSKTRSTIVYEILKRTTCTKAKYSMGITSLLANGVYAAAYPLHDGDYNGENVEFNDRKPTQPTLKKCLWDE

SEQ ID NO: 882 - protein, 196 aa, Artificial Sequence; identical to SEQ ID NO: 881
  Synthetic polypeptide

SEQ ID NO: 883 - protein, 195 aa, Artificial Sequence
  Synthetic polypeptide
MGAVLRSLLACSFCVLLRAAPLLLYANRRDLRLVDATNGKENATIVVGGLEDAAAVDFVFSHGLIYWSDVSEEAIKRTEFNKTESVQNVVVSGLLSPDGLACDWLGEKLYWTDSETNRIEVSNLDGSLRKVLFWQELDQPRAIALDPSSGMESPVLVTLLDLSLCIFSMWLFICILCNILYNKLININKVFPGVL

SEQ ID NO: 884 - protein, 195 aa, Artificial Sequence; identical to SEQ ID NO: 883
  Synthetic polypeptide

SEQ ID NO: 885 - protein, 194 aa, Artificial Sequence
  Synthetic polypeptide
MVGSPDTVGMNYGSYMEEKHMPPPNMTTNERRVIVPADPTLWSTDHVRQWLEWAVKEYGLPDVNILLFQNIDGKELCKMTKDDFQRLTPSYNADILLSHLHYLRETPLPHLTSDDVDKALQNSPRLMHARNTDLPYEPPRRSAWTGHGHPTPQSKAAQPSPSTVPKTEDQRPQLDPYQILGPTSSRLANPGWTQ

SEQ ID NO: 886 - protein, 193 aa, Artificial Sequence
  Synthetic polypeptide
MRIISRQIVLLFSGFWGLAMGAFPSSVQIGGLFIRNTDQEYTAFRLAIFLHNTSPNASEAPFNLVPHVDNIETANSFAVTNAFCSQYSRGVFAIFGLYDKRSVHTLTSFCSALHISLITPSFPTEGESQFVLQLRPSLRGALLSLLDHYEWNCFVFLYDTDRGGRSGRITQGQQFRTNLDIIARPCLYKQYKN

SEQ ID NO: 887 - protein, 193 aa, Artificial Sequence; identical to SEQ ID NO: 886
  Synthetic polypeptide

SEQ ID NO: 888 - protein, 193 aa, Artificial Sequence; identical to SEQ ID NO: 886
  Synthetic polypeptide

SEQ ID NO: 889 - protein, 193 aa, Artificial Sequence; identical to SEQ ID NO: 886
  Synthetic polypeptide

SEQ ID NO: 890 - protein, 193 aa, Artificial Sequence; identical to SEQ ID NO: 886
  Synthetic polypeptide

SEQ ID NO: 891 - protein, 193 aa, Artificial Sequence; identical to SEQ ID NO: 886
  Synthetic polypeptide

SEQ ID NO: 892 - protein, 193 aa, Artificial Sequence; identical to SEQ ID NO: 886
  Synthetic polypeptide

SEQ ID NO: 893 - protein, 192 aa, Artificial Sequence
  Synthetic polypeptide
MYGNCYTFNDKNNSNLWMSSMPGINNGLSLMLRAEQNDFIPLLSTVTGARVMVHGQDEPAFMDDGGFNLRPGVETSISMRKETLDRLGGDYGDCTKNGSDVPVENLYPSKYTQQVCIHSCFQESMIKECGCAYIFYPRPQNVEYCDYRKHSSWGRARWLTPVIPALWEATAGGSRGQEMETILANTVKPRLY

SEQ ID NO: 894 - protein, 190 aa, Artificial Sequence
  Synthetic polypeptide
MALVPCQVLRMAILLSYCSILCNYKAIEMPSHQTYGGSWKFLTFIDLFVVAVFWIIYAYDREMIYPKLLDNFIPGWLNHGMHTTVLPFILIEMRTSHHQYPSRSSGLTAICTFSVGYILWVCWVHHVTGMWVYPFLEHIGPGARIIFFGSTTILMNFLYLLGEVLNNYIWDTQKSGFPLHSALILLPTAM

SEQ ID NO: 895 - protein, 189 aa, Artificial Sequence
  Synthetic polypeptide
MGGKQRDEDDEAYGKPVKYDPSFRGPIKNRSCTDVICCVLFLLFILGYIVVGIVAWLYGDPRQVLYPRNSTGAYCGMGENKDKPYLLYFNIFSCILSSNIISVAENGLQCPTPQVCVSSCPEDPWTVGKNEFSQTVGEVFYTKNRNFCLPGVPWNMTVITSLQQELCPSFLLPSAPAWATVRLHLKKKK

SEQ ID NO: 896 - protein, 189 aa, Artificial Sequence
  Synthetic polypeptide
MQHIFAFFCTGFLGAVVGANFPNNIQIGGLFPNQQSQEHAAFRFALSQLTEPPKLLPQIDIVNISDSFEMTYRCLSVLQKVLDTAAEKNWQVTAVNILTTTEEGYRMLFQDLEKKKERLVVVDCESERLNAILGQIIKLEKNGIGYHYILANLASCFCCKTFPELQDQVWVHSFCSIITCVILAFLTRP

SEQ ID NO: 897 - protein, 188 aa, Artificial Sequence
  Synthetic polypeptide
MECLYYFLGFLLLAARLPLDAAKRFHDVLGNERPSAYMREHNQLNGWSSDENDWNEKLYPVWKRGDMRWKNSWKGGRVQAVLTSDSPALVGSNITFAVNLIFPRCQKEDANGNIVYEKNCRNEAGLSADPYVYNWTAWSEDSDGENGTGQSHHNVFPDGKPFPHHPGWRRWNFIYVFHTLDRACGSHL

SEQ ID NO: 898 - protein, 188 aa, Artificial Sequence; identical to SEQ ID NO: 897
  Synthetic polypeptide

SEQ ID NO: 899 - protein, 188 aa, Artificial Sequence; identical to SEQ ID NO: 897
  Synthetic polypeptide

SEQ ID NO: 900 - protein, 186 aa, Artificial Sequence
  Synthetic polypeptide
MDTTAAAALPAFVALLLLSPWPLLGSAQGQFSAGGCTFDDGPGACDYHQDLYDDFEWVHVSAQEPHYLPPEMPQGSYMIVDSSDHDPGEKARLQLPTMKENDTHCIDFSYLLYSQKGLNPGTLNILVRVNKGPLANPIWNVTGFTGRDWLRAELAVSTFWPNEYQDAATSHHLGSREQPSPDNQTC

SEQ ID NO: 901 - protein, 186 aa, Artificial Sequence; identical to SEQ ID NO: 900
  Synthetic polypeptide

SEQ ID NO: 902 - protein, 186 aa, Artificial Sequence; identical to SEQ ID NO: 900
  Synthetic polypeptide

SEQ ID NO: 903 - protein, 186 aa, Artificial Sequence; identical to SEQ ID NO: 900
  Synthetic polypeptide

SEQ ID NO: 904 - protein, 186 aa, Artificial Sequence; identical to SEQ ID NO: 900
  Synthetic polypeptide

SEQ ID NO: 905 - protein, 186 aa, Artificial Sequence; identical to SEQ ID NO: 900
  Synthetic polypeptide

SEQ ID NO: 906 - protein, 186 aa, Artificial Sequence; identical to SEQ ID NO: 900
  Synthetic polypeptide

SEQ ID NO: 907 - protein, 186 aa, Artificial Sequence; identical to SEQ ID NO: 900
  Synthetic polypeptide

SEQ ID NO: 908 - protein, 186 aa, Artificial Sequence
  Synthetic polypeptide
MRPRLWLLLAAQLTVLHGNSVLQQTPAYIKVQTNKMVMLSCEAKISLSNMRIYWLRQRQAPSSDSHHEFLALWDSAKGTIHGEEVEQEKIAVFRDASRFILNLTSVKPEDSGIYFCMIVGSPELTFGKGTQLSVVDFLPTTAQPTKKSTLKKRVCRLPRPETQKGRRRRARLRFMKQKFNIVCLKI

SEQ ID NO: 909 - protein, 186 aa, Artificial Sequence
  Synthetic polypeptide
MEPPGDWGPPPWRSTPKTDVLRLVLYLTFLGAPCYAPALPSCKEDEYPVGSECCPKCSPGYRVKEACGELTGTVCEPCPPGTYIAHLNGLSKCLQCQMCDPAMGLRASRNCSRTENAVCGCSPGHFCIVQDGDHCAACRAYATSSPGQRVQKGGTESQDTLCQNCPPGTFSPNGTLEECQHQTKEE

SEQ ID NO: 910 - protein, 186 aa, Artificial Sequence; identical to SEQ ID NO: 909
  Synthetic polypeptide

SEQ ID NO: 911 - protein, 186 aa, Artificial Sequence; identical to SEQ ID NO: 909
  Synthetic polypeptide

SEQ ID NO: 912 - protein, 186 aa, Artificial Sequence; identical to SEQ ID NO: 909
  Synthetic polypeptide

SEQ ID NO: 913 - protein, 186 aa, Artificial Sequence; identical to SEQ ID NO: 909
  Synthetic polypeptide

SEQ ID NO: 914 - protein, 186 aa, Artificial Sequence; identical to SEQ ID NO: 909
  Synthetic polypeptide

SEQ ID NO: 915 - protein, 186 aa, Artificial Sequence
  Synthetic polypeptide
MAVFKTTLWRLISGTLGIICLSLMSTLGILLKNSFTKLSIEPAFTPGPNIELQKDSDCCSCQEKWVGYRCNCYFISSEQKTWNESRHLCASQKSSLLQLQNTDELQDFMSSSQQFYWIGLSYSEEHTAWLWENGSALSQYLFPSFETFNTKNCIAYNPNGNALDESCEDKNRYIYYLIWGKPVIMS

SEQ ID NO: 916 - protein, 185 aa, Artificial Sequence
  Synthetic polypeptide
MAVFKTTLWRLISGTLGIICLSLMSTLGILLKNSFTKLSIEPAFTPGPNIELQKDSDCCSCQEKWVGYRCNCYFISSEQKTWNESRHLCASQKSSLLQLQNTDELDFMSSSQQFYWIGLSYSEEHTAWLWENGSALSQYLFPSFETFNTKNCIAYNPNGNALDESCEDKNRYIYYLIWGKPVIMS

SEQ ID NO: 917 - protein, 185 aa, Artificial Sequence; identical to SEQ ID NO: 916
  Synthetic polypeptide

SEQ ID NO: 918 - protein, 185 aa, Artificial Sequence
  Synthetic polypeptide
MTQAGRRGPGTPEPRPRTQPMASPRLGTFCCPTRDAATQLVLSFQPRAFHALCLGSGGLRLALGLLQLLPGRRPAGPGSPATSPPASVRILRAAAACDLLGCLGMVIRSTVWLGFPNFVDSVSDMNHTEIWPAAFCVGSAMWIQLLYSACFWWLFCYAVDAYLVIRRSAGLSCEMVPTTQGHCEE

SEQ ID NO: 919 - protein, 184 aa, Artificial Sequence
  Synthetic polypeptide
MSAPSLRARAAGLGLLLCAVLGRAGRSDSGGRGELGQPSGVAAERPCPTTCRCLGDLLDCSRKRLARLPEPLPSWVARLDLSHNRLSFIKASSMSHLQSLREVKLNNNELETIPNLGPVSANITLLSFSHCSEVKKKILLKTYNALHDLHPVGPLSSLWSHSSVLQMCQVVPALCSFAYVFPTA

SEQ ID NO: 920 - protein, 184 aa, Artificial Sequence; identical to SEQ ID NO: 919
  Synthetic polypeptide

SEQ ID NO: 921 - protein, 183 aa, Artificial Sequence
  Synthetic polypeptide
MRIAVICFCLLGITCAIPVKQADSGSSEEKQLYNKYPDAVATWLNPDPSQKQNLLAPQNAVSSEETNDFKQETLPSKSNESHDHMDDMDDEDDDDHVDSQDSIDSNDSDDVDDTDDSHQSDESHHSDESDELVTDFPTDLPATEVFTPVVPTVDTYDGRGDSVVYGLRSKSKKFRRPDIQVSI

SEQ ID NO: 922 - protein, 183 aa, Artificial Sequence
  Synthetic polypeptide
MGTSEQRLAGMPGPGIRASTGQPEDDTETTGLEGGVAMPGAEDDVVTPGTSEDRYKSGLTTLVATSVNSVTGIRIEDLPTSESTVHAQEQSPSATASNVATSHSTEKVDGDTQTTVEKDGLSTVTLVGIIVGVLLAIGFIGAIIVVVMRKMSGRYSSFGLGEVSCHVVRMLKQPYGDTHMTKN

SEQ ID NO: 923 - protein, 181 aa, Artificial Sequence
  Synthetic polypeptide
IEQFCQEKKEMVNMRVGVHTGTVLCGILGMRRFKFDVWSNDVNLANLMEQLGVAGKVHISEATAKYLDDRYEMEDGKVIERLGQSVVADQLKGLKTYLISGQRAKESRCSCAEALLSGFEVIDGSQVSSGPRGQGTASSGNVSDLAQTVKTFDNLKCGGDKEETSRDCWEMSRNGACGRQG

SEQ ID NO: 924 - protein, 181 aa, Artificial Sequence
  Synthetic polypeptide
MWLYRNPYVEAEYFPTKPMFVIAFLSPLSLIFLAKFLKKADTRDSRQACLAASLALALNGVFTNTIKLIVGRPRPDFFYRCFPDGLAHSDLMCTGDKDVVNEGRKSFPSGHSSFAFAGLAFASFYLAGKLHCFTPQGRGKSWRFCAFLSPLLFAAVIALSRTCDYKHHWQGKNKKRTKEHV

SEQ ID NO: 925 - protein, 180 aa, Artificial Sequence
  Synthetic polypeptide
MEEAILVPCVLGLLLLPILAMLMALCVHCHRLPGSYDSTSSDSLYPRGIQFKRPHTVAPWPPAYPPVTSYPPLSQPDLLPIPRSPQPLGGSHRTPSSRRDSDGANSVASYENEEPACEDADEDEDDYHNPGYLVVLPDSTPATSTAAPSAPALSTPGIRDSAFSRAEVGRSSEPRRSRLR

SEQ ID NO: 926 - protein, 179 aa, Artificial Sequence
  Synthetic polypeptide
MEEAILVPCVLGLLLLPILAMLMALCVHCHRLPGSYDSTSSDSLYPRGIQFKRPHTVAPWPPAYPPVTSYPPLSQPDLLPIPSPQPLGGSHRTPSSRRDSDGANSVASYENEEPACEDADEDEDDYHNPGYLVVLPDSTPATSTAAPSAPALSTPGIRDSAFSRAEVGRSSEPRRSRLR

SEQ ID NO: 927 - protein, 179 aa, Artificial Sequence; identical to SEQ ID NO: 926
  Synthetic polypeptide

SEQ ID NO: 928 - protein, 179 aa, Artificial Sequence
  Synthetic polypeptide
MRLLERMRKDWFMVGIVLAIAGAKLEPSIGVNGGPLKPEITVSYIAVATIFFNSGLSLKTEELTSALVHLKLHLFIQIFTLAFFPATIWLFLQLLSITPINEWLLKGLQTVGCMPPPVSSAVILTKAVGGNEAAAIFNSAFGSFLGIVITPLLLLLFLYPQCQEHAPSSQEALSNYLND

SEQ ID NO: 929 - protein, 179 aa, Artificial Sequence; identical to SEQ ID NO: 928
  Synthetic polypeptide

SEQ ID NO: 930 - protein, 179 aa, Artificial Sequence; identical to SEQ ID NO: 928
  Synthetic polypeptide

SEQ ID NO: 931 - protein, 175 aa, Artificial Sequence
  Synthetic polypeptide
MVSNFFHVIQVFEKSATLISKTEHIGFVIYSWRKSTTHLGSRRKFAISIYLSEVSLQKYDCPFSGTSFVVFSLFLICAMAGDVVYADIKTVRTSPLELAFPLQRSVSFNFSTVHKSCPAKDWKVHKGKCYWIAETKKSWNKSQNDCAINNSYLMVIQDITAMAPSPEWQSSRAAE

SEQ ID NO: 932 - protein, 175 aa, Artificial Sequence
  Synthetic polypeptide
MPSAKQRGSKGGHGAASPSEKGAHPSGGADDVAKKPPPAPQQPPPPPAPHPQQHPQQHPQNQAHGKGGHRGGGGGGGKSSSSSSASAAAAAAAASSSASCSRRLGRALNFLFYLALVAAAAFSGWCVHHVLEEVQQVRRSHQDFSRQREELGQGLQGVEQKASCLAPGSIWCFDP

SEQ ID NO: 933 - protein, 173 aa, Artificial Sequence
  Synthetic polypeptide
MPHLASLFTASSRCCPHPLRPEGSGAMGPEALSSLLLLLLVASGDADMKGHFDPAKCRYALGMQDRTIPDSDISASSSWSDSTAARHSRLESSDGDGAWCPAGSVFPKEEEYLQVDLQRLHLVALVGTQGRHAGGLGKEFSRSYRLRYSRDGRRWMGWKDRWGQEATCPPSPA

SEQ ID NO: 934 - protein, 173 aa, Artificial Sequence
  Synthetic polypeptide
MDSALSDPHNGSAEAGGPTNSTTRPPSTPEGIALAYGSLLLMALLPIFFGALRSVRCARGKNASDMPETITSRDAARFPIIASCTLLGLYLFFKIFSQEYINLLLSMYFFVLGILALSHTISPFMNKFFPASFPNRQYQLLFTQGSGENKEEQLMKWALEFHGLDSHSNSAIV

SEQ ID NO: 935 - protein, 173 aa, Artificial Sequence; identical to SEQ ID NO: 934
  Synthetic polypeptide

SEQ ID NO: 936 - protein, 173 aa, Artificial Sequence; identical to SEQ ID NO: 934
  Synthetic polypeptide

SEQ ID NO: 937 - protein, 173 aa, Artificial Sequence; identical to SEQ ID NO: 934
  Synthetic polypeptide

SEQ ID NO: 938 - protein, 173 aa, Artificial Sequence; identical to SEQ ID NO: 934
  Synthetic polypeptide

SEQ ID NO: 939 - protein, 172 aa, Artificial Sequence
  Synthetic polypeptide
MLLLFHSKRMPVAEAPQVAGGQGDGGDGEEAEPEGMFKACEDSKRKARGYLRLVPLFVLLALLVLASAGVLLWYFLGYKAEVMVSQVYSGSLRVLNRHFSQDLTRRESSAFRSETAKAQKMLKELITSTRLGTYYNSSSVYSFGIMRAPPSEVARRLLREDGQQWLRCGKCS

SEQ ID NO: 940 - protein, 172 aa, Artificial Sequence; identical to SEQ ID NO: 939
  Synthetic polypeptide

SEQ ID NO: 941 - protein, 171 aa, Artificial Sequence
  Synthetic polypeptide
MASESSPLLAYRLLGEEGVALPANGAGGPGGASARKLSTFLGVVVPTVLSMFSIVVFLRIDATGPSGLRVLPQGYGWNLLYGSLLLGLVGGVCTLGAGLYARASFLTFLLVSGSLASVLISFVAVGPRDIRLTPRPGPNGSSLPPRFGHFTGFNSSTLKDNLGAGHAGLHL

SEQ ID NO: 942 - protein, 171 aa, Artificial Sequence; identical to SEQ ID NO: 941
  Synthetic polypeptide

SEQ ID NO: 943 - protein, 171 aa, Artificial Sequence
  Synthetic polypeptide
MRAVPLPAPLLPLLLLALLAAPAARASRAESVSAPWPEPERESRPPPGPGPGNTTRFGSGAAGGSGSSSSNSSGDALVTRISILLRDLPTLKAAVIVAFAFTTLLIACLLLRVFRSGKRLKKTRKYDIITTPAERVEMAPLNEEDDEDEDSTVFDIKYRRSWNQFSEDTKG

SEQ ID NO: 944 - protein, 169 aa, Artificial Sequence
  Synthetic polypeptide
MAAAGPRRSVRGAVCLHLLLTLVIFSRAGEACKKVILNVPSKLEADKIIGRVNLEECFRSADLIRSSDPDFRVLNDGSVYTARAVALSDKKRSFTIWLSDKRKQTQKEVTVLLEHQKKVSKTRHTRETVLRRAKRRWAPIPCSMQENSLGPFPLFLQQDTIRLVFHLLH

SEQ ID NO: 945 - protein, 169 aa, Artificial Sequence; identical to SEQ ID NO: 944
  Synthetic polypeptide

SEQ ID NO: 946 - protein, 169 aa, Artificial Sequence
  Synthetic polypeptide
MRIAVICFCLLGITCAIPVKQADSGSSEEKQLYNKYPDAVATWLNPDPSQKQNLLAPQTLPSKSNESHDHMDDMDDEDDDDHVDSQDSIDSNDSDDVDDTDDSHQSDESHHSDESDELVTDFPTDLPATEVFTPVVPTVDTYDGRGDSVVYGLRSKSKKFRRPDIQVSI

SEQ ID NO: 947 - protein, 169 aa, Artificial Sequence
  Synthetic polypeptide
MLLETQDALYVALELVIAALSVAGNVLVCAAVGTANTLQTPTNYFLVSLAAADVAVGLFAIPFAITISLGFCTDFYGCLFLACFVLVLTQSSIFSLLAVAVDRYLAICVPLRKCKCVGGNPKESSSSLHLPAPVDLQDLLVLPPQRISTSIIFAVTLAQADVVSSQLPK

SEQ ID NO: 948 - protein, 169 aa, Artificial Sequence
  Synthetic polypeptide
MWTVQNRESLGLLSFPVMITMVCCAHSTNEPSNMSYVKETVDRLLKGYDIRLRPDFGGPPVDVGMRIDVASIDMVSEVNMDYTLTMYFQQSWKDKRLSYSGIPLNLTLDNRVADQLWVPDTYFLNDKKSFVHGVTVKNRMIRLHPDGTVLYGLRKKDPSSSSSSSAYSV

SEQ ID NO: 949 - protein, 168 aa, Artificial Sequence
  Synthetic polypeptide
MVALSSLLVIVFIIIVLYMLRRFRKAELMSRNTEKYKQAGSHSNSFRLSNGRTEDVEPQSVPLLARSPSTNRKYPPLPVDKLEEEINRRMADDNKLFREEFNALPACPIQATCEAASKEENKEKNRYVNILPYDHSRVHLTPVEGVPDSDYINASFINVGALQVSIDG

SEQ ID NO: 950 - protein, 167 aa, Artificial Sequence
  Synthetic polypeptide
MLRAPGELPRQAARCSLCRLGPGRGRAFFKWRCLPASVDRGNPLWALAANAGTGFAVAEPQIAMFCGKLNMHVNIQTGKWEPDPTGTKSCFETKEEVLQYCQEMYPELQITNVMEANQRVSIDNWCRRDKKQCKSRFVTPFKCLGAVAHACNPNTWGGRGRGGSQGQ

SEQ ID NO: 951 - protein, 166 aa, Artificial Sequence
  Synthetic polypeptide
MRLLERMRKDWFMVGIVLAIAGAKLEPSIGVNGGPLKPEITVSYIAVATIFFNSGLSLKTEELTSALVHLKLHLFIQIFTLAFFPATIWLFLQLLSITPINEWLLKGLQTVGCMPPPVSSAVILTKAVGGNEGIVITPLLLLLFLYPQCQEHAPSSQEALSNYLND

SEQ ID NO: 952 - protein, 165 aa, Artificial Sequence
  Synthetic polypeptide
MSLPRCCPHPLRPEGSGAMGPEALSSLLLLLLVASGDADMKGHFDPAKCRYALGMQDRTIPDSDISASSSWSDSTAARHSRLESSDGDGAWCPAGSVFPKEEEYLQVDLQRLHLVALVGTQGRHAGGLGKEFSRSYRLRYSRDGRRWMGWKDRWGQEATCPPSPA

SEQ ID NO: 953 - protein, 165 aa, Artificial Sequence
  Synthetic polypeptide
MASPRLGTFCCPTRDAATQLVLSFQPRAFHALCLGSGGLRLALGLLQLLPGRRPAGPGSPATSPPASVRILRAAAACDLLGCLGMVIRSTVWLGFPNFVDSVSDMNHTEIWPAAFCVGSAMWIQLLYSACFWWLFCYAVDAYLVIRRSAGLSCEMVPTTQGHCEE

SEQ ID NO: 954 - protein, 164 aa, Artificial Sequence
  Synthetic polypeptide
MDTSRLGVLLSLPVLLQLATGGSSPRSGVLLRGCPTHCHCEPDGRMLLRVDCSDLGLSELPSNLSVFTSYLDLSMNNISQLLPNPLPSLRFLEELRLAGNALTYIPKGAFTGLYSLKVLMLQNNQLRHVPTEALQNLRSLQSLPGAVAHTCKPSTLGSRGRRIA

SEQ ID NO: 955 - protein, 164 aa, Artificial Sequence; identical to SEQ ID NO: 954
  Synthetic polypeptide

SEQ ID NO: 956 - protein, 164 aa, Artificial Sequence; identical to SEQ ID NO: 954
  Synthetic polypeptide

SEQ ID NO: 957 - protein, 164 aa, Artificial Sequence
  Synthetic polypeptide
MIRCGLACERCRWILPLLLLSAIAFDIIALAGRGWLQSSDHGQTSSLWWKCSQEGGGSGSYEEGCQSLMEYAWGRAAAAMLFCGFIILVICFILSFFALCGPQMLVFLRVIGGLLALAEKTLTCQNEHGKEGFQVPSERQSSTHSLREWESVSMASNRKVSIEI

SEQ ID NO: 958 - protein, 164 aa, Artificial Sequence
  Synthetic polypeptide
MAVFKTTLWRLISGTLGIICLSLMSTLGILLKNYSDCCSCQEKWVGYRCNCYFISSEQKTWNESRHLCASQKSSLLQLQNTDELDFMSSSQQFYWIGLSYSEEHTAWLWENGSALSQYLFPSFETFNTKNCIAYNPNGNALDESCEDKNRYIYYLIWGKPVIMS

SEQ ID NO: 959 - protein, 164 aa, Artificial Sequence
  Synthetic polypeptide
MSACRSFAVAICILEISILTAQYTTSYDPELTESSGSASHIDCRMSPWSEWSQCDPCLRQMFRSRSIEVFGQFNGKRCTDAVGDRRQCVPTEPCEDAEDDCGNDFQCSTGRCIKMRLRCNGDNDCGDFSDEDDCESEPRPPCRDRVVEESELARTAGYGHLTIS

SEQ ID NO: 960 - protein, 164 aa, Artificial Sequence
  Synthetic polypeptide
MVDENDIRALNVRHYRDHIGVVSQEPVLFGTTISNNIKYGRDDVTDEEMERAAREANAYDFIMEFPNKFNTLVGEKGAQMSGGQKQRIAIARALVRNPKILILDEATSALDSESKSAVQAALEKEARSASSPPPSHLGSEERLCPAAHRLRCGEHLCPAALSGM

SEQ ID NO: 961 - protein, 164 aa, Artificial Sequence; identical to SEQ ID NO: 960
  Synthetic polypeptide

SEQ ID NO: 962 - protein, 164 aa, Artificial Sequence; identical to SEQ ID NO: 960
  Synthetic polypeptide

SEQ ID NO: 963 - protein, 163 aa, Artificial Sequence
  Synthetic polypeptide
MMLVGFLGCCGAVQESQCMLGLFFGFLLVIFAIEIAAAIWGYSHKDEVIKEVQEFYKDTYNKLKTKDEPQRETLKAIHYALNCCGLAGGVEQFISDICPKKDVLETFTVKSCPDAIKEVFDNKFHIIGAVGIGIAVVMSPASPELPAHEAALPLASATPSRLG

SEQ ID NO: 964 - protein, 163 aa, Artificial Sequence
  Synthetic polypeptide
MVSSGCRMRSLWFIIVISFLPNTEGFSRAALPFGLVRRELSCEGYSIDLRCPGSDVIMIESANYGRTDDKICDADPFQMENTDCYLPDAFKIMTQRDISEGLCQLQSSRPEEFAGLLLRLHWSSPSHSPQPCICHGFNDSSKSTPNKPLRDLCLKSVLPLLSN

SEQ ID NO: 965 - protein, 163 aa, Artificial Sequence; identical to SEQ ID NO: 964
  Synthetic polypeptide

SEQ ID NO: 966 - protein, 163 aa, Artificial Sequence; identical to SEQ ID NO: 964
  Synthetic polypeptide

SEQ ID NO: 967 - protein, 163 aa, Artificial Sequence; identical to SEQ ID NO: 964
  Synthetic polypeptide

SEQ ID NO: 968 - protein, 163 aa, Artificial Sequence; identical to SEQ ID NO: 964
  Synthetic polypeptide

SEQ ID NO: 969 - protein, 163 aa, Artificial Sequence; identical to SEQ ID NO: 964
  Synthetic polypeptide

SEQ ID NO: 970 - protein, 163 aa, Artificial Sequence; identical to SEQ ID NO: 964
  Synthetic polypeptide

SEQ ID NO: 971 - protein, 163 aa, Artificial Sequence; identical to SEQ ID NO: 964
  Synthetic polypeptide

SEQ ID NO: 972 - protein, 163 aa, Artificial Sequence; identical to SEQ ID NO: 964
  Synthetic polypeptide

SEQ ID NO: 973 - protein, 163 aa, Artificial Sequence; identical to SEQ ID NO: 964
  Synthetic polypeptide

SEQ ID NO: 974 - protein, 163 aa, Artificial Sequence; identical to SEQ ID NO: 964
  Synthetic polypeptide

SEQ ID NO: 975 - protein, 163 aa, Artificial Sequence; identical to SEQ ID NO: 964
  Synthetic polypeptide

SEQ ID NO: 976 - protein, 163 aa, Artificial Sequence; identical to SEQ ID NO: 964
  Synthetic polypeptide

SEQ ID NO: 977 - protein, 163 aa, Artificial Sequence; identical to SEQ ID NO: 964
  Synthetic polypeptide

SEQ ID NO: 978 - protein, 163 aa, Artificial Sequence
  Synthetic polypeptide
MANAGLQLLGFILAFLGWIGAIVSTALPQWRIYSYAGDNIVTAQAMYEGLWMSCVSQSTGQIQCKVFDSLLNLSSTLQATRALMVVGILLGVIAIFVATVGMKCMKCLEDDEVQKMRMAVIGGAIFLLAGQVWWFTPVIPALLEAEEGGSPEVVSSRPAWPTW

SEQ ID NO: 979 - protein, 163 aa, Artificial Sequence
  Synthetic polypeptide
MPVAEAPQVAGGQGDGGDGEEAEPEGMFKACEDSKRKARGYLRLVPLFVLLALLVLASAGVLLWYFLGYKAEVMVSQVYSGSLRVLNRHFSQDLTRRESSAFRSETAKAQKMLKELITSTRLGTYYNSSSVYSFGIMRAPPSEVARRLLREDGQQWLRCGKCS

SEQ ID NO: 980 - protein, 163 aa, Artificial Sequence; identical to SEQ ID NO: 979
  Synthetic polypeptide

SEQ ID NO: 981 - protein, 163 aa, Artificial Sequence; identical to SEQ ID NO: 979
  Synthetic polypeptide

SEQ ID NO: 982 - protein, 163 aa, Artificial Sequence; identical to SEQ ID NO: 979
  Synthetic polypeptide

SEQ ID NO: 983 - protein, 162 aa, Artificial Sequence
  Synthetic polypeptide
MSQGRGKYDFYIGLGLAMSSSIFIGGSFILKKKGLLRLARKGSMRAGQGGHAYLKEWLWWAGLLSMGAGEVANFAAYAFAPATLVTPLGALSVLVSAILSSYFLNERLNLHGKIGCLLSILGSTVMVIHAPKEEEIETLNEMSHKLGDPGMEGAAPNLRKGI

SEQ ID NO: 984 - protein, 162 aa, Artificial Sequence; identical to SEQ ID NO: 983
  Synthetic polypeptide

SEQ ID NO: 985 - protein, 162 aa, Artificial Sequence; identical to SEQ ID NO: 983
  Synthetic polypeptide

SEQ ID NO: 986 - protein, 161 aa, Artificial Sequence
  Synthetic polypeptide
MVAERTHKAAATGARGPGELGAPGTVALVAARAERGARLPSPGSCGLLTLALCSLALSLLAHFRTAELQARVLRLEAERGEQQMETAILGRVNQLLDEKWKLHSRRRREAPKTSPGCNCPPAFQGPTGRPGLPLLPFGSSLSRSSSPYLPAPRSLSPFLSP

SEQ ID NO: 987 - protein, 161 aa, Artificial Sequence
  Synthetic polypeptide
MVAERTHKAAATGARGPGELGAPGTVALVAARAERGARLPSPGSCGLLTLALCSLALSLLAHFRTAELQARVLRLEAERGEQQMETAILGRVNQLLDEKWKLHSRRRREAPKTSPGCNCPPGPPGPTGRPGLPLLPFGSSLSRSSSPYLPAPRSLSPFLSP

SEQ ID NO: 988 - protein, 161 aa, Artificial Sequence; identical to SEQ ID NO: 987
  Synthetic polypeptide

SEQ ID NO: 989 - protein, 161 aa, Artificial Sequence; identical to SEQ ID NO: 986
  Synthetic polypeptide

SEQ ID NO: 990 - protein, 161 aa, Artificial Sequence; identical to SEQ ID NO: 986
  Synthetic polypeptide

SEQ ID NO: 991 - protein, 161 aa, Artificial Sequence; identical to SEQ ID NO: 986
  Synthetic polypeptide

SEQ ID NO: 992 - protein, 161 aa, Artificial Sequence; identical to SEQ ID NO: 986
  Synthetic polypeptide

SEQ ID NO: 993 - protein, 161 aa, Artificial Sequence; identical to SEQ ID NO: 986
  Synthetic polypeptide

SEQ ID NO: 994 - protein, 161 aa, Artificial Sequence; identical to SEQ ID NO: 987
  Synthetic polypeptide

SEQ ID NO: 995 - protein, 161 aa, Artificial Sequence; identical to SEQ ID NO: 987
  Synthetic polypeptide

SEQ ID NO: 996 - protein, 161 aa, Artificial Sequence; identical to SEQ ID NO: 987
  Synthetic polypeptide

SEQ ID NO: 997 - protein, 161 aa, Artificial Sequence; identical to SEQ ID NO: 987
  Synthetic polypeptide

SEQ ID NO: 998 - protein, 161 aa, Artificial Sequence; identical to SEQ ID NO: 987
  Synthetic polypeptide

SEQ ID NO: 999 - protein, 161 aa, Artificial Sequence; identical to SEQ ID NO: 987
  Synthetic polypeptide

SEQ ID NO: 1000 - protein, 161 aa, Artificial Sequence; identical to SEQ ID NO: 987
  Synthetic polypeptide

SEQ ID NO: 1001 - protein, 161 aa, Artificial Sequence
  Synthetic polypeptide
RIPDPSHLPLVAPWKTYPLFFGTAIFSFEGIGMVLPLENKMKDPRKFPLILYLGMVIVTILYISLGCLGYLQFGANIQGSITLNLPNCWLYQSVKLLYSIGIFFTYALQFYVPAEIIIPFFVSRAPEHCELVVDLFVRTVLVCLTCNHIHALGFEGHLPIL

SEQ ID NO: 1002 - protein, 161 aa, Artificial Sequence
  Synthetic polypeptide
MHRRRSRSCREDQKPVMDDQRDLISNNEQLPMLGRRPGAPESKCSRGALYTGFSILVTLLLAGQATTAYFLYQQQGRLDKLTVTSQNLQLENLRMKLPKPPKPVSKMRMATPLLMQALPMGALPQGPMQNATKYGNMTEDHVMHLLQARWNAEVRAGAQAA

SEQ ID NO: 1003 - protein, 161 aa, Artificial Sequence; identical to SEQ ID NO: 1002
  Synthetic polypeptide

SEQ ID NO: 1004 - protein, 161 aa, Artificial Sequence; identical to SEQ ID NO: 1002
  Synthetic polypeptide

SEQ ID NO: 1005 - protein, 161 aa, Artificial Sequence; identical to SEQ ID NO: 1002
  Synthetic polypeptide

SEQ ID NO: 1006 - protein, 159 aa, Artificial Sequence
  Synthetic polypeptide
MVREQYTTATEGICIERPENQYVYKIGIYGWRKRCLYLFVLLLLIILVVNLALTIWILKVMWFSPAGMGHLCVTKDGLRLEGESEFLFPLYAKEIHSRVDSSLLLQSTQNVTVNARNSEGEVTGRLKVGKSLAALCPQPRNLWKFEFKSDDFVYCRRNF

SEQ ID NO: 1007 - protein, 159 aa, Artificial Sequence; identical to SEQ ID NO: 1006
  Synthetic polypeptide

SEQ ID NO: 1008 - protein, 159 aa, Artificial Sequence; identical to SEQ ID NO: 1006
  Synthetic polypeptide

SEQ ID NO: 1009 - protein, 157 aa, Artificial Sequence
  Synthetic polypeptide
MAATGTAAAAATGRLLLLLLVGLTAPALALAGYIEALAANAGTGFAVAEPQIAMFCGKLNMHVNIQTGKWEPDPTGTKSCFETKEEVLQYCQEMYPELQITNVMEANQRVSIDNWCRRDKKQCKSRFVTPFKCLGAVAHACNPNTWGGRGRGGSQGQ

SEQ ID NO: 1010 - protein, 157 aa, Artificial Sequence; identical to SEQ ID NO: 1009
  Synthetic polypeptide

SEQ ID NO: 1011 - protein, 157 aa, Artificial Sequence; identical to SEQ ID NO: 1009
  Synthetic polypeptide

SEQ ID NO: 1012 - protein, 157 aa, Artificial Sequence; identical to SEQ ID NO: 1009
  Synthetic polypeptide

SEQ ID NO: 1013 - protein, 156 aa, Artificial Sequence
  Synthetic polypeptide
MRIAVICFCLLGITCAIPVKQADSGSSEEKQNAVSSEETNDFKQETLPSKSNESHDHMDDMDDEDDDDHVDSQDSIDSNDSDDVDDTDDSHQSDESHHSDESDELVTDFPTDLPATEVFTPVVPTVDTYDGRGDSVVYGLRSKSKKFRRPDIQVSI

SEQ ID NO: 1014 - protein, 155 aa, Artificial Sequence
  Synthetic polypeptide
MAMMEVQGGPSLGQTCVLIVIFTVLLQSLCVAVTYVYFTNELKQMQDKYSKSGIACFLKEDDSYWDPNDEESMNSPCWQVKWQLRQLVRKMILRTSEETISTVQEKQQNISPLVRERGPQRVAAHITGTRGRSNTLSSPNTEWSDAAESQSMTKD

SEQ ID NO: 1015 - protein, 155 aa, Artificial Sequence
  Synthetic polypeptide
MRPQDSTGVAELQEPGLPLTDDAPPGATEEPAAAEAAGAPDRGRCWLCLSSPCCSRTEPEAKKKAPCPGLGLFYTLLSAFLFSVGSLFVKKVQDVHAVEISAFRCVFQMLVVIPCLIYRNHIAVRKPGLHGEAHMKRPMWRGTEALTLGPICTTS

SEQ ID NO: 1016 - protein, 154 aa, Artificial Sequence
  Synthetic polypeptide
MRPQDSTGVAELQEPGLPLTDDAPPGATEEPAAAEAAGAPDRGRCWLCLSSPCCSRTEPAKKKAPCPGLGLFYTLLSAFLFSVGSLFVKKVQDVHAVEISAFRCVFQMLVVIPCLIYRNHIAVRKPGLHGEAHMKRPMWRGTEALTLGPICTTS

SEQ ID NO: 1017 - protein, 154 aa, Artificial Sequence
  Synthetic polypeptide
MAAFTKLSIEPAFTPGPNIELQKDSDCCSCQEKWVGYRCNCYFISSEQKTWNESRHLCASQKSSLLQLQNTDELDFMSSSQQFYWIGLSYSEEHTAWLWENGSALSQYLFPSFETFNTKNCIAYNPNGNALDESCEDKNRYIYYLIWGKPVIMS

SEQ ID NO: 1018 - protein, 154 aa, Artificial Sequence
  Synthetic polypeptide
MLAVLAFPVGVFVVAVFWIIYAYDREMIYPKLLDNFIPGWLNHGMHTTVLPFILIEMRTSHHQYPSRSSGLTAICTFSVGYILWVCWVHHVTGMWVYPFLEHIGPGARIIFFGSTTILMNFLYLLGEVLNNYIWDTQKSGFPLHSALILLPTAM

SEQ ID NO: 1019 - protein, 153 aa, Artificial Sequence
  Synthetic polypeptide
EYQLLLQVTYRDSKEKRDLRNFLKLLKPPLLWSHGLIRIIRAKATTDCNSLNGVLQCTCEDSYTWFPPSCLDPQNCYLHTAGALPSCECHLNNLSQSVNFCERTKIWGTFKINERFTNDLLNSSSAIYSKYANGIEIQQCCPSTCRDPILEPS

SEQ ID NO: 1020 - protein, 152 aa, Artificial Sequence
  Synthetic polypeptide
MESYHKPDQQKLQALKDTANRLRISSIQATTAAGSGHPTSCCSAAEIMAVLFFHTMRYKSQDPRNPHNDRFVLSKGHAAPILYAVWAEAGFLAEAELLNLRKISSDLDGHPVPKQAFTDVATGSLGQGLGAACGMAYTGKYFDKASATFRQV

SEQ ID NO: 1021 - protein, 152 aa, Artificial Sequence; identical to SEQ ID NO: 1020
  Synthetic polypeptide

SEQ ID NO: 1022 - protein, 152 aa, Artificial Sequence; identical to SEQ ID NO: 1020
  Synthetic polypeptide

SEQ ID NO: 1023 - protein, 152 aa, Artificial Sequence; identical to SEQ ID NO: 1020
  Synthetic polypeptide

SEQ ID NO: 1024 - protein, 152 aa, Artificial Sequence; identical to SEQ ID NO: 1020
  Synthetic polypeptide

SEQ ID NO: 1025 - protein, 151 aa, Artificial Sequence
  Synthetic polypeptide
MGKDFRYYFQHPWSRMIVAYLVIFFNFLIFAEDPVSHSQTEANVIVVGNCFSFVTNKYPRGVGWRILKVLLWLLAILTGLIAGKFLFHQRLFGQLLRLKMFREDHGSWMTMFFSTILFLFIFSHIYNTILLMDGNMGIQEWSLDWNSFLVT

SEQ ID NO: 1026 - protein, 151 aa, Artificial Sequence; identical to SEQ ID NO: 1025
  Synthetic polypeptide

SEQ ID NO: 1027 - protein, 151 aa, Artificial Sequence; identical to SEQ ID NO: 1025
  Synthetic polypeptide

SEQ ID NO: 1028 - protein, 148 aa, Artificial Sequence
  Synthetic polypeptide
MTVRPPQPCGTGAAEDPQTTLALNFGSTLMKKKSDPEGPALLFPESELSIRIGRAGLLSDKSENGEAYQRKKAAATGLPEGPAVPVPSRGNLAQPGGSSWRRIALLILAITIHNVPEGLAVGVGFGAIEKTASATFESARKPTPKNLP

SEQ ID NO: 1029 - protein, 148 aa, Artificial Sequence
  Synthetic polypeptide
DIVLPATEFLDQNRGSRRTNPFGETEDESFPEAEVKTDSTTEVIYEAMRQVLAARAIHNIFRMTESHLMVTSQSLRNRQTPHTGEFQLASGGCPSGMKLPEEGAGSSLCYSAASTGDTQAKRVRSVPSANCSRPAEEGPEGKLTNRKL

SEQ ID NO: 1030 - protein, 147 aa, Artificial Sequence
  Synthetic polypeptide
MGGKQRDEDDEAYGKPVKYDPSFRGPIKNRSCTDVICCVLFLLFILGYIVVGIVAWLYGDPRQVLYPRNSTGAYCGMGENKDKPYLLYFNIFSCILSSNIISVAENGLQCPTPQTVITSLQQELCPSFLLPSAPAWATVRLHLKKKK

SEQ ID NO: 1031 - protein, 147 aa, Artificial Sequence
  Synthetic polypeptide
MAAAAAAAAEQQSSNGPVKKSMREKAVERRSVNKEHNSNFKAGYIPIDEDRLHKTGLRGRKGNLAICVIILLFILAVINLIKPLEDVLYQKKDEDTGNWVSIRRERQKEVQHERKGKFMITAVQGAHTDQSSPRRPNQKDTGSRKIS

SEQ ID NO: 1032 - protein, 147 aa, Artificial Sequence
  Synthetic polypeptide
MGPEALSSLLLLLLVASGDADMKGHFDPAKCRYALGMQDRTIPDSDISASSSWSDSTAARHSRLESSDGDGAWCPAGSVFPKEEEYLQVDLQRLHLVALVGTQGRHAGGLGKEFSRSYRLRYSRDGRRWMGWKDRWGQEATCPPSPA

SEQ ID NO: 1033 - protein, 147 aa, Artificial Sequence; identical to SEQ ID NO: 1032
  Synthetic polypeptide

SEQ ID NO: 1034 - protein, 147 aa, Artificial Sequence; identical to SEQ ID NO: 1032
  Synthetic polypeptide

SEQ ID NO: 1035 - protein, 147 aa, Artificial Sequence; identical to SEQ ID NO: 1032
  Synthetic polypeptide

SEQ ID NO: 1036 - protein, 147 aa, Artificial Sequence; identical to SEQ ID NO: 1032
  Synthetic polypeptide

SEQ ID NO: 1037 - protein, 147 aa, Artificial Sequence; identical to SEQ ID NO: 1032
  Synthetic polypeptide

SEQ ID NO: 1038 - protein, 147 aa, Artificial Sequence; identical to SEQ ID NO: 1032
  Synthetic polypeptide

SEQ ID NO: 1039 - protein, 147 aa, Artificial Sequence; identical to SEQ ID NO: 1032
  Synthetic polypeptide

SEQ ID NO: 1040 - protein, 147 aa, Artificial Sequence; identical to SEQ ID NO: 1032
  Synthetic polypeptide

SEQ ID NO: 1041 - protein, 147 aa, Artificial Sequence; identical to SEQ ID NO: 1032
  Synthetic polypeptide

SEQ ID NO: 1042 - protein, 147 aa, Artificial Sequence; identical to SEQ ID NO: 1032
  Synthetic polypeptide

SEQ ID NO: 1043 - protein, 147 aa, Artificial Sequence; identical to SEQ ID NO: 1032
  Synthetic polypeptide

SEQ ID NO: 1044 - protein, 147 aa, Artificial Sequence; identical to SEQ ID NO: 1032
  Synthetic polypeptide

SEQ ID NO: 1045 - protein, 147 aa, Artificial Sequence; identical to SEQ ID NO: 1032
  Synthetic polypeptide

SEQ ID NO: 1046 - protein, 147 aa, Artificial Sequence; identical to SEQ ID NO: 1032
  Synthetic polypeptide

SEQ ID NO: 1047 - protein, 147 aa, Artificial Sequence; identical to SEQ ID NO: 1032
  Synthetic polypeptide

SEQ ID NO: 1048 - protein, 147 aa, Artificial Sequence; identical to SEQ ID NO: 1032
  Synthetic polypeptide

SEQ ID NO: 1049 - protein, 147 aa, Artificial Sequence; identical to SEQ ID NO: 1032
  Synthetic polypeptide

SEQ ID NO: 1050 - protein, 147 aa, Artificial Sequence; identical to SEQ ID NO: 1032
  Synthetic polypeptide

SEQ ID NO: 1051 - protein, 147 aa, Artificial Sequence; identical to SEQ ID NO: 1032
  Synthetic polypeptide

SEQ ID NO: 1052 - protein, 147 aa, Artificial Sequence
  Synthetic polypeptide
RGWGLVPRRVGVSQGGGVLAGGSTTTAPGGSGGHPGTACRGPGQGVLPELPAALLPGWSPLDGLEGPLGSGGHLPAISSLDECSRCQTRLPASALFCLESNLHLGGRHPVDLRACKSDTSHLADTPMLAFHSARTKAESLAGAGCSA

SEQ ID NO: 1053 - protein, 147 aa, Artificial Sequence
  Synthetic polypeptide
MNLQPIFWIGLISSVCCVFAQTDENRCLKANAKSCGECIQAGPNCGWCTNSVSKTFLQEGMPTSARCDDLEALKKKGCPPDDIENPRGSKDIKKNKNVTNRSKGTAEKLKPEDITQIQPQQLVLRLRSGSGIPLHTEQSSQLQCLKS

SEQ ID NO: 1054 - protein, 146 aa, Artificial Sequence
  Synthetic polypeptide
MPGAEDDVVTPGTSEDRYKSGLTTLVATSVNSVTGIRIEDLPTSESTVHAQEQSPSATASNVATSHSTEKVDGDTQTTVEKDGLSTVTLVGIIVGVLLAIGFIGAIIVVVMRKMSGRYSSFGLGEVSCHVVRMLKQPYGDTHMTKN

SEQ ID NO: 1055 - protein, 146 aa, Artificial Sequence; identical to SEQ ID NO: 1054
  Synthetic polypeptide

SEQ ID NO: 1056 - protein, 146 aa, Artificial Sequence; identical to SEQ ID NO: 1054
  Synthetic polypeptide

SEQ ID NO: 1057 - protein, 146 aa, Artificial Sequence
  Synthetic polypeptide
MKPLIWTWSDVEGQRPALLICTAAAGPTQGVKDLEEVPPSAASQSAQARCALGSWGYGKPFEPRSVKNIHSTPAYPDATMHRQLLAPVEGRMAETLNQAGCRPEGGLSAELGKGGIHSGILCWKEPESLTLAGQKGLDPQTFTKEK

SEQ ID NO: 1058 - protein, 146 aa, Artificial Sequence
  Synthetic polypeptide
MHCLKRTPKEVGDVIALSDITSSGAADRSQEPSPVGSRRGHVTPNLSRASSDADHGAEEDKEEQVDSQPDASSSQTVTPVAEPPSTEPTQPDGPTTLGPLDLLPSEELLTDTSNSSSSTGEEAWQGEHKHRLKAACRGSHPGHTTS

SEQ ID NO: 1059 - protein, 144 aa, Artificial Sequence
  Synthetic polypeptide
MPSYQGYILESAPVGATISDSLNLTSPLRIVALDKDIEDVPPSGVPTKDPELHLFLNDYTSVFTVTQTGITRYLTLLQPVDREEQQTYTFSITAFDGVQESEPVIVNIQVMDANDNTPTFPEISYDVYVYTDMRPGDSVIQVLI

SEQ ID NO: 1060 - protein, 144 aa, Artificial Sequence
  Synthetic polypeptide
MNLQPIFWIGLISSVCCVFAQTDENRCLKANAKSCGECIQAGPNCGWCTNSTFLQEGMPTSARCDDLEALKKKGCPPDDIENPRGSKDIKKNKNVTNRSKGTAEKLKPEDITQIQPQQLVLRLRSGSGIPLHTEQSSQLQCLKS

SEQ ID NO: 1061 - protein, 144 aa, Artificial Sequence; identical to SEQ ID NO: 1060
  Synthetic polypeptide

SEQ ID NO: 1062 - protein, 144 aa, Artificial Sequence; identical to SEQ ID NO: 1060
  Synthetic polypeptide

SEQ ID NO: 1063 - protein, 144 aa, Artificial Sequence; identical to SEQ ID NO: 1060
  Synthetic polypeptide

SEQ ID NO: 1064 - protein, 144 aa, Artificial Sequence; identical to SEQ ID NO: 1060
  Synthetic polypeptide

SEQ ID NO: 1065 - protein, 144 aa, Artificial Sequence; identical to SEQ ID NO: 1060
  Synthetic polypeptide

SEQ ID NO: 1066 - protein, 144 aa, Artificial Sequence; identical to SEQ ID NO: 1060
  Synthetic polypeptide

SEQ ID NO: 1067 - protein, 143 aa, Artificial Sequence
  Synthetic polypeptide
MSQGRGKYDFYIGLGLAMSSSIFIGGSFILKKKGLLRLARKGSMRAVGAGEVANFAAYAFAPATLVTPLGALSVLVSAILSSYFLNERLNLHGKIGCLLSILGSTVMVIHAPKEEEIETLNEMSHKLGDPGMEGAAPNLRKGI

SEQ ID NO: 1068 - protein, 143 aa, Artificial Sequence; identical to SEQ ID NO: 1067
  Synthetic polypeptide

SEQ ID NO: 1069 - protein, 142 aa, Artificial Sequence
  Synthetic polypeptide
MRIAVICFCLLGITCAIPVKQADSGSSEEKQTLPSKSNESHDHMDDMDDEDDDDHVDSQDSIDSNDSDDVDDTDDSHQSDESHHSDESDELVTDFPTDLPATEVFTPVVPTVDTYDGRGDSVVYGLRSKSKKFRRPDIQVSI

SEQ ID NO: 1070 - protein, 142 aa, Artificial Sequence
  Synthetic polypeptide
MAATGTAAAAATGRLLLLLLALAANAGTGFAVAEPQIAMFCGKLNMHVNIQTGKWEPDPTGTKSCFETKEEVLQYCQEMYPELQITNVMEANQRVSIDNWCRRDKKQCKSRFVTPFKCLGAVAHACNPNTWGGRGRGGSQGQ

SEQ ID NO: 1071 - protein, 142 aa, Artificial Sequence
  Synthetic polypeptide
MARQPYRFPQARIPERGSGVFRLTVSDLLTTDVVEIPRKLEEKPEDVTELLQSHDQTRMDEELFVMDEQRKWFLEMESTLGEDAMNIVEMTTHNLAYSVNIVDKTAARFERTDSNFERSSTVGKMQSNSVACNREIFCDRKS

SEQ ID NO: 1072 - protein, 142 aa, Artificial Sequence; identical to SEQ ID NO: 1071
  Synthetic polypeptide

SEQ ID NO: 1073 - protein, 140 aa, Artificial Sequence
  Synthetic polypeptide
MMWSNFFLQEENRRRGAAGRRRAHGQGRSGLTPEREGKVKLALLLAAVGATLAVLSVGTEFWVELNTYKANGSAVCEAAHLGLWKACTKRLWQADVPVDRDTCGPAELPGEANCTYFKFFTTGENARIFQRTTKKVTLEK

SEQ ID NO: 1074 - protein, 140 aa, Artificial Sequence; identical to SEQ ID NO: 1073
  Synthetic polypeptide

SEQ ID NO: 1075 - protein, 140 aa, Artificial Sequence
  Synthetic polypeptide
MVMDIVGFYLPPNSGERVSFKITLLLGYSVFLIIVSDTLPATAIGTPLIGVYFVVCMALLVISLAETIFIVRLVHKQDLQQPVPAWLRHLVLERIAWLLCLREQSTSQRPPATSQATKTDDCSVGWAWSCTPVVLATSGG

SEQ ID NO: 1076 - protein, 139 aa, Artificial Sequence
  Synthetic polypeptide
MARKQNRNSKELGLVPLTDDTSHAGPPGPGRALLECDHLRSGVPGGRRRKDWSCSLLVASLAGAFGSSFLYGYNLSVVNAPTPYIKAFYNESWERRHGRPIDPDTLTLLWSVTVSIFAIGGLVGTLIVKMIGKVLGSSR

SEQ ID NO: 1077 - protein, 136 aa, Artificial Sequence
  Synthetic polypeptide
QSSNGPVKKSMREKAVERRSVNKEHNSNFKAGYIPIDEDRLHKTGLRGRKGNLAICVIILLFILAVINLIKPLEDVLYQKKDEDTGNWVSIRRERQKEVQHERKGKFMITAVQGAHTDQSSPRRPNQKDTGSRKIS

SEQ ID NO: 1078 - protein, 132 aa, Artificial Sequence
  Synthetic polypeptide
MKHVNERFQDEKNKEVVLMCIGVTSGVGRLLFGRIADYVPGVKKVYLQVLSFFFIGLMSMMIPLCSIFGALIAVCLIMGLFDGCFISIMAPIAFELVGAQDVSQAIGFLLGFMSIPMTVGPPIAEKEERKKE

SEQ ID NO: 1079 - protein, 130 aa, Artificial Sequence
  Synthetic polypeptide
MYSGNRSGGHGYWDGGGAAGAEGPAPAGTLSPAPLFSPGTYERLALLLGSIGLLGVGNNLLVLVLYYKFQRLRTPTHLLLVNISLSDLLVSLFGVTFTFVSCLRNGWVWDTVGCVWDGFSGSLFACDLGK

SEQ ID NO: 1080 - protein, 130 aa, Artificial Sequence; identical to SEQ ID NO: 1079
  Synthetic polypeptide

SEQ ID NO: 1081 - protein, 129 aa, Artificial Sequence
  Synthetic polypeptide
MTFSTWTPPPGVHSQTLSRFFDKVQDLGRDYKPGLANNTIQSILQALDELLEAPGDLETLPRLQQHCVASHLLDGLEDVLRGLSKNLSNGLLNFSYPAGTDRCDGTTVAPASWEAEVRGSLEPRRLSLQ

SEQ ID NO: 1082 - protein, 127 aa, Artificial Sequence
  Synthetic polypeptide
TTALCAARTASCTSHCATQGALQPRRRMWTARRCVRDPQRSFALGIQWIVVRILGGIPGPIAFGWVIDKACLLWQDQCGQQGSCLVYQNSAMSRYILIMGLLYKLPEVHHSLNVLNRKFQKQTVHNL

SEQ ID NO: 1083 - protein, 125 aa, Artificial Sequence
  Synthetic polypeptide
MRAPGAGAASVVSLALLWLLGLPWTWSAAAALGVYVGSGGWRFLRIVCKTARRDLLSCSDAACLSQGPPLPLPLVRVTDHITPCSLVTIQHGLVFSHIHGRGLSSQRTVNPRGWGLVVWMLCPQS

SEQ ID NO: 1084 - protein, 125 aa, Artificial Sequence; identical to SEQ ID NO: 1083
  Synthetic polypeptide

SEQ ID NO: 1085 - protein, 125 aa, Artificial Sequence; identical to SEQ ID NO: 1083
  Synthetic polypeptide

SEQ ID NO: 1086 - protein, 125 aa, Artificial Sequence; identical to SEQ ID NO: 1083
  Synthetic polypeptide

SEQ ID NO: 1087 - protein, 125 aa, Artificial Sequence; identical to SEQ ID NO: 1083
  Synthetic polypeptide

SEQ ID NO: 1088 - protein, 124 aa, Artificial Sequence
  Synthetic polypeptide
MVDVLLLFSLCLLFHISRPDLSHNRLSFIKASSMSHLQSLREVKLNNNELETIPNLGPVSANITLLSFSHCSEVKKKILLKTYNALHDLHPVGPLSSLWSHSSVLQMCQVVPALCSFAYVFPTA

SEQ ID NO: 1089 - protein, 123 aa, Artificial Sequence
  Synthetic polypeptide
MKPLIWTWSDVEGQRPALLICTAAAGPTQGVKGYGKPFEPRSVKNIHSTPAYPDATMHRQLLAPVEGRMAETLNQAGCRPEGGLSAELGKGGIHSGILCWKEPESLTLAGQKGLDPQTFTKEK

SEQ ID NO: 1090 - protein, 122 aa, Artificial Sequence
  Synthetic polypeptide
MTVRPPQPCGTGAAEDPQTTLALNFGSTLMKKKSDPEGPALLFPESELSIRIGRAGLLSDKSENGEAYQRKKAAATGLPEGPAVPVPSRGNLAQPGGSSWRRIALLILAITIHNVPGDLRIK

SEQ ID NO: 1091 - protein, 121 aa, Artificial Sequence
  Synthetic polypeptide
MGRGYSGALQARGGLEEPLERGLRGPSFTQSPLHGAAAAYLSAQRDASLPVPGQRSDMQKVTLGLLVFLAGFPVLDANDLEDKNSPFYYECEHLGFCLFSYGGVPSTLCILGAPYIFVKRM

SEQ ID NO: 1092 - protein, 121 aa, Artificial Sequence; identical to SEQ ID NO: 1091
  Synthetic polypeptide

SEQ ID NO: 1093 - protein, 121 aa, Artificial Sequence
  Synthetic polypeptide
MVSNFFHVIQVFEKSATLISKTEHIGFVIYSWRKSTTHLGSRRKFAISIYLSEVSLQKYDCPFSGTSFVVFSLFLICAMAGDVVYADIKTVRTSPLELAFPLQRSGPITRVAEQQSSGIAE

SEQ ID NO: 1094 - protein, 119 aa, Artificial Sequence
  Synthetic polypeptide
MGALARALLLPLLAQWLLRAAPELAPAPFTLPLRVAAATNRVVAPTPGPGTPAERHADGLALALEPALASPAGAANFLAMVDNLQGDSGRGYYLEMLIGTPPQKDMQRDTRDVRRGTAM

SEQ ID NO: 1095 - protein, 119 aa, Artificial Sequence; identical to SEQ ID NO: 1094
  Synthetic polypeptide

SEQ ID NO: 1096 - protein, 119 aa, Artificial Sequence; identical to SEQ ID NO: 1094
  Synthetic polypeptide

SEQ ID NO: 1097 - protein, 118 aa, Artificial Sequence
  Synthetic polypeptide
MAQKEVQVSSADARLMVFDKTEGTWRLLCSSRSNARVAGLSCEEMGFLRRNRVLSRWRVFAGAVAQASPHGLQLGVQAVVYHGGYLPFRDPNSEENSNDIALVHLSSPLPLTGQEVYT

SEQ ID NO: 1098 - protein, 117 aa, Artificial Sequence
  Synthetic polypeptide
MLLLLLSIIVLHVAVLVLLFVSTIVSQWIVGNGHATDLWQNCSTSSSGNVHHCFSSSPNEWLQSVQATMILSIIFSILSLFLFFCQLFTLTKGGRFYITGIFQILAGGAISSCQDVD

SEQ ID NO: 1099 - protein, 117 aa, Artificial Sequence; identical to SEQ ID NO: 1098
  Synthetic polypeptide

SEQ ID NO: 1100 - protein, 117 aa, Artificial Sequence; identical to SEQ ID NO: 1098
  Synthetic polypeptide

SEQ ID NO: 1101 - protein, 117 aa, Artificial Sequence; identical to SEQ ID NO: 1098
  Synthetic polypeptide

SEQ ID NO: 1102 - protein, 117 aa, Artificial Sequence
  Synthetic polypeptide
MVIRSTVWLGFPNFVDSVSDMNHTEIWPAAFCVGSAMWIQLLYSACFWWLFCYAVDAYLVIRRSAGLSTILLYHIMAWGLATLLCVEGAAMLYYPSVSRDQHSVALRTNPAFFRFCK

SEQ ID NO: 1103 - protein, 116 aa, Artificial Sequence
  Synthetic polypeptide
MQPTATMATAATTTTTTTATVALTTSWDNATGRPTAEPDPILDNYVLLVVVMSLFVGGTLVVLSGVLLLCKRCWDVHQRLNRAMEEAEKTTTTYLDNGTHPAQDWAQLDSDSSLFP

SEQ ID NO: 1104 - protein, 115 aa, Artificial Sequence
  Synthetic polypeptide
MALSMPLNGLKEEDKEPLIELFVKAGSDGESIGNCPFSQRLFMILWLKGVVFSVTTVDLKRKPADLQNLAPGTHPPFITFNSEVKTDVNKIEEFLEEVLCPPKYMALVATVLDNE

SEQ ID NO: 1105 - protein, 115 aa, Artificial Sequence; identical to SEQ ID NO: 1104
  Synthetic polypeptide

SEQ ID NO: 1106 - protein, 115 aa, Artificial Sequence
  Synthetic polypeptide
WKYNEFYHVKTSCSQGPAYVCNITNLQPYTSYNVRVVVVYKTGENSTSLPESFKTKAGVPNKPGIPKLLEGSKNSIQWEKAEDNGCRITYYILEISCCGLSELKQRYVKPQYSML

SEQ ID NO: 1107 - protein, 114 aa, Artificial Sequence
  Synthetic polypeptide
MGCCTGRCSLICLCALQLVSALERQIFDFLGFQWAPILGNFLHIIVVILGLFGTIQYRPRYIMVYTVWTALWVTWNVFIICFYLEVGGLSKETNNQASHIDQGIETYQITSSGQ

SEQ ID NO: 1108 - protein, 114 aa, Artificial Sequence; identical to SEQ ID NO: 1107
  Synthetic polypeptide

SEQ ID NO: 1109 - protein, 113 aa, Artificial Sequence
  Synthetic polypeptide
MGENKDKPYLLYFNIFSCILSSNIISVAENGLQCPTPQVCVSSCPEDPWTVGKNEFSQTVGEVFYTKNRNFCLPGVPWNMTVITSLQQELCPSFLLPSAPAWATVRLHLKKKK

SEQ ID NO: 1110 - protein, 113 aa, Artificial Sequence
  Synthetic polypeptide
MPTDHEEPCGPSHKSFCLNGGLCYVIPTIPSPFCRCVENYTGARCEEVFLPGSSIQTKSNLFEAFVALAVLVTLIIGAFYFLCRKGHFQRASSVQYDINLVETSSTSAHHSES

SEQ ID NO: 1111 - protein, 113 aa, Artificial Sequence; identical to SEQ ID NO: 1110
  Synthetic polypeptide

SEQ ID NO: 1112 - protein, 113 aa, Artificial Sequence; identical to SEQ ID NO: 1110
  Synthetic polypeptide

SEQ ID NO: 1113 - protein, 113 aa, Artificial Sequence
  Synthetic polypeptide
MRMSVGLSLLLPLSGRTFLLLLSVVMAQSHWPSEPSEAVRDWENQLEASMHSVLSDLHEAVPTVVGIPDGTAVVGRSFRVTIPTDLIASSGDIIKAEAGGSLKPRSSRPIWTT

SEQ ID NO: 1114 - protein, 113 aa, Artificial Sequence; identical to SEQ ID NO: 1113
  Synthetic polypeptide

SEQ ID NO: 1115 - protein, 113 aa, Artificial Sequence; identical to SEQ ID NO: 1113
  Synthetic polypeptide

SEQ ID NO: 1116 - protein, 113 aa, Artificial Sequence; identical to SEQ ID NO: 1113
  Synthetic polypeptide

SEQ ID NO: 1117 - protein, 113 aa, Artificial Sequence; identical to SEQ ID NO: 1113
  Synthetic polypeptide

SEQ ID NO: 1118 - protein, 113 aa, Artificial Sequence; identical to SEQ ID NO: 1113
  Synthetic polypeptide

SEQ ID NO: 1119 - protein, 113 aa, Artificial Sequence; identical to SEQ ID NO: 1113
  Synthetic polypeptide

SEQ ID NO: 1120 - protein, 113 aa, Artificial Sequence; identical to SEQ ID NO: 1113
  Synthetic polypeptide

SEQ ID NO: 1121 - protein, 113 aa, Artificial Sequence; identical to SEQ ID NO: 1113
  Synthetic polypeptide

SEQ ID NO: 1122 - protein, 112 aa, Artificial Sequence
  Synthetic polypeptide
TTALCAARTASCTSHCATQGALQPRRRMWTARRCVRDPQRSFALGIQWIVVRILGGIPGPIAFGWVIDKACLLWQDQCGQQGSCLVYQNSAMSRYILIMGLLYKDSDSPFVQ

SEQ ID NO: 1123 - protein, 110 aa, Artificial Sequence
  Synthetic polypeptide
MKLSKKDRGEDEESDSAKKKLDWSCSLLVASLAGAFGSSFLYGYNLSVVNAPTPYIKAFYNESWERRHGRPIDPDTLTLLWSVTVSIFAIGGLVGTLIVKMIGKVLGSSR

SEQ ID NO: 1124 - protein, 110 aa, Artificial Sequence; identical to SEQ ID NO: 1123
  Synthetic polypeptide

SEQ ID NO: 1125 - protein, 110 aa, Artificial Sequence; identical to SEQ ID NO: 1123
  Synthetic polypeptide

SEQ ID NO: 1126 - protein, 110 aa, Artificial Sequence [sequence omitted]

SEQ ID NO: 1127 - protein, 110 aa, Artificial Sequence [sequence omitted]

SEQ ID NO: 1128 - protein, 110 aa, Artificial Sequence [sequence omitted]

SEQ ID NO: 1129 - protein, 110 aa, Artificial Sequence
  Synthetic polypeptide
MAVESEYSLLRTEASFPTMKMFCVSHTLPRVEVMFVSGPQTRERTEPVDPRWQCLVQMWAGCLLEEGLCGASEACVNETMETRSVMNLACDGRKHPINSSSLLPGNVSQV

SEQ ID NO: 1130 - protein, 106 aa, Artificial Sequence
  Synthetic polypeptide
MAQALPWLLLWMGAGVLPAHGTQHGIRLPLRSGLGGAPLGLRLPRETDEEPEEPGRRGSFVEMVDNLRGKSGQGYYVEMTVGSPPQTLVFQQTCRGHRGSVPLAPA

SEQ ID NO: 1131 - protein, 106 aa, Artificial Sequence; identical to SEQ ID NO: 1130
  Synthetic polypeptide

SEQ ID NO: 1132 - protein, 106 aa, Artificial Sequence; identical to SEQ ID NO: 1130
  Synthetic polypeptide

SEQ ID NO: 1133 - protein, 106 aa, Artificial Sequence; identical to SEQ ID NO: 1130
  Synthetic polypeptide

SEQ ID NO: 1134 - protein, 106 aa, Artificial Sequence; identical to SEQ ID NO: 1130
  Synthetic polypeptide

SEQ ID NO: 1135 - protein, 106 aa, Artificial Sequence
  Synthetic polypeptide
MNSFFGTPAASWCLLESDVSSAPDKEAGRERRALSVQQRGGPAWSGSLEWSRQSAGDRRRLGLSRQTAKSSWSRSRDRTCCCRRAWWILVPAADRARRERSPQLRN

SEQ ID NO: 1136 - protein, 106 aa, Artificial Sequence; identical to SEQ ID NO: 1135
  Synthetic polypeptide

SEQ ID NO: 1137 - protein, 105 aa, Artificial Sequence
  Synthetic polypeptide
MKPLIWTWSDVEGQRPALLICTAAAGPTQGVKAYPDATMHRQLLAPVEGRMAETLNQAGCRPEGGLSAELGKGGIHSGILCWKEPESLTLAGQKGLDPQTFTKEK

SEQ ID NO: 1138 - protein, 105 aa, Artificial Sequence
  Synthetic polypeptide
MAVLFFHTMRYKSQDPRNPHNDRFVLSKGHAAPILYAVWAEAGFLAEAELLNLRKISSDLDGHPVPKQAFTDVATGSLGQGLGAACGMAYTGKYFDKASATFRQV

SEQ ID NO: 1139 - protein, 102 aa, Artificial Sequence
  Synthetic polypeptide
KGENECQMGHDLLSNFLQLLYVSKSEPPKSESMGLLALWLPGEFSQWNHGRRSEGGNTMRSRNVFPWFLPCSITAVGMYLSQTSYLLLHYSLHRALFYLGLQ

SEQ ID NO: 1140 - protein, 102 aa, Artificial Sequence
  Synthetic polypeptide
MAPRARRRRPLFALLLLCALLARLQVALQIAPPCTSEKHYEHLGRCCNKCEPGKYMSSKCTTTSDSVCLPCGPDEYLDSWNEEDKCLLHKVCDTGTPQFSCT

SEQ ID NO: 1141 - protein, 102 aa, Artificial Sequence; identical to SEQ ID NO: 1140
  Synthetic polypeptide

SEQ ID NO: 1142 - protein, 102 aa, Artificial Sequence
  Synthetic polypeptide
MAQALPWLLLWMGAGVLPAHGTQHGIRLPLRSGLGGAPLGLRLPRETDEEPEEPGRRGSFVEMVDNLRGKSGQGYYVEMTVGSPPQTQTCRGHRGSVPLAPA

SEQ ID NO: 1143 - protein, 102 aa, Artificial Sequence; identical to SEQ ID NO: 1142
  Synthetic polypeptide

SEQ ID NO: 1144 - protein, 102 aa, Artificial Sequence; identical to SEQ ID NO: 1142
  Synthetic polypeptide

SEQ ID NO: 1145 - protein, 102 aa, Artificial Sequence; identical to SEQ ID NO: 1142
  Synthetic polypeptide

SEQ ID NO: 1146 - protein, 102 aa, Artificial Sequence; identical to SEQ ID NO: 1142
  Synthetic polypeptide

SEQ ID NO: 1147 - protein, 100 aa, Artificial Sequence
  Synthetic polypeptide
IPRSPQPLGGSHRTPSSRRDSDGANSVASYENEEPACEDADEDEDDYHNPGYLVVLPDSTPATSTAAPSAPALSTPGIRDSAFSRAEVGRSSEPRRSRLR

SEQ ID NO: 1148 - protein, 100 aa, Artificial Sequence
  Synthetic polypeptide
MKTWVKIVFGVATSAVLALLVMCIVLRPSRALFTIAKTWNQPKCPSMIDWIKKMWHIYTMEYYAAMGHAGTWLKLETIILSKLTQKQKTEHCMFSLISGS

SEQ ID NO: 1149 - protein, 100 aa, Artificial Sequence; identical to SEQ ID NO: 1148
  Synthetic polypeptide

SEQ ID NO: 1150 - protein, 99 aa, Artificial Sequence
  Synthetic polypeptide
MAQKEGGRTVPCCSRPKVAALTAGTLLLLTAIGAASWAIVAVLLRSDQEPLYPGLCSCTTFPGTLSLQRLKSATSPHPPCRHSPPSVAFYFSLWPLPIL

SEQ ID NO: 1151 - protein, 99 aa, Artificial Sequence; identical to SEQ ID NO: 1150
  Synthetic polypeptide

SEQ ID NO: 1152 - protein, 99 aa, Artificial Sequence; identical to SEQ ID NO: 1150
  Synthetic polypeptide

SEQ ID NO: 1153 - protein, 99 aa, Artificial Sequence
  Synthetic polypeptide
MTFACGRTSEDYTLTMYFQQSWKDKRLSYSGIPLNLTLDNRVADQLWVPDTYFLNDKKSFVHGVTVKNRMIRLHPDGTVLYGLRKKDPSSSSSSSAYSV

SEQ ID NO: 1154 - protein, 98 aa, Artificial Sequence
  Synthetic polypeptide
MECLYYFLGFLLLAARLPLDAAKQAGLSADPYVYNWTAWSEDSDGENGTGQSHHNVFPDGKPFPHHPGWRRWNFIYVFHTLGQDFQTSLATMVKPHLY

SEQ ID NO: 1155 - protein, 97 aa, Artificial Sequence
  Synthetic polypeptide
RQPRNPKTDKLVNERLISMAYGQIGMIQALGGFFTYFVILAENGFLPIHLLGLRVDWDDRWINDVEDSYGQQWTYEQRKIVEFTCHTAFFVSIVAVQ

SEQ ID NO: 1156 - protein, 97 aa, Artificial Sequence
  Synthetic polypeptide
MCCSTHLFQPLQLAGGLEWPWSNLLCFLTPVKLHPEVWGLFPNQQSQEHAAFRFALSQLTEPPKLLPQIDIVNISDSFEMTYRFVQIEGDQLGKCLA

SEQ ID NO: 1157 - protein, 97 aa, Artificial Sequence; identical to SEQ ID NO: 1156
  Synthetic polypeptide

SEQ ID NO: 1158 - protein, 96 aa, Artificial Sequence
  Synthetic polypeptide
GCPSPPASLIPLWTPQLWIHAGPPAEGCLPELHGGGVQCVLPPRSTVDILGSECIPSRSPSTPGAELQLQQLEHHSFTSCQEFETSLANMVKPCLY

SEQ ID NO: 1159 - protein, 95 aa, Artificial Sequence
  Synthetic polypeptide
MSAQRLISNRTSQQSASNSDYTWEYEYYEIGPVSFEGLKAHKYSIVIGFWVGLAVFVIFMFFVLTLLTKTGAPHQDGLSQQELTWVEKKNFSFLT

SEQ ID NO: 1160 - protein, 94 aa, Artificial Sequence
  Synthetic polypeptide
MGRGYSGALQARGGLEEPLERGLRGPSFTQSPLHGAAAAYLSAQRDASLPVPGQRSDMQKVTLGLLVFLAGFPVLDANDLEDKNSPFYYAPCAS

SEQ ID NO: 1161 - protein, 94 aa, Artificial Sequence; identical to SEQ ID NO: 1160
  Synthetic polypeptide

SEQ ID NO: 1162 - protein, 91 aa, Artificial Sequence
  Synthetic polypeptide
MDTTAAAALPAFVALLLLSPWPLLGSAQGQFSAGGCTFDDGPGACDYHQDLYDDFEWVHVSAQEPHYLPPEMPQGCFPAQALFACCHPCKT

SEQ ID NO: 1163 - protein, 91 aa, Artificial Sequence; identical to SEQ ID NO: 1162
  Synthetic polypeptide

SEQ ID NO: 1164 - protein, 91 aa, Artificial Sequence; identical to SEQ ID NO: 1162
  Synthetic polypeptide

SEQ ID NO: 1165 - protein, 91 aa, Artificial Sequence; identical to SEQ ID NO: 1162
  Synthetic polypeptide

SEQ ID NO: 1166 - protein, 91 aa, Artificial Sequence; identical to SEQ ID NO: 1162
  Synthetic polypeptide

SEQ ID NO: 1167 - protein, 91 aa, Artificial Sequence; identical to SEQ ID NO: 1162
  Synthetic polypeptide

SEQ ID NO: 1168 - protein, 91 aa, Artificial Sequence; identical to SEQ ID NO: 1162
  Synthetic polypeptide

SEQ ID NO: 1169 - protein, 91 aa, Artificial Sequence; identical to SEQ ID NO: 1162
  Synthetic polypeptide

SEQ ID NO: 1170 - protein, 91 aa, Artificial Sequence
  Synthetic polypeptide
MSHLQSLREVKLNNNELETIPNLGPVSANITLLSFSHCSEVKKKILLKTYNALHDLHPVGPLSSLWSHSSVLQMCQVVPALCSFAYVFPTA

SEQ ID NO: 1171 - protein, 90 aa, Artificial Sequence
  Synthetic polypeptide
MWNLLHETDSAVATARRPRWLCAGALVLAGGFFLLGFLFGLHPLHPVHFSDLSSSISSSVWCFLIPHSNPSLSVLCTGGILFPFACNHVF

SEQ ID NO: 1172 - protein, 90 aa, Artificial Sequence; identical to SEQ ID NO: 1171
  Synthetic polypeptide

SEQ ID NO: 1173 - protein, 90 aa, Artificial Sequence; identical to SEQ ID NO: 1171
  Synthetic polypeptide

SEQ ID NO: 1174 - protein, 90 aa, Artificial Sequence; identical to SEQ ID NO: 1171
  Synthetic polypeptide

SEQ ID NO: 1175 - protein, 90 aa, Artificial Sequence; identical to SEQ ID NO: 1171
  Synthetic polypeptide

SEQ ID NO: 1176 - protein, 90 aa, Artificial Sequence
  Synthetic polypeptide
MCTGDKDVVNEGRKSFPSGHSSFAFAGLAFASFYLAGKLHCFTPQGRGKSWRFCAFLSPLLFAAVIALSRTCDYKHHWQGKNKKRTKEHV

SEQ ID NO: 1177 - protein, 89 aa, Artificial Sequence
  Synthetic polypeptide
MECLYYFLGFLLLAARLPLDAAKQAGLSADPYVYNWTAWSEDSDGENGTGQSHHNVFPDGKPFPHHPGWRRWNFIYVFHTLDRACGSHL

SEQ ID NO: 1178 - protein, 88 aa, Artificial Sequence
  Synthetic polypeptide
MEPELAAQKQPRPRRRSRRASGLSTEGATGPSADTSGSELDGRCSLRRGSSFTFLTPGPNWDFTLKRKRREKDDDVVSLSSLDLKLPS

SEQ ID NO: 1179 - protein, 88 aa, Artificial Sequence
  Synthetic polypeptide
MGWKAESLESATMFLENWKRLQMRLGYFWDLTGIEEEEEHSRPEYETKVREKMLKESNQSAVQKLETNTTECGDEGHGWSWKSLSSAN

SEQ ID NO: 1180 - protein, 87 aa, Artificial Sequence
  Synthetic polypeptide
MGPPLPLLLLLLLLLPPRVLPAAPSSVPRGRQLPGRLGCLLEEGLCGASEACVNETMETRSVMNLACDGRKHPINSSSLLPGNVSQV

SEQ ID NO: 1181 - protein, 87 aa, Artificial Sequence; identical to SEQ ID NO: 1180
  Synthetic polypeptide

SEQ ID NO: 1182 - protein, 87 aa, Artificial Sequence; identical to SEQ ID NO: 1180
  Synthetic polypeptide

SEQ ID NO: 1183 - protein, 87 aa, Artificial Sequence
  Synthetic polypeptide
MQHIFAFFCTGFLGAVVGANFPNNIQIGGLFPNQQSQEHAAFRFALSQLTEPPKLLPQIDIVNISDSFEMTYRFVQIEGDQLGKCLA

SEQ ID NO: 1184 - protein, 87 aa, Artificial Sequence; identical to SEQ ID NO: 1183
  Synthetic polypeptide

SEQ ID NO: 1185 - protein, 87 aa, Artificial Sequence; identical to SEQ ID NO: 1183
  Synthetic polypeptide

SEQ ID NO: 1186 - protein, 87 aa, Artificial Sequence
  Synthetic polypeptide
MPTSARCDDLEALKKKGCPPDDIENPRGSKDIKKNKNVTNRSKGTAEKLKPEDITQIQPQQLVLRLRSGSGIPLHTEQSSQLQCLKS

SEQ ID NO: 1187 - protein, 85 aa, Artificial Sequence
  Synthetic polypeptide
AAAEVAGQFVIKLTHDVELNLDYERYNSQLLSFVRDLNQYRADIKEMGLSLQWLYSARGGCSELRSRHCTPAWATRAKLCLNNNK

SEQ ID NO: 1188 - protein, 82 aa, Artificial Sequence
  Synthetic polypeptide
MTKNEKKSLNQSLAEWKLFIYNPTTGEFLGRTAKSWGLILLFYLVFYGFLAALFSFTMWVMLQTLNDEVAVSQDCTTTLQVG

SEQ ID NO: 1189 - protein, 82 aa, Artificial Sequence
  Synthetic polypeptide
MYGVFVRILTERSQRKAFLQARSCIEDRLRLEDENEKQERLLMSLLPRNVAMEMKEDFLKPPERIFHKIYIQRHDNVRRERV

SEQ ID NO: 1190 - protein, 82 aa, Artificial Sequence
  Synthetic polypeptide
HLSLYPLSVDFFLVRKMDGAGGHYPRKLTQEQKTKYHMFSLISRRQRMSIHGHKEGNNRHWILLESEGWEEGKSQKKKTIGD

SEQ ID NO: 1191 - protein, 82 aa, Artificial Sequence
  Synthetic polypeptide
MSAQRLISNRTSQQSASNSDYTWEYEYYEIGPVSFEGLKAHKYSIVIGFWVGLAVFVIFMFFVLTLLTKTGAPHQDRLPSML

SEQ ID NO: 1192 - protein, 81 aa, Artificial Sequence
  Synthetic polypeptide
MSAQRLISNRTSQQSASNSDYTWEYEYYEIGPVSFEGLKAHKYSIVIGFWVGLAVFVIFMFFVLTLLTKTGAPHQELPSML

SEQ ID NO: 1193 - protein, 81 aa, Artificial Sequence
  Synthetic polypeptide
MVIRSTVWLGFPNFVDSVSDMNHTEIWPAAFCVGSAMWIQLLYSACFWWLFCYAVDAYLVIRRSAGLSCEMVPTTQGHCEE

SEQ ID NO: 1194 - protein, 80 aa, Artificial Sequence
  Synthetic polypeptide
MATCHSHRTNSWQISVPSAFVWSVAPIKNVSRRSWVVDDNVLQHNSLSLHIFSHIQHDSSNGWEHGDPRMESGLELLSCN

SEQ ID NO: 1195 - protein, 79 aa, Artificial Sequence
  Synthetic polypeptide
MCIVLRPSRALFTIAKTWNQPKCPSMIDWIKKMWHIYTMEYYAAMGHAGTWLKLETIILSKLTQKQKTEHCMFSLISGS

SEQ ID NO: 1196 - protein, 79 aa, Artificial Sequence; identical to SEQ ID NO: 1195
  Synthetic polypeptide

SEQ ID NO: 1197 - protein, 77 aa, Artificial Sequence
  Synthetic polypeptide
MEEASEGGGNDRVRNLQSEVEGVKNIMTQNVERILARGENLEHLRNKTEDLEATPQQSRWGKESWSCEMCPPGACTP

SEQ ID NO: 1198 - protein, 77 aa, Artificial Sequence; identical to SEQ ID NO: 1197
  Synthetic polypeptide

SEQ ID NO: 1199 - protein, 76 aa, Artificial Sequence
  Synthetic polypeptide
MVAWRSAFLVCLAFSLATLVQRGSGDFDDFNLEDAVKETSSVKPALGMYHKLDGLKQQNFILSLFWMLEVLYQGSL

SEQ ID NO: 1200 - protein, 76 aa, Artificial Sequence
  Synthetic polypeptide
MKSPRRTTLCLMFIVIYSSKAALNWNYESTIHPLSLHEHEPAGEEALRQKRAVPRPSLLFSLLPLLPRYIPYFTQQ

SEQ ID NO: 1201 - protein, 76 aa, Artificial Sequence; identical to SEQ ID NO: 1200
  Synthetic polypeptide

SEQ ID NO: 1202 - protein, 76 aa, Artificial Sequence; identical to SEQ ID NO: 1200
  Synthetic polypeptide

SEQ ID NO: 1203 - protein, 76 aa, Artificial Sequence; identical to SEQ ID NO: 1200
  Synthetic polypeptide

SEQ ID NO: 1204 - protein, 75 aa, Artificial Sequence
  Synthetic polypeptide
SCSSHSLSQPISTGSTMSGRDRSCDSATSCTADGATVSSAHTSPDHLCLLSLIPCLTAPVPLMPISLGLNPQIKC

SEQ ID NO: 1205 - protein, 72 aa, Artificial Sequence
  Synthetic polypeptide
MAAQGEPGYLAAQSDPGSNSERSTDSPVPGSEDDLVAGATLHSPEWSEERFRVDRKKLEAMLQDLEVTMLPL

SEQ ID NO: 1206 - protein, 71 aa, Artificial Sequence
  Synthetic polypeptide
MSAQCCAGQLACCCGSAGCSLCCDCCPRIRQSLSTRFMYALYFILVVVLCCIMMSTTVAHKMKEHVYAQMA

SEQ ID NO: 1207 - protein, 71 aa, Artificial Sequence; identical to SEQ ID NO: 1206
  Synthetic polypeptide

SEQ ID NO: 1208 - protein, 71 aa, Artificial Sequence; identical to SEQ ID NO: 1206
  Synthetic polypeptide

SEQ ID NO: 1209 - protein, 71 aa, Artificial Sequence; identical to SEQ ID NO: 1206
  Synthetic polypeptide

SEQ ID NO: 1210 - protein, 69 aa, Artificial Sequence
  Synthetic polypeptide
MLLLLLSIIVLHVAVLVLLFVSTIVSQWIVGNGHATDLWQNCSTSSSGNVHHCFSSSPNESTRGLGSKQ

SEQ ID NO: 1211 - protein, 69 aa, Artificial Sequence; identical to SEQ ID NO: 1210
  Synthetic polypeptide

SEQ ID NO: 1212 - protein, 69 aa, Artificial Sequence; identical to SEQ ID NO: 1210
  Synthetic polypeptide

SEQ ID NO: 1213 - protein, 69 aa, Artificial Sequence; identical to SEQ ID NO: 1210
  Synthetic polypeptide

SEQ ID NO: 1214 - protein, 68 aa, Artificial Sequence
  Synthetic polypeptide
MLSEGDILFSSLLSSPSLFWPPGLILLFYLVFYGFLAALFSFTMWVMLQTLNDEVAVSQDCTTTLQVG

SEQ ID NO: 1215 - protein, 68 aa, Artificial Sequence; identical to SEQ ID NO: 1214
  Synthetic polypeptide

SEQ ID NO: 1216 - protein, 67 aa, Artificial Sequence
  Synthetic polypeptide
MAARPLPVSPARALLLALAGALLAPCEARGVSLWNQGRADEVVSASVGSGDLWIPVKSFDSKKMCIN

SEQ ID NO: 1217 - protein, 67 aa, Artificial Sequence; identical to SEQ ID NO: 1216
  Synthetic polypeptide

SEQ ID NO: 1218 - protein, 67 aa, Artificial Sequence; identical to SEQ ID NO: 1216
  Synthetic polypeptide

SEQ ID NO: 1219 - protein, 66 aa, Artificial Sequence
  Synthetic polypeptide
MPANYTCTRPDGDNTDFRYFIYAQKKKKKKKKKKKKKKKKKKKKKKDYQSEQATYRMGENFCNLSI

SEQ ID NO: 1220 - protein, 66 aa, Artificial Sequence
  Synthetic polypeptide
MAAQGEPGYLAAQSDPGSNSERSTDSPVPGSEDDLVAGATLHSPEWSEERFRVDRKKLEAMLQGGF

SEQ ID NO: 1221 - protein, 64 aa, Artificial Sequence
  Synthetic polypeptide
MQKVTLGLLVFLAGFPVLDANDLEDKNSPFYYECEHLGFCLFSYGGVPSTLCILGAPYIFVKRM

SEQ ID NO: 1222 - protein, 64 aa, Artificial Sequence; identical to SEQ ID NO: 1221
  Synthetic polypeptide

SEQ ID NO: 1223 - protein, 64 aa, Artificial Sequence; identical to SEQ ID NO: 1221
  Synthetic polypeptide

SEQ ID NO: 1224 - protein, 64 aa, Artificial Sequence; identical to SEQ ID NO: 1221
  Synthetic polypeptide

SEQ ID NO: 1225 - protein, 64 aa, Artificial Sequence; identical to SEQ ID NO: 1221
  Synthetic polypeptide

SEQ ID NO: 1226 - protein, 64 aa, Artificial Sequence; identical to SEQ ID NO: 1221
  Synthetic polypeptide

SEQ ID NO: 1227 - protein, 64 aa, Artificial Sequence; identical to SEQ ID NO: 1221
  Synthetic polypeptide

SEQ ID NO: 1228 - protein, 64 aa, Artificial Sequence; identical to SEQ ID NO: 1221
  Synthetic polypeptide

SEQ ID NO: 1229 - protein, 64 aa, Artificial Sequence; identical to SEQ ID NO: 1221
  Synthetic polypeptide

SEQ ID NO: 1230 - protein, 64 aa, Artificial Sequence; identical to SEQ ID NO: 1221
  Synthetic polypeptide

SEQ ID NO: 1231 - protein, 64 aa, Artificial Sequence; identical to SEQ ID NO: 1221
  Synthetic polypeptide

SEQ ID NO: 1232 - protein, 64 aa, Artificial Sequence; identical to SEQ ID NO: 1221
  Synthetic polypeptide

SEQ ID NO: 1233 - protein, 64 aa, Artificial Sequence; identical to SEQ ID NO: 1221
  Synthetic polypeptide

SEQ ID NO: 1234 - protein, 64 aa, Artificial Sequence; identical to SEQ ID NO: 1221
  Synthetic polypeptide

SEQ ID NO: 1235 - protein, 64 aa, Artificial Sequence; identical to SEQ ID NO: 1221
  Synthetic polypeptide

SEQ ID NO: 1236 - protein, 64 aa, Artificial Sequence
  Synthetic polypeptide
MYPELQITNVMEANQRVSIDNWCRRDKKQCKSRFVTPFKCLGAVAHACNPNTWGGRGRGGSQGQ

SEQ ID NO: 1237 - protein, 64 aa, Artificial Sequence
  Synthetic polypeptide
MANPGLGLLLALGLPFLLARWGRAWGQIQTTSANENSTVLPSSTSSSSDGNLPGQQSKTRSQKK

SEQ ID NO: 1238 - protein, 64 aa, Artificial Sequence; identical to SEQ ID NO: 1237
  Synthetic polypeptide

SEQ ID NO: 1239 - protein, 64 aa, Artificial Sequence; identical to SEQ ID NO: 1237
  Synthetic polypeptide

SEQ ID NO: 1240 - protein, 64 aa, Artificial Sequence; identical to SEQ ID NO: 1237
  Synthetic polypeptide

SEQ ID NO: 1241 - protein, 62 aa, Artificial Sequence
  Synthetic polypeptide
MKHVNERFQDEKNKEVVLMCIGVTSGVGRLLFGRIADYVPGVKKVYLQRKKKGRKNKERKKK

SEQ ID NO: 1242 - protein, 62 aa, Artificial Sequence
  Synthetic polypeptide
MLLTRKQTCQLGILLSIHRQHSKKLTVSSLTAGCLLENCILIFYNTASHIMIICKYSFIIKE

SEQ ID NO: 1243 - protein, 62 aa, Artificial Sequence; identical to SEQ ID NO: 1242
  Synthetic polypeptide

SEQ ID NO: 1244 - protein, 58 aa, Artificial Sequence
  Synthetic polypeptide
APFGPMNIRMQQQVTILEAESSLHQTTKPASALILDFAASRTVRNKFVLNYPVSGILL

SEQ ID NO: 1245 - protein, 56 aa, Artificial Sequence
  Synthetic polypeptide
AQPGGSSWRRIALLILAITIHNVPEGLAVGVGFGAIEKTASATFESARKPTPKNLP

SEQ ID NO: 1246 - protein, 56 aa, Artificial Sequence
  Synthetic polypeptide
MAAVCPGHHDPVDHLQHSVSVPVLLPTLHPHQGGQVLHHWNLPNSCWRCNFFLPRC

SEQ ID NO: 1247 - protein, 56 aa, Artificial Sequence; identical to SEQ ID NO: 1246
  Synthetic polypeptide

SEQ ID NO: 1248 - protein, 55 aa, Artificial Sequence
  Synthetic polypeptide
MNDHNAYRCFSQPRHISVAMDKFGFSWAWWQAPVVPAPQEAEAEESLEPGRRKLQ

SEQ ID NO: 1249 - protein, 55 aa, Artificial Sequence
  Synthetic polypeptide
MEPSSKKLTGRLMLAVGGAVLGSLQFGYNTGVINAPQKVCSAGSRGRTASTRRHS

SEQ ID NO: 1250 - protein, 55 aa, Artificial Sequence; identical to SEQ ID NO: 1249
  Synthetic polypeptide

SEQ ID NO: 1251 - protein, 55 aa, Artificial Sequence; identical to SEQ ID NO: 1249
  Synthetic polypeptide

SEQ ID NO: 1252 - protein, 55 aa, Artificial Sequence
  Synthetic polypeptide
MSGKHYKGPEVSCCIKYFIFGFNVIFWFLGITFLGIGLWAWNEKVLGNLYQQSKD

SEQ ID NO: 1253 - protein, 55 aa, Artificial Sequence; identical to SEQ ID NO: 1252
  Synthetic polypeptide

SEQ ID NO: 1254 - protein, 54 aa, Artificial Sequence
  Synthetic polypeptide
MGNWVVNHWFSVLFLVVWLGLNVFLFVDAFLKYEKADKYYYTRKILGEELVPFF

SEQ ID NO: 1255 - protein, 54 aa, Artificial Sequence; identical to SEQ ID NO: 1254
  Synthetic polypeptide

SEQ ID NO: 1256 - protein, 54 aa, Artificial Sequence; identical to SEQ ID NO: 1254
  Synthetic polypeptide

SEQ ID NO: 1257 - protein, 54 aa, Artificial Sequence; identical to SEQ ID NO: 1254
  Synthetic polypeptide

SEQ ID NO: 1258 - protein, 54 aa, Artificial Sequence
  Synthetic polypeptide
MNGRSLIGGAGDARHGPVWKDPFGTKAGDAARRGIARLSLALADGSQEQSSQLD

SEQ ID NO: 1259 - protein, 54 aa, Artificial Sequence; identical to SEQ ID NO: 1258
  Synthetic polypeptide

SEQ ID NO: 1260 - protein, 54 aa, Artificial Sequence; identical to SEQ ID NO: 1258
  Synthetic polypeptide

SEQ ID NO: 1261 - protein, 54 aa, Artificial Sequence; identical to SEQ ID NO: 1258
  Synthetic polypeptide

SEQ ID NO: 1262 - protein, 54 aa, Artificial Sequence
  Synthetic polypeptide
MARAAALLPSRSPPTPLLWPLLLLLLLETGLFTIPKTWTQSKCPSWIDWIKKMY

SEQ ID NO: 1263 - protein, 54 aa, Artificial Sequence; identical to SEQ ID NO: 1262
  Synthetic polypeptide

SEQ ID NO: 1264 - protein, 52 aa, Artificial Sequence
  Synthetic polypeptide
VVLRNDVAPTIIPTPMYRPRPANPDEIGNFIIESWDTCLLPLNIRTPGSLAF

SEQ ID NO: 1265 - protein, 52 aa, Artificial Sequence
  Synthetic polypeptide
SALSQYLFPSFETFNTKNCIAYNPNGNALDESCEDKNRYIYYLIWGKPVIMS

SEQ ID NO: 1266 - protein, 51 aa, Artificial Sequence
  Synthetic polypeptide
MTQNVERILARGENLEHLRNKTEDLEATPQQSRWGKESWSCEMCPPGACTP

SEQ ID NO: 1267 - protein, 51 aa, Artificial Sequence
  Synthetic polypeptide
MVLLTSRMKPLTSRIISIIIILAGAIALIIGFGISGVSAFASFSFSLATAM

SEQ ID NO: 1268 - protein, 51 aa, Artificial Sequence
  Synthetic polypeptide
MAQKEGLCSCTTFPGTLSLQRLKSATSPHPPCRHSPPSVAFYFSLWPLPIL

SEQ ID NO: 1269 - protein, 51 aa, Artificial Sequence; identical to SEQ ID NO: 1268
  Synthetic polypeptide

SEQ ID NO: 1270 - protein, 51 aa, Artificial Sequence; identical to SEQ ID NO: 1268
  Synthetic polypeptide

SEQ ID NO: 1271 - protein, 51 aa, Artificial Sequence; identical to SEQ ID NO: 1268
  Synthetic polypeptide

SEQ ID NO: 1272 - protein, 51 aa, Artificial Sequence
  Synthetic polypeptide
MSSFKRGSLKSSTSGSQKGQKSWIEKTFCKRECIFVIPSMKDSNRHSKRLG

SEQ ID NO: 1273 - protein, 50 aa, Artificial Sequence
  Synthetic polypeptide
MELQPPEASIAVVSIPRQLPGSHSEAGVQGLSAGDDSETSMANMVKTLLY

SEQ ID NO: 1274 - protein, 50 aa, Artificial Sequence; identical to SEQ ID NO: 1273
  Synthetic polypeptide

SEQ ID NO: 1275 - protein, 50 aa, Artificial Sequence; identical to SEQ ID NO: 1273
  Synthetic polypeptide

SEQ ID NO: 1276 - protein, 50 aa, Artificial Sequence; identical to SEQ ID NO: 1273
  Synthetic polypeptide

SEQ ID NO: 1277 - protein, 50 aa, Artificial Sequence; identical to SEQ ID NO: 1273
  Synthetic polypeptide

SEQ ID NO: 1278 - protein, 50 aa, Artificial Sequence
  Synthetic polypeptide
GEGRGHHGCLLPAGRLWNRALRGQAGGGGAGEAPSVGSGSSMAVWAKPSL

SEQ ID NO: 1279 - protein, 49 aa, Artificial Sequence
  Synthetic polypeptide
GEGRGHHGCLLPAGRLWNRALRGQAGGGGAGEAPSVGSGSMAVWAKPSL

SEQ ID NO: 1280 - protein, 48 aa, Artificial Sequence
  Synthetic polypeptide
MHRRRSRSCREDQKPVMDDQRDLISNNEQLPMLGRRPGAPESQPLGQP

SEQ ID NO: 1281 - protein, 48 aa, Artificial Sequence; identical to SEQ ID NO: 1280
  Synthetic polypeptide

SEQ ID NO: 1282 - protein, 48 aa, Artificial Sequence; identical to SEQ ID NO: 1280
  Synthetic polypeptide

SEQ ID NO: 1283 - protein, 48 aa, Artificial Sequence; identical to SEQ ID NO: 1280
  Synthetic polypeptide

SEQ ID NO: 1284 - protein, 48 aa, Artificial Sequence; identical to SEQ ID NO: 1280
  Synthetic polypeptide

SEQ ID NO: 1285 - protein, 48 aa, Artificial Sequence; identical to SEQ ID NO: 1280
  Synthetic polypeptide

SEQ ID NO: 1286 - protein, 48 aa, Artificial Sequence
  Synthetic polypeptide
MASLGQILFWSIISIIIILAGAIALIIGFGISGVSAFASFSFSLATAM

SEQ ID NO: 1287 - protein, 48 aa, Artificial Sequence; identical to SEQ ID NO: 1286
  Synthetic polypeptide

SEQ ID NO: 1288 - protein, 48 aa, Artificial Sequence
  Synthetic polypeptide
MSSFKRGSLKSSTSGSQKGQKSWIEKTFCKRECIFVIPSMKDSNSSAR

SEQ ID NO: 1289 - protein, 47 aa, Artificial Sequence
  Synthetic polypeptide
MSAGGASVPPPPNPAVSFPPPRVTLPAGPDILRTYSGAFVCLEIHLA

SEQ ID NO: 1290 - protein, 47 aa, Artificial Sequence
  Synthetic polypeptide
MGITSLLANGVYAAAYPLHDGDYNGENVEFNDRKPTQPTLKKCLWDE

SEQ ID NO: 1291 - protein, 46 aa, Artificial Sequence
  Synthetic polypeptide
MVSVFRSEEMCLSQLFLQVEAAYCCVAELGELGLVQFKDFFTQDLV

SEQ ID NO: 1292 - protein, 46 aa, Artificial Sequence; identical to SEQ ID NO: 1291
  Synthetic polypeptide

SEQ ID NO: 1293 - protein, 46 aa, Artificial Sequence; identical to SEQ ID NO: 1291
  Synthetic polypeptide

SEQ ID NO: 1294 - protein, 46 aa, Artificial Sequence
  Synthetic polypeptide
MPRGDSEQVRYCARFSYLWLKFSLIIYSTVFWLSTSRREKLLNNEI

SEQ ID NO: 1295 - protein, 45 aa, Artificial Sequence
  Synthetic polypeptide
GEAGAVGKIRSQSWMTSATLSPTMSNCPCWAGALGPRRASPWGSH

SEQ ID NO: 1296 - protein, 45 aa, Artificial Sequence
  Synthetic polypeptide
GEGRGHHGCLLPAGRLWNRALRGQAGGGGAGEAPSVGSGSWRFQF

SEQ ID NO: 1297 - protein, 45 aa, Artificial Sequence
  Synthetic polypeptide
GCPSPPASLIPLWTPQLWIHAGPPAEGCLPELHGGGGCSEPSSRH

SEQ ID NO: 1298 - protein, 44 aa, Artificial Sequence
  Synthetic polypeptide
MVLLTSRMKPLTSRIISIIIILAGAIALIIGFGISVSGVSLSAA

SEQ ID NO: 1299 - protein, 44 aa, Artificial Sequence
  Synthetic polypeptide
MWSTRSPNSTAWPLSLDPLLLFAMSGSSMRPSPDAAAQFGLPSH

SEQ ID NO: 1300 - protein, 44 aa, Artificial Sequence; identical to SEQ ID NO: 1299
  Synthetic polypeptide

SEQ ID NO: 1301 - protein, 44 aa, Artificial Sequence
  Synthetic polypeptide
MDKQNSQMNASHPETNLPVGYPPQYPPTAFQEVDCKLSDSRLPP

SEQ ID NO: 1302 - protein, 44 aa, Artificial Sequence; identical to SEQ ID NO: 1301
  Synthetic polypeptide

SEQ ID NO: 1303 - protein, 44 aa, Artificial Sequence; identical to SEQ ID NO: 1301
  Synthetic polypeptide

SEQ ID NO: 1304 - protein, 44 aa, Artificial Sequence; identical to SEQ ID NO: 1301
  Synthetic polypeptide

SEQ ID NO: 1305 - protein, 44 aa, Artificial Sequence; identical to SEQ ID NO: 1301
  Synthetic polypeptide

SEQ ID NO: 1306 - protein, 44 aa, Artificial Sequence; identical to SEQ ID NO: 1301
  Synthetic polypeptide

SEQ ID NO: 1307 - protein, 44 aa, Artificial Sequence; identical to SEQ ID NO: 1301
  Synthetic polypeptide

SEQ ID NO: 1308 - protein, 44 aa, Artificial Sequence; identical to SEQ ID NO: 1301
  Synthetic polypeptide

SEQ ID NO: 1309 - protein, 44 aa, Artificial Sequence; identical to SEQ ID NO: 1301
  Synthetic polypeptide

SEQ ID NO: 1310 - protein, 43 aa, Artificial Sequence
  Synthetic polypeptide
MRAPIPEPKPGDLIEIFRPFYRHWAIYVGDGYVVHLAPPTSSQ

SEQ ID NO: 1311 - protein, 43 aa, Artificial Sequence; identical to SEQ ID NO: 1310
  Synthetic polypeptide

SEQ ID NO: 1312 - protein, 42 aa, Artificial Sequence
  Synthetic polypeptide
MNPVYSPGSSGVPYANAKGIGYPALRKAEAGESLEPGRQRLQ

SEQ ID NO: 1313 - protein, 42 aa, Artificial Sequence; identical to SEQ ID NO: 1312
  Synthetic polypeptide

SEQ ID NO: 1314 - protein, 41 aa, Artificial Sequence
  Synthetic polypeptide
MARRPRAPAASGEEFSFVSPLVKYLLFFFNMLFWALTPSPT

SEQ ID NO: 1315 - protein, 41 aa, Artificial Sequence
  Synthetic polypeptide
MASLGQILFWSIISIIIILAGAIALIIGFGISVSGVSLSAA

SEQ ID NO: 1316 - protein, 41 aa, Artificial Sequence; identical to SEQ ID NO: 1315
  Synthetic polypeptide

SEQ ID NO: 1317 - protein, 41 aa, Artificial Sequence
  Synthetic polypeptide
MEHSTFLSGLVLATLLSQVLKWKVPCPRNPFNTKQTGSNGH

SEQ ID NO: 1318 - protein, 41 aa, Artificial Sequence; identical to SEQ ID NO: 1317
  Synthetic polypeptide

SEQ ID NO: 1319 - protein, 41 aa, Artificial Sequence; identical to SEQ ID NO: 1317
  Synthetic polypeptide

SEQ ID NO: 1320 - protein, 39 aa, Artificial Sequence
  Synthetic polypeptide
MTTSPILQLLLRLSLCGLLLQRAEPGVVAAACNPSYSEG

SEQ ID NO: 1321 - protein, 39 aa, Artificial Sequence; identical to SEQ ID NO: 1320
  Synthetic polypeptide

SEQ ID NO: 1322 - protein, 39 aa, Artificial Sequence; identical to SEQ ID NO: 1320
  Synthetic polypeptide

SEQ ID NO: 1323 - protein, 39 aa, Artificial Sequence; identical to SEQ ID NO: 1320
  Synthetic polypeptide

SEQ ID NO: 1324 - protein, 37 aa, Artificial Sequence
  Synthetic polypeptide
GCPSPPASLIPLWTPQLWIHAGGSLEVRSLRPAWPTW

SEQ ID NO: 1325 - protein, 37 aa, Artificial Sequence
  Synthetic polypeptide
MQKVTLGLLVFLAGFPVLDANDLEDKNSPFYYAPCAS

SEQ ID NO: 1326 - protein, 37 aa, Artificial Sequence; identical to SEQ ID NO: 1325
  Synthetic polypeptide

SEQ ID NO: 1327 - protein, 37 aa, Artificial Sequence; identical to SEQ ID NO: 1325
  Synthetic polypeptide

SEQ ID NO: 1328 - protein, 37 aa, Artificial Sequence; identical to SEQ ID NO: 1325
  Synthetic polypeptide

SEQ ID NO: 1329 - protein, 37 aa, Artificial Sequence; identical to SEQ ID NO: 1325
  Synthetic polypeptide

SEQ ID NO: 1330 - protein, 37 aa, Artificial Sequence; identical to SEQ ID NO: 1325
  Synthetic polypeptide

SEQ ID NO: 1331 - protein, 37 aa, Artificial Sequence; identical to SEQ ID NO: 1325
  Synthetic polypeptide

SEQ ID NO: 1332 - protein, 37 aa, Artificial Sequence; identical to SEQ ID NO: 1325
  Synthetic polypeptide

SEQ ID NO: 1333 - protein, 37 aa, Artificial Sequence; identical to SEQ ID NO: 1325
  Synthetic polypeptide

SEQ ID NO: 1334 - protein, 37 aa, Artificial Sequence; identical to SEQ ID NO: 1325
  Synthetic polypeptide

SEQ ID NO: 1335 - protein, 37 aa, Artificial Sequence; identical to SEQ ID NO: 1325
  Synthetic polypeptide

SEQ ID NO: 1336 - protein, 37 aa, Artificial Sequence; identical to SEQ ID NO: 1325
  Synthetic polypeptide

SEQ ID NO: 1337 - protein, 37 aa, Artificial Sequence; identical to SEQ ID NO: 1325
  Synthetic polypeptide

SEQ ID NO: 1338 - protein, 37 aa, Artificial Sequence; identical to SEQ ID NO: 1325
  Synthetic polypeptide

SEQ ID NO: 1339 - protein, 37 aa, Artificial Sequence; identical to SEQ ID NO: 1325
  Synthetic polypeptide

SEQ ID NO: 1340 - protein, 37 aa, Artificial Sequence
  Synthetic polypeptide
MNASHPETNLPVGYPPQYPPTAFQEVDCKLSDSRLPP

SEQ ID NO: 1341 - protein, 36 aa, Artificial Sequence
  Synthetic polypeptide
MRPRLWLLLAAQLTGRRRRARLRFMKQKFNIVCLKI

SEQ ID NO: 1342 - protein, 35 aa, Artificial Sequence
  Synthetic polypeptide
MHYYRYSNAKVSCWYKYLLFSYNIIFWAWRGGSHL

SEQ ID NO: 1343 - protein, 35 aa, Artificial Sequence; identical to SEQ ID NO: 1342
  Synthetic polypeptide

SEQ ID NO: 1344 - protein, 35 aa, Artificial Sequence; identical to SEQ ID NO: 1342
  Synthetic polypeptide

SEQ ID NO: 1345 - protein, 35 aa, Artificial Sequence; identical to SEQ ID NO: 1342
  Synthetic polypeptide

SEQ ID NO: 1346 - protein, 35 aa, Artificial Sequence; identical to SEQ ID NO: 1342
  Synthetic polypeptide

SEQ ID NO: 1347 - protein, 35 aa, Artificial Sequence; identical to SEQ ID NO: 1342
  Synthetic polypeptide

SEQ ID NO: 1348 - protein, 34 aa, Artificial Sequence
  Synthetic polypeptide
MGARSGARGALLLALLLCWDPRLSQAGLSEEEPG

SEQ ID NO: 1349 - protein, 34 aa, Artificial Sequence; identical to SEQ ID NO: 1348
  Synthetic polypeptide

SEQ ID NO: 1350 - protein, 34 aa, Artificial Sequence
  Synthetic polypeptide
VHVSAQEPHYLPPEMPQGCFPAQALFACCHPCKT

SEQ ID NO: 1351 - protein, 34 aa, Artificial Sequence
  Synthetic polypeptide
MAPRARRRRPLFALLLLCALLARLQVILRTLEKH

SEQ ID NO: 1352 - protein, 34 aa, Artificial Sequence; identical to SEQ ID NO: 1351
  Synthetic polypeptide

SEQ ID NO: 1353 - protein, 34 aa, Artificial Sequence
  Synthetic polypeptide
MRILKRFLACIQLLCVCRLEAAGVYAPVLTKIRE

SEQ ID NO: 1354 - protein, 34 aa, Artificial Sequence; identical to SEQ ID NO: 1353
  Synthetic polypeptide

SEQ ID NO: 1355 - protein, 34 aa, Artificial Sequence
  Synthetic polypeptide
MGQKSWIEKTFCKRECIFVIPSMKDSNRHSKRLG

SEQ ID NO: 1356 - protein, 33 aa, Artificial Sequence
  Synthetic polypeptide
MNYPLTLEMDLENLEDLAQWLTPVIPALWEAKA

SEQ ID NO: 1357 - protein, 32 aa, Artificial Sequence
  Synthetic polypeptide
MLLWVILLVLAPVSGQFAVMGFFWALESSSTK

SEQ ID NO: 1358 - protein, 32 aa, Artificial Sequence; identical to SEQ ID NO: 1357
  Synthetic polypeptide

SEQ ID NO: 1359 - protein, 32 aa, Artificial Sequence; identical to SEQ ID NO: 1357
  Synthetic polypeptide

SEQ ID NO: 1360 - protein, 32 aa, Artificial Sequence; identical to SEQ ID NO: 1357
  Synthetic polypeptide

SEQ ID NO: 1361 - protein, 32 aa, Artificial Sequence; identical to SEQ ID NO: 1357
  Synthetic polypeptide

SEQ ID NO: 1362 - protein, 31 aa, Artificial Sequence
  Synthetic polypeptide
MEEGAQRSGALGAPHQVSSLKDRINQLSCSQ

SEQ ID NO: 1363 - protein, 31 aa, Artificial Sequence
  Synthetic polypeptide
MIWKRSAVLRFYSVCGLLLQEREREKREEEE

SEQ ID NO: 1364 - protein, 31 aa, Artificial Sequence; identical to SEQ ID NO: 1363
  Synthetic polypeptide

SEQ ID NO: 1365 - protein, 31 aa, Artificial Sequence
  Synthetic polypeptide
QARLHLGEQNMGAKFALFQGFAVLAGLVSSS

SEQ ID NO: 1366 - protein, 31 aa, Artificial Sequence
  Synthetic polypeptide
MGQKSWIEKTFCKRECIFVIPSMKDSNSSAR

SEQ ID NO: 1367 - protein, 30 aa, Artificial Sequence
  Synthetic polypeptide
MASASGAMAKHEQILVLDPPTDLKFKENKY

SEQ ID NO: 1368 - protein, 30 aa, Artificial Sequence; identical to SEQ ID NO: 1367
  Synthetic polypeptide

SEQ ID NO: 1369 - protein, 30 aa, Artificial Sequence; identical to SEQ ID NO: 1367
  Synthetic polypeptide

SEQ ID NO: 1370 - protein, 30 aa, Artificial Sequence
  Synthetic polypeptide
AQPGGSSWRRIALLILAITIHNVPGDLRIK

SEQ ID NO: 1371 - protein, 30 aa, Artificial Sequence
  Synthetic polypeptide
MKRMMKMRTPQYSTSNTGGLGTNSLRIPRD

SEQ ID NO: 1372 - protein, 30 aa, Artificial Sequence; identical to SEQ ID NO: 1371
  Synthetic polypeptide

SEQ ID NO: 1373 - protein, 30 aa, Artificial Sequence; identical to SEQ ID NO: 1371
  Synthetic polypeptide

SEQ ID NO: 1374 - protein, 30 aa, Artificial Sequence; identical to SEQ ID NO: 1371
  Synthetic polypeptide

SEQ ID NO: 1375 - protein, 30 aa, Artificial Sequence; identical to SEQ ID NO: 1371
  Synthetic polypeptide

SEQ ID NO: 1376 - protein, 30 aa, Artificial Sequence; identical to SEQ ID NO: 1371
  Synthetic polypeptide

SEQ ID NO: 1377 - protein, 30 aa, Artificial Sequence
  Synthetic polypeptide
MAAALFVLLGFALLGTHGASGAAECGGRHL

SEQ ID NO: 1378 - protein, 30 aa, Artificial Sequence; identical to SEQ ID NO: 1377
  Synthetic polypeptide

SEQ ID NO: 1379 - protein, 30 aa, Artificial Sequence; identical to SEQ ID NO: 1377
  Synthetic polypeptide

SEQ ID NO: 1380 - protein, 30 aa, Artificial Sequence
  Synthetic polypeptide
MPGGPGVLQALPATIFLLFLLSAVYLGFCE

SEQ ID NO: 1381 - protein, 30 aa, Artificial Sequence; identical to SEQ ID NO: 1380
  Synthetic polypeptide

SEQ ID NO: 1382 - protein, 30 aa, Artificial Sequence; identical to SEQ ID NO: 1380
  Synthetic polypeptide

SEQ ID NO: 1383 - protein, 29 aa, Artificial Sequence
  Synthetic polypeptide
MECLYYFLGFLLLAARLPLDAAKPRVQTT

SEQ ID NO: 1384 - protein, 29 aa, Artificial Sequence
  Synthetic polypeptide
MECLYYFLGFLLLAARLPLDAAKPRVQTT

SEQ ID NO: 1385 - protein, 29 aa, Artificial Sequence
  Synthetic polypeptide
MECLYYFLGFLLLAARLPLDAAKPRVQTT

SEQ ID NO: 1386 - protein, 29 aa, Artificial Sequence
  Synthetic polypeptide
MECLYYFLGFLLLAARLPLDAAKPRVQTT

SEQ ID NO: 1387 - protein, 29 aa, Artificial Sequence
  Synthetic polypeptide
MECLYYFLGFLLLAARLPLDAAKPRVQTT

SEQ ID NO: 1388 - protein, 28 aa, Artificial Sequence
  Synthetic polypeptide
MECLYYFLGFLLLAARLPLDAAKRSRPL

SEQ ID NO: 1389 - protein, 28 aa, Artificial Sequence
  Synthetic polypeptide
MECLYYFLGFLLLAARLPLDAAKRSRPL

SEQ ID NO: 1390 - protein, 28 aa, Artificial Sequence
  Synthetic polypeptide
MECLYYFLGFLLLAARLPLDAAKRSRPL

SEQ ID NO: 1391 - protein, 28 aa, Artificial Sequence
  Synthetic polypeptide
MECLYYFLGFLLLAARLPLDAAKRSRPL

SEQ ID NO: 1392 - protein, 28 aa, Artificial Sequence
  Synthetic polypeptide
MECLYYFLGFLLLAARLPLDAAKRSRPL

SEQ ID NO: 1393 - protein, 28 aa, Artificial Sequence
  Synthetic polypeptide
MWNLLHETDSAVATARRPRWLLKANCKV

SEQ ID NO: 1394 - protein, 28 aa, Artificial Sequence
  Synthetic polypeptide
MWNLLHETDSAVATARRPRWLLKANCKV

SEQ ID NO: 1395 - protein, 28 aa, Artificial Sequence
  Synthetic polypeptide
MWNLLHETDSAVATARRPRWLLKANCKV

SEQ ID NO: 1396 - protein, 28 aa, Artificial Sequence
  Synthetic polypeptide
MWNLLHETDSAVATARRPRWLLKANCKV

SEQ ID NO: 1397 - protein, 28 aa, Artificial Sequence
  Synthetic polypeptide
MWNLLHETDSAVATARRPRWLLKANCKV

SEQ ID NO: 1398 - protein, 27 aa, Artificial Sequence
  Synthetic polypeptide
MMKMRTPQYSTSNTGGLGTNSLRIPRD

SEQ ID NO: 1399 - protein, 25 aa, Artificial Sequence
  Synthetic polypeptide
MWVMLQTLNDEVAVSQDCTTTLQVG

SEQ ID NO: 1400 - protein, 24 aa, Artificial Sequence
  Synthetic polypeptide
MGSWLHSSHSRCGLCFRLSTMRLQ

SEQ ID NO: 1401 - protein, 24 aa, Artificial Sequence
  Synthetic polypeptide
MEHSTFLSGLVLATLLSQVCQFQF

SEQ ID NO: 1402 - protein, 24 aa, Artificial Sequence
  Synthetic polypeptide
MEHSTFLSGLVLATLLSQVCQFQF

SEQ ID NO: 1403 - protein, 24 aa, Artificial Sequence
  Synthetic polypeptide
MEHSTFLSGLVLATLLSQVCQFQF

SEQ ID NO: 1404 - protein, 24 aa, Artificial Sequence
  Synthetic polypeptide
PEDVLPALQLPAPSAECQGTSSVI

SEQ ID NO: 1405 - protein, 20 aa, Artificial Sequence
  Synthetic polypeptide
FQMRRAHASLAPSTAPTRLL

SEQ ID NO: 1406 - protein, 20 aa, Artificial Sequence
  Synthetic polypeptide
MPNKTDLSLGRVSFFIRTMK

SEQ ID NO: 1407 - protein, 19 aa, Artificial Sequence
  Synthetic polypeptide
QDITAMAPSPEWQSSRAAE

SEQ ID NO: 1408 - protein, 18 aa, Artificial Sequence
  Synthetic polypeptide
MTYRFVQIEGDQLGKCLA

SEQ ID NO: 1409 - protein, 17 aa, Artificial Sequence
  Synthetic polypeptide
SGFLLSQENGWCWRPLS

SEQ ID NO: 1410 - protein, 15 aa, Artificial Sequence
  Synthetic polypeptide
MVTDSAGKQLQRYKN

SEQ ID NO: 1411 - protein, 14 aa, Artificial Sequence
  Synthetic polypeptide
MLHALLRSRMPYLK

SEQ ID NO: 1412 - protein, 14 aa, Artificial Sequence
  Synthetic polypeptide
MLHALLRSRMPYLK

SEQ ID NO: 1413 - protein, 12 aa, Artificial Sequence
  Synthetic polypeptide
MKDSNRHSKRLG

SEQ ID NO: 1414 - protein, 12 aa, Artificial Sequence
  Synthetic polypeptide
MKDSNRHSKRLG

SEQ ID NO: 1415 - protein, 12 aa, Artificial Sequence
  Synthetic polypeptide
MKDSNRHSKRLG

SEQ ID NO: 1416 - protein, 12 aa, Artificial Sequence
  Synthetic polypeptide
MKDSNRHSKRLG

SEQ ID NO: 1417 - protein, 12 aa, Artificial Sequence
  Synthetic polypeptide
MKDSNRHSKRLG

SEQ ID NO: 1418 - protein, 9 aa, Artificial Sequence
  Synthetic polypeptide
MGRRNSLLN

SEQ ID NO: 1419 - protein, 9 aa, Artificial Sequence
  Synthetic polypeptide
MKDSNSSAR

SEQ ID NO: 1420 - protein, 9 aa, Artificial Sequence
  Synthetic polypeptide
MKDSNSSAR

SEQ ID NO: 1421 - protein, 9 aa, Artificial Sequence
  Synthetic polypeptide
MKDSNSSAR

SEQ ID NO: 1422 - protein, 9 aa, Artificial Sequence
  Synthetic polypeptide
MKDSNSSAR

SEQ ID NO: 1423 - protein, 9 aa, Artificial Sequence
  Synthetic polypeptide
MKDSNSSAR

SEQ ID NO: 1424 - protein, 3628 aa, Artificial Sequence
  Synthetic polypeptide
PGSVAHAYNLSTLGGQARTCPPNQFSCASGRCIPISWTCDLDDDCGDRSDESASCAYPTCFPLTQFTCNNGRCININWRCDNDNDCGDNSDEAGCSHSCSSTQFKCNSGRCIPEHWTCDGDNDCGDYSDETHANCTNQATRPPGGCHTDEFQCRLDGLCIPLRWRCDGDTDCMDSSDEKSCEGVTHVCDPSVKFGCKDSARCISKAWVCDGDNDCEDNSDEENCESLACRPPSHPCANNTSVCLPPDKLCDGNDDCGDGSDEGELCDQCSLNNGGCSHNCSVAPGEGIVCSCPLGMELGPDNHTCQIQSYCAKHLKCSQKCDQNKFSVKCSCYEGWVLEPDGESCRSLDPFKPFIIFSNRHEIRRIDLHKGDYSVLVPGLRNTIALDFHLSQSALYWTDVVEDKIYRGKLLDNGALTSFEVVIQYGLATPEGLAVDWIAGNIYWVESNLDQIEVAKLDGTLRTTLLAGDIEHPRAIALDPRDGILFWTDWDASLPRIEAASMSGAGRRTVHRETGSGGWPNGLTVDYLEKRILWIDARSDAIYSARYDGSGHMEVLRGHEFLSHPFAVTLYGGEVYWTDWRTNTLAKANKWTGHNVTVVQRTNTQPFDLQVYHPSRQPMAPNPCEANGGQGPCSHLCLINYNRTVSCACPHLMKLHKDNTTCYEFKKFLLYARQMEIRGVDLDAPYYNYIISFTVPDIDNVTVLDYDAREQRVYWSDVRTQAIKRAFINGTGVETVVSADLPNAHGLAVDWVSRNLFWTSYDTNKKQINVARLDGSFKNAVVQGLEQPHGLVVHPLRGKLYWTDGDNISMANMDGSNRTLLFSGQKGPVGLAIDFPESKLYWISSGNHTINRCNLDGSGLEVIDAMRSQLGKATALAIMGDKLWWADQVSEKMGTCSKADGSGSVVLRNSTTLVMHMKVYDESIQLDHKGTNPCSVNNGDCSQLCLPTSETTRSCMCTAGYSLRSGQQACEGVGSFLLYSVHEGIRGIPLDPNDKSDALVPVSGTSLAVGIDFHAENDTIYWVDMGLSTISRAKRDQTWREDVVTNGIGRVEGIAVDWIAGNIYWTDQGFDVIEVARLNGSFRYVVISQGLDKPRAITVHPEKGYLFWTEWGQYPRIERSRLDGTERVVLVNVSISWPNGISVDYQDGKLYWCDARTDKIERIDLETGENREVVLSSNNMDMFSVSVFEDFIYWSDRTHANGSIKRGSKDNATDSVPLRTGIGVQLKDIKVFNRDRQKGTNVCAVANGGCQQLCLYRGRGQRACACAHGMLAEDGASCREYAGYLLYSERTILKSIHLSDERNLNAPVQPFEDPEHMKNVIALAFDYRAGTSPGTPNRIFFSDIHFGNIQQINDDGSRRITIVENVGSVEGLAYHRGWDTLYWTSYTTSTITRHTVDQTRPGAFERETVITMSGDDHPRAFVLDECQNLMFWTNWNEQHPSIMRAALSGANVLTLIEKDIRTPNGLAIDHRAEKLYFSDATLDKIERCEYDGSHRYVILKSEPVHPFGLAVYGEHIFWTDWVRRAVQRANKHVGSNMKLLRVDIPQQPMGIIAVANDTNSCELSPCRINNGGCQDLCLLTHQGHVNCSCRGGRILQDDLTCRAVNSSCRAQDEFECANGECINFSLTCDGVPHCKDKSDEKPSYCNSRRCKKTFRQCSNGRCVSNMLWCNGADDCGDGSDEIPCNKTACGVGEFRCRDGTCIGNSSRCNQFVDCEDASDEMNCSATDCSSYFRLGVKGVLFQPCERTSLCYAPSWVCDGANDCGDYSDERDCPGVKRPRCPLNYFACPSGRCIPMSWTCDKEDDCEHGEDETHCNKFCSEAQFECQNHRCISKQWLCDGSDDCGDGSDEAAHCEGKTCGPSSFSCPGTHVCVPERWLCDGDKDCADGADESIAAGCLYNSTCDDREFMCQNRQCIPKHFVCDHDRDCADGSDESPECEYPTCGPSEFRCANGRCLSSRQWECDGENDCHDQSDEAPKNPHCTSQEHKCNASSQFLCSSGRCVAEALLCNGQDDCGDSSDERGCHINECLSRKLSGCSQDCEDLKIGFKCRCRPGFRLKDDGRTCADVDECSTTFPCSQRCINTHGSYKCLCVEGYAPRGGDPHSCKAVTDEEPFLIFANRYYLRKLNLDGSNYTLLKQGLNNAVALDFDYREQMIYWTDVTTQGSMIRRMHLNGSNVQVLHRTGLSNPDGLAVDWVGGNLYWCDKGRDTIEVSKLNGAYRTVLVSSGLREPRALVVDVQNGYLYWTDWGDHSLIGRIGMDGSSRSVIVDTKITWPNGLTLDYVTERIYWADAREDYIEFASLDGSNRHVVLSQDIPHIFALTLFEDYVYWTDWETKSINRAHKTTGTNKTLLISTLHRPMDLHVFHALRQPDVPNHPCKVNNGGCSNLCLLSPGGGHKCACPTNFYLGSDGRTCVSNCTASQFVCKNDKCIPFWWKCDTEDDCGDHSDEPPDCPEFKCRPGQFQCSTGICTNPAFICDGDNDCQDNSDEANCDIHVCLPSQFKCTNTNRCIPGIFRCNGQDNCGDGEDERDCPEVTCAPNQFQCSITKRCIPRVWVCDRDNDCVDGSDEPANCTQMTCGVDEFRCKDSGRCIPARWKCDGEDDCGDGSDEPKEECDERTCEPYQFRCKNNRCVPGRWQCDYDNDCGDNSDEESCTPRPCSESEFSCANGRCIAGRWKCDGDHDCADGSDEKDCTPRCDMDQFQCKSGHCIPLRWRCDADADCMDGSDEEACGTGVRTCPLDEFQCNNTLCKPLAWKCDGEDDCGDNSDENPEECARFVCPPNRPFRCKNDRVCLWIGRQCDGTDNCGDGTDEEDCEPPTAHTTHCKDKKEFLCRNQRCLSSSLRCNMFDDCGDGSDEEDCSIDPKLTSCATNASICGDEARCVRTEKAAYCACRSGFHTVPGQPGCQDINECLRFGTCSQLCNNTKGGHLCSCARNFMKTHNTCKAEGSEYQVLYIADDNEIRSLFPGHPHSAYEQAFQGDESVRIDAMDVHVKAGRVYWTNWHTGTISYRSLPPAAPPTTSNRHRRQIDRGVTHLNISGLKMPRGIAIDWVAGNVYWTDSGRDVIEVAQMKGENRKTLISGMIDEPHAIVVDPLRGTMYWSDWGNHPKIETAAMDGTLRETLVQDNIQWPTGLAVDYHNERLYWADAKLSVIGSIRLNGTDPIVAADSKRGLSHPFSIDVFEDYIYGVTYINNRVFKIHKFGHSPLVNLTGGLSHASDVVLYHQHKQPEVTNPCDRKKCEWLCLLSPSGPVCTCPNGKRLDNGTCVPVPSPTPPPDAPRPGTCNLQCFNGGSCFLNARRQPKCRCQPRYTGDKCELDQCWEHCRNGGTCAASPSGMPTCRCPTGFTGPKCTQQVCAGYCANNSTCTVNQGNQPQCRCLPGFLGDRCQYRQCSGYCENFGTCQMAADGSRQCRCTAYFEGSRCEVNKCSRCLEGACVVNKQSGDVTCNCTDGRVAPSCLTCVGHCSNGGSCTMNSKMMPECQCPPHMTGPRCEEHVFSQQQPGHIASILIPLLLLLLLVLVAGVVFWYKRRVQGAKGFQHQRMTNGAMNVEIGNPTYKMYEGGEPDDVGGLLDADFALDPDKPTNFTNPVYATLYMGGHGSRHSLASTDEKRELLGRGPEDEIGDPLA

SEQ ID NO: 1425 - protein, 3116 aa, Artificial Sequence
  Synthetic polypeptide
MIFKENPKLQMAPDCILVAPCKEDSPQLCLDSLPLDTMALEDSEQKHNLLHSIFMDLEDLSIIFETDELTQSIQELSNQVTALQQKIMESLPQIQRMADDVVAIESEVKSMEKRVSKIKTILLSKEIFDFSPEEHLKHGEVILENIRPMKKTIAEIVSYQVELRLPQTGMKPLPVFQRTNQLLQDIKLLENVTQEQNELLKVVIKQTNEWDEEIENLKQILNNYSAQFSLEHMSPDQADKLPQLQGEIERMEKQILSLNQRKEDLLVDLKATVLNLHQHLKQEQEGVERDRLPAVTSEEGGVAERDASERKLNRRGSMSYLAAVEEEVEESSVKSDNGDEKAEPSPQSWSSLWKHDKDMEEDRASSSSGTIVQEAYGKISTSDNSMAQILTPDSLNTEQGPECSLRPNQTEEGTTPPIEADTLDSSDAQGGLEPRVEKTRPEPTEVLHACKTQVAELELWLQQANVAVEPETLNADMQQVLEQQLVGCQAMLTEIEHKVAFLLETCKDQGLGDNGATQHEAEALSLKLKTVKCNLEKVQMMLQEKHSEDQHPTILKKSSEPEHQEALQPVNLSELESIVTERPQFSRQKDFQQQQVLELKPMEQKDFIKFIEFNAKKMWPQYCQHDNDTTQESSASNQASSPENDVPDSILSPQGQNGDKWQYLHHELSSKIKLPLPQLVEPQVSTNMGILPSVTMYNFRYPTTEELKTYTTQLEDLRQEASNLQTQENMTEEAYINLDKKLFELFLTLSQCLSSVEEMLEMPRLYREDGSGQQVHYETLALELKKLYLALSDKKGDLLKAMTWPGENTNLLLECFDNLQVCLEHTQAAAVCRSKSLKAGLDYNRSYQNEIKRLYHQLIKSKTSLQQSLNEISGQSVAEQLQKADAYTVELENAESRVAKLRDEGERLHLPYALLQEVYKLEDVLDSMWGMLRARYTELSSPFVTESQQDALLQGMVELVKIGKEKLAHGHLKQTKSKVALQAQIENHKVFFQKLVADMLLIQAYSAKILPSLLQNRETFWAEQVTEVKILEEKSRQCGMKLQSLLQKWEEFDENYASLEKDLEILISTLPSVSLVEETEERLVERISFYQQIKRNIGGKHARLYQTLNEGKQLVASVSCPELEGQIAKLEEQWLSLNKKIDHELHRLQALLKHLLSYNRDSDQLTKWLESSQHTLNYWKEQSLNVSQDLDTIRSNINNFFEFSKEVDEKSSLKTAVISIGNQLLHLKETDTATLRASLAQFEQKWTMLITQLPDIQEKLHQLQMEKLPSRKAITEMISWMNNVEHQTSDEDSVHSPSSASQVKHLLQKHKEFRMEMDYKQWIVDFVNQSLLQLSTCDVESKRYERTEFAEHLGEMNRQWHRVHGMLNRKIQHLEQLLESITESENKIQILNNWLEAQEERLKTLQKPESVISVQKLLLDCQDIENQLAIKSKALDELKQSYLTLESGAVPLLEDTASRIDELFQKRSSVLTQVNQLKTSMQSVLQEWKIYDQLYDEVNMMTIRFWYCMEHSKPVVLSLETLRCQVENLQSLQDEAESSEGSWEKLQEVIGKLKGLCPSVAEIIEEKCQNTHKRWTQVNQAIADQLQKAQSLLQLWKAYSNAHGEAAARLKQQEAKFQQLANISMSGNNLAEILPPALQDIKELQHDVQKTKEAFLQNSSVLDRLPQPAESSTHMLLPGPLHSLQRAAYLEKMLLVKANEFEFVLSQFKDFGVRLESLKGLIMHEEENLDRLHQQEKENPDSFLNHVLALTAQSPDIEHLNEVSLKLPLSDVAVKTLQNMNRQWIRATATALERCSELQGIGLNEKFLYCCEKWIQLLEKIEEALKVDVANSLPELLEQQKTYKMLEAEVSINQTIADSYVTQSLQLLDTTEIENRPEFITEFSKLTDRWQNAVQGVRQRKGDVDGLVRQWQDFTTSVENLFRFLTDTSHLLSAVKGQERFSLYQTRSLIHELKNKEIHFQRRRTTCALTLEAGEKLLLTTDLKTKESVGRRISQLQDSWKDMEPQLAEMIKQFQSTVETWDQCEKKIKELKSRLQVLKAQSEDPLPELHEDLHNEKELIKELEQSLASWTQNLKELQTMKADLTRHVLVEDVMVLKEQIEHLHRQWEDLCLRVAIRKQEIEDRLNTWVVFNEKNKELCAWLVQMENKVLQTADISIEEMIEKLQKDCMEEINLFSENKLQLKQMGDQLIKASNKSRAAEIDDKLNKINDRWQHLFDVIGSRVKKLKETFAFIQQLDKNMSNLRTWLARIESELSKPVVYDVCDDQEIQKRLAEQQDLQRDIEQHSAGVESVFNICDVLLHDSDACANETECDSIQQTTRSLDRRWRNICAMSMERRMKIEETWRLWQKFLDDYSRFEDWLKSAERTAACPNSSEVLYTSAKEELKRFEAFQRQIHERLTQLELINKQYRRLARENRTDTASRLKQMVHEGNQRWDNLQRRVTAVLRRLRHFTNQREEFEGTRESILVWLTEMDLQLTNVEHFSESDADDKMRQLNGFQQEITLNTNKIDQLIVFGEQLIQKSEPLDAVLIEDELEELHRYCQEVFGRVSRFHRRLTSCTPGLEDEKEASENETDMEDPREIQTDSWRKRGESEEPSSPQSLCHLVAPGHERSGCETPVSVDSIPLEWDHTGDVGGSSSHEEDEEGPYYSALSDVEIPENPEAYLKMTTKTLKASSGKSISDGHSWHVPDSPSCPEHHYKQMEGDRNVPPVPPASSTPYKPPYGKLLLPPGTDGGKEGPRVLNGNPQQEDGGLAGITEQQSGAFDRWEMIQAQELHNKLKIKQNLQQLNSDISAITTWLKKTEAELEMLKMAKPPSDIQEIELRVKRLQEILKAFDTYKALVVSVNVSSKEFLQTESPESTELQSRLRQLSLLWEAAQGAVDSWRGGLRQSLMQCQDFHQLSQNLLLWLASAKNRRQKAHVTDPKADPRALLECRRELMQLEKELVERQPQVDMLQEISNSLLIKGHGEDCIEAEEKVHVIEKKLKQLREQVSQDLMALQGTQNPASPLPSFDEVDSGDQPPATSVPAPRAKFRAVRTTEGEEETESRVPGSTRPQRSFLSRVVRAALPLQLLLLLLLLLACLLPSSEEDYSCTQANNFARSFYPMLRYTNGPPPT

SEQ ID NO: 1426 - protein, 3116 aa, Artificial Sequence; identical to SEQ ID NO: 1425
  Synthetic polypeptide

SEQ ID NO: 1427 - protein, 3094 aa, Artificial Sequence
  Synthetic polypeptide
MIFKENPKLQMAPDCILVAPCKEDSPQLCLDSLPLDTMALEDSEQKHNLLHSIFMDLEDLSIIFETDELTQSIQELSNQVTALQQKIMESLPQIQRMADDVVAIESEVKSMEKRVSKIKTILLSKEIFDFSPEEHLKHGEVILENIRPMKKTIAEIVSYQVELRLPQTGMKPLPVFQRTNQLLQDIKLLENVTQEQNELLKVVIKQTNEWDEEIENLKQILNNYSAQFSLEHMSPDQADKLPQLQGEIERMEKQILSLNQRKEDLLVDLKATVLNLHQHLKQEQEGVERDRLPAVTSEEGGVAERDASERKLNRRGSMSYLAAVEEEVEESSVKSDNGDEKAEPSPQSWSSLWKHDKDMEEDRASSSSGTIVQEAYGKISTSDNSMAQILTPDSLNTEQGPECSLRPNQTEEGTTPPIEADTLDSSDAQGGLEPRVEKTRPEPTEVLHACKTQVAELELWLQQANVAVEPETLNADMQQVLEQQLVGCQAMLTEIEHKVAFLLETCKDQGLGDNGATQHEAEALSLKLKTVKCNLEKVQMMLQEKHSEDQHPTILKKSSEPEHQEALQPVNLSELESIVTERPQFSRQKDFQQQQVLELKPMEQKDFIKFIEFNAKKMWPQYCQHDNDTTQESSASNQASSPENDVPDSILSPQGQNGDKWQYLHHELSSKIKLPLPQLVEPQVSTNMGILPSVTMYNFRYPTTEELKTYTTQLEDLRQEASNLQTQENMTEEAYINLDKKLFELFLTLSQCLSSVEEMLEMPRLYREDGSGQQVHYETLALELKKLYLALSDKKGDLLKAMTWPGENTNLLLECFDNLQVCLEHTQAAAVCRSKSLKAGLDYNRSYQNEIKRLYHQLIKSKTSLQQSLNEISGQSVAEQLQKADAYTVELENAESRVAKLRDEGERLHLPYALLQEVYKLEDVLDSMWGMLRARYTELSSPFVTESQQDALLQGMVELVKIGKEKLAHGHLKQTKSKVALQAQIENHKVFFQKLVADMLLIQAYSAKILPSLLQNRETFWAEQVTEVKILEEKSRQCGMKLQSLLQKWEEFDENYASLEKDLEILISTLPSVSLVEETEERLVERISFYQQIKRNIGGKHARLYQTLNEGKQLVASVSCPELEGQIAKLEEQWLSLNKKIDHELHRLQALLKHLLSYNRDSDQLTKWLESSQHTLNYWKEQSLNVSQDLDTIRSNINNFFEFSKEVDEKSSLKTAVISIGNQLLHLKETDTATLRASLAQFEQKWTMLITQLPDIQEKLHQLQMEKLPSRKAITEMISWMNNVEHQTSDEDSVHSPSSASQVKHLLQKHKEFRMEMDYKQWIVDFVNQSLLQLSTCDVESKRYERTEFAEHLGEMNRQWHRVHGMLNRKIQHLEQLLESITESENKIQILNNWLEAQEERLKTLQKPESVISVQKLLLDCQDIENQLAIKSKALDELKQSYLTLESGAVPLLEDTASRIDELFQKRSSVLTQVNQLKTSMQSVLQEWKIYDQLYDEVNMMTIRFWYCMEHSKPVVLSLETLRCQVENLQSLQDEAESSEGSWEKLQEVIGKLKGLCPSVAEIIEEKCQNTHKRWTQVNQAIADQLQKAQSLLQLWKAYSNAHGEAAARLKQQEAKFQQLANISMSGNNLAEILPPALQDIKELQHDVQKTKEAFLQNSSVLDRLPQPAESSTHMLLPGPLHSLQRAAYLEKMLLVKANEFEFVLSQFKDFGVRLESLKGLIMHEEENLDRLHQQEKENPDSFLNHVLALTAQSPDIEHLNEVSLKLPLSDVAVKTLQNMNRQWIRATATALERCSELQGIGLNEKFLYCCEKWIQLLEKIEEALKVDVANSLPELLEQQKTYKMLEAEVSINQTIADSYVTQSLQLLDTTEIENRPEFITEFSKLTDRWQNAVQGVRQRKGDVDGLVRQWQDFTTSVENLFRFLTDTSHLLSAVKGQERFSLYQTRSLIHELKNKEIHFQRRRTTCALTLEAGEKLLLTTDLKTKESVGRRISQLQDSWKDMEPQLAEMIKQFQSTVETWDQCEKKIKELKSRLQVLKAQSEDPLPELHEDLHNEKELIKELEQSLASWTQNLKELQTMKADLTRHVLVEDVMVLKEQIEHLHRQWEDLCLRVAIRKQEIEDRLNTWVVFNEKNKELCAWLVQMENKVLQTADISIEEMIEKLQKDCMEEINLFSENKLQLKQMGDQLIKASNKSRAAEIDDKLNKINDRWQHLFDVIGSRVKKLKETFAFIQQLDKNMSNLRTWLARIESELSKPVVYDVCDDQEIQKRLAEQQDLQRDIEQHSAGVESVFNICDVLLHDSDACANETECDSIQQTTRSLDRRWRNICAMSMERRMKIEETWRLWQKFLDDYSRFEDWLKSAERTAACPNSSEVLYTSAKEELKRFEAFQRQIHERLTQLELINKQYRRLARENRTDTASRLKQMVHEGNQRWDNLQRRVTAVLRRLRHFTNQREEFEGTRESILVWLTEMDLQLTNVEHFSESDADDKMRQLNGFQQEITLNTNKIDQLIVFGEQLIQKSEPLDAVLIEDELEELHRYCQEVFGRVSRFHRRLTSCTPGLEDEKEASENETDMEDPREIQTDSWRKRGESEEPSSPQSLCHLVAPGHERSGCETPVSVDSIPLEWDHTGDVGGSSSHEEDEEGPYYSALSGKSISDGHSWHVPDSPSCPEHHYKQMEGDRNVPPVPPASSTPYKPPYGKLLLPPGTDGGKEGPRVLNGNPQQEDGGLAGITEQQSGAFDRWEMIQAQELHNKLKIKQNLQQLNSDISAITTWLKKTEAELEMLKMAKPPSDIQEIELRVKRLQEILKAFDTYKALVVSVNVSSKEFLQTESPESTELQSRLRQLSLLWEAAQGAVDSWRGGLRQSLMQCQDFHQLSQNLLLWLASAKNRRQKAHVTDPKADPRALLECRRELMQLEKELVERQPQVDMLQEISNSLLIKGHGEDCIEAEEKVHVIEKKLKQLREQVSQDLMALQGTQNPASPLPSFDEVDSGDQPPATSVPAPRAKQFRAVRTTEGEEETESRVPGSTRPQRSFLSRVVRAALPLQLLLLLLLLLACLLPSSEEDYSCTQANNFARSFYPMLRYTNGPPPT

SEQ ID NO: 1428 - protein, 3094 aa, Artificial Sequence; identical to SEQ ID NO: 1427
  Synthetic polypeptide

SEQ ID NO: 1429 - protein, 3094 aa, Artificial Sequence; identical to SEQ ID NO: 1427
  Synthetic polypeptide

SEQ ID NO: 1430 - protein, 2994 aa, Artificial Sequence
  Synthetic polypeptide
MIFKENPKLQMAPDCILVAPCKEDSPQLCLDSLPLDTMALEDSEQKHNLLHSIFMDLEDLSIIFETDELTQSIQELSNQVTALQQKIMESLPQIQRMADDVVAIESEVKSMEKRVSKIKTILLSKEIFDFSPEEHLKHGEVILENIRPMKKTIAEIVSYQVELRLPQTGMKPLPVFQRTNQLLQDIKLLENVTQEQNELLKVVIKQTNEWDEEIENLKQILNNYSAQFSLEHMSPDQADKLPQLQGEIERMEKQILSLNQRKEDLLVDLKATVLNLHQHLKQEQEGVERDRLPAVTSEEGGVAERDASERKLNRRGSMSYLAAVEEEVEESSVKSDHDKDMEEDRASSSSGTIVQEAYGKISTSDNSMAQILTPDSLNTEQGPECSLRPNQTEEGTTPPIEADTLDSSDAQGGLEPRVEKTRPEPTEVLHACKTQVAELELWLQQANVAVEPETLNADMQQVLEQQLVGCQAMLTEIEHKVAFLLETCKDQGLGDNGATQHEAEALSLKLKTVKCNLEKVQMMLQEKHSEDQHPTILKKSSEPEHQEALQPVNLSELESIVTERPQFSRQKDFQQQQVLELKPMEQKDFIKFIEFNAKKMWPQYCQHDNDTTQESSARYPTTEELKTYTTQLEDLRQEASNLQTQENMTEEAYINLDKKLFELFLTLSQCLSSVEEMLEMPRLYREDGSGQQVHYETLALELKKLYLALSDKKGDLLKAMTWPGENTNLLLECFDNLQVCLEHTQAAAVCRSKSLKAGLDYNRSYQKADAYTVELENAESRVAKLRDEGERLHLPYALLQEVYKLEDVLDSMWGMLRARYTELSSPFVTESQQDALLQGMVELVKIGKEKLAHGHLKQTKSKVALQAQIENHKVFFQKLVADMLLIQAYSAKILPSLLQNRETFWAEQVTEVKILEEKSRQCGMKLQSLLQKWEEFDENYASLEKDLEILISTLPSVSLVEETEERLVERISFYQQIKRNIGGKHARLYQTLNEGKQLVASVSCPELEGQIAKLEEQWLSLNKKIDHELHRLQALLKHLLSYNRDSDQLTKWLESSQHTLNYWKEQSLNVSQDLDTIRSNINNFFEFSKEVDEKSSLKTAVISIGNQLLHLKETDTATLRASLAQFEQKWTMLITQLPDIQEKLHQLQMEKLPSRKAITEMISWMNNVEHQTSDEDSVHSPSSASQVKHLLQKHKEFRMEMDYKQWIVDFVNQSLLQLSTCDVESKRYERTEFAEHLGEMNRQWHRVHGMLNRKIQHLEQLLESITESENKIQILNNWLEAQEERLKTLQKPESVISVQKLLLDCQDIENQLAIKSKALDELKQSYLTLESGAVPLLEDTASRIDELFQKRSSVLTQVNQLKTSMQSVLQEWKIYDQLYDEVNMMTIRFWYCMEHSKPVVLSLETLRCQVENLQSLQDEAESSEGSWEKLQEVIGKLKGLCPSVAEIIEEKCQNTHKRWTQVNQAIADQLQKAQSLLQLWKAYSNAHGEAAARLKQQEAKFQQLANISMSGNNLAEILPPALQDIKELQHDVQKTKEAFLQNSSVLDRLPQPAESSTHMLLPGPLHSLQRAAYLEKMLLVKANEFENHVLALTAQSPDIEHLNEVSLKLPLSDVAVKTLQNMNRQWIRATATALERCSELQGIGLNEKFLYCCEKWIQLLEKIEEALKVDVANSLPELLEQQKTYKMLEAEVSINQTIADSYVTQSLQLLDTTEIENRPEFITEFSKLTDRWQNAVQGVRQRKGDVDGLNAHVARCGGASLKKQDLRYSLHTACGAALLCRSSHGANKEIHFQRRRTTCALTLEAGEKLLLTTDLKTKESVGRRISQLQDSWKDMEPQLAEMIKQFQSTVETWDQCEKKIKELKSRLQVLKAQSEDPLPELHEDLHNEKELIKVAIRKQEIEDRLNTWVVFNEKNKELCAWLVQMENKVLQTADISIEEMIEKLQKRTVGREEVPERWECETIVSGHGTEESCFLSIRKFHQGRGLHILTCQLIPQDCMEEINLFSENKLQLKQMGDQLIKASNKSRAAEIDDKLNKINDRWQHLFDVIGSSMADQTNSRWMFFQWPRGIQRTVTWPWDHLCSCASTGHTGPFHSSVLRCFEQHIEFGIYRRTYKVNKELGGDKNGQRCPIIYPHGLVQCIRLGEPLILKRVKKLKETFAFIQQLDKNMSNLRTWLARIESELSKPVVYDVCDDQEIQKRLAEQQDLQRDIEQHSAGVESVFNICDVLLHDSDACANETECDSIQQTTRSLDRRWRNICAMSMERRMKIEETWRLWQKFLDDYSRFEDWLKSAERTAACPNSSEVLYTSAKEELKRFERQIHERLTQLELINKQYRRLARENRTDTASRLKQMVHEGNQRWDNLQRRVTAVLRRLRHFTNQREEFEGTRESILVWLTEMDLQLTNVEHFSESDADDKMRQLNGFQQEITLNTNKIDQLIVFGEQLIQKSEPLDAVLIEDELEELHRYCQEGLEDEKEASENETDMEDPREIQTDSWRKRGESEEPSSPQSLCHLVAPGHERSGCETPVSVDSIPLEWDHTGDVGGSSSHEEDEEGPYYSALSGKSISDGHSWHVPDSPSCPEHHYKQMEGDRNVPPVPPASSTPYKPPYVSLNFTGSTAYVCAFDRWEMIQAQELHNKLKIKQNLQQLNSDISAITTWLKKTEAELEMLKMAKPPSDIQEIELRVKRLQEILKAFDTYKALVVSVNVSSKEFLQTESPESTELQSRLRQLSLLWEAAQGAVDSWRGGLRQSLMQCQDFHQLSQNLLLWLASAKNRRQKAHVTDPKADPRALLECRRELMQLEKELVERQPQVDMLQEISNSLLIKGHGEDCIEAEEKVHVIEKKLKQLREQVSQDLMALQGTQNPASPLPSFDEVDSGDQPPATSVPAPRAKFLYPAVQSSENYRRRGGDREQGPRQHTATALLPLKGGPGSPTPAAAPPAAAAPGLPAALLRRRLQLHSGQQLCPVLLPHAEVHQWATPHIEGIAGHSATPPA

SEQ ID NO: 1431 - protein, 2327 aa, Artificial Sequence
  Synthetic polypeptide
DVTWSSLPSAMIVRSPQPRGTGQQLDLGTPHNLSEPCIQGCHFWNSVDQKNCALKCRESCEVGCSSAEGAYEEEVLENADLPTAPFASSIGSHNMTLRWKSANFSGVKYIIQWKYAQLLGSWTYTKTVSRPSYVVKPLHPFTEYIFRVVWIFTAQLQLYSPPSPSYRTHPHGVPETAPLIRNIESSSPDTVEVSWDPPQFPGGPILGYNLRLISKNQKLDAGTQRTSFQFYSTLPNTIYRFSIAAVNEVGEGPEAESSITTSSSAVQQEEQWLFLSRKTSLRKRSLKHLVDEAHCLRLDAIYHNITGISVDVHQQIVYFSEGTLIWAKKAANMSDVSDLRIFYRGSGLISSISIDWLYQRMYFIMDELVCVCDLENCSNIEEITPPSISAPQKIVADSYNGYVFYLLRDGIYRADLPVPSGRCAEAVRIVESCTLKDFAIKPQAKRIIYFNDTAQVFMSTFLDGSASHLILPRIPFADVKSFACENNDFLVTDGKVIFQQDALSFNEFIVGCDLSHIEEFGFGNLVIFGSSSQLHPLPGRPQELSVLFGSHQALVQWKPPALAIGANVILISDIIELFELGPSAWQNWTYEVKVSTQDPPEVTHIFLNISGTMLNVPELQSAMKYKVSVRASSPKRPGPWSEPSVGTTLVPASEPPFIMAVKEDGLWSKPLNSFGPGEFLSSDIGNVSDMDWYNNSLYYSDTKGDVFVWLLNGTDISENYHLPSIAGAGALAFEWLGHFLYWAGKTYVIQRQSVLTGHTDIVTHVKLLVNDMVVDSVGGYLYWTTLYSVESTRLNGESSLVLQTQPWFSGKKVIALTLDLSDGLLYWLVQDSQCIHLYTAVLRGQSTGDTTITEFAAWSTSEISQNALMYYSGRLFWINGFRIITTQEIGQKTSVSVLEPARFNQFTIIQTSLKPLPGNFSFTPKVIPDSVQESSFRIEGNASSFQILWNGPPAVDWGVVFYSVEFSAHSKFLASEQHSLPVFTVEGLEPYALFNLSVTPYTYWGKGPKTSLSLRAPETVPSAPENPRIFILPSGKCCNKNEVVVEFRWNKPKHENGVLTKFEIFYNISNQSITNKTCEDWIAVNVTPSVMSFQLEGMSPRCFIAFQVRAFTSKGPGPYADVVKSTTSEINPFPHLITLLGNKIVFLDMDQNQVVWTFSAERVISAVCYTADNEMGYYAEGDSLFLLHLHNRSSSELFQDSLVFDITVITIDWISRHLYFALKESQNGMQVFDVDLEHKVKYPREVKIHNRNSTIISFSVYPLLSRLYWTEVSNFGYQMFYYSIISHTLHRILQPTATNQQNKRNQCSCNVTEFELSGAMAIDTSNLEKPLIYFAKAQEIWAMDLEGCQCWRVITVPAMLAGKTLVSLTVDGDLIYWIITAKDSTQIYQAKKGNGAIVSQVKALRSRHILAYSSVMQPFPDKAFLSLASDTVEPTILNATNTSLTIRLPLAKTNLTWYGITSPTPTYLVYYAEVNDRKNSSDLKYRILEFQDSIALIEDLQPFSTYMIQIAVKNYYSDPLEHLPPGKEIWGKTKNGVPEAVQLINTTVRSDTSLIISWRESHKPNGPKESVRYQLAISHLALIPETPLRQSEFPNGRLTLLVTRLSGGNIYVLKVLACHSEEMWCTESHPVTVEMFNTPEKPYSLVPENTSLQFNWKAPLNVNLIRFWVELQKWKYNEFYHVKTSCSQGPAYVCNITNLQPYTSYNVRVVVVYKTGENSTSLPESFKTKAGVPNKPGIPKLLEGSKNSIQWEKAEDNGCRITYYILEIRKSTSNNLQNQNLRWKMTFNGSCSSVCTWKSKNLKGIFQFRVVAANNLGFGEYSGISENIILVGDDFWIPETSFILTIIVGIFLVVTIPLTFVWHRRLKNQKSAKEGVTVLINEDKELAELRGLAAGVGLANACYAIHTLPTQEEIENLPAFPREKLTLRLLLGSGAFGEVYEGTAVDILGVGSGEIKVAVKTLKKGSTDQEKIEFLKEAHLMSKFNHPNILKQLGVCLLNEPQYIILELMEGGDLLTYLRKARMATFYGPLLTLVDLVDLCVDISKGCVYLERMHFIHRDLAARNCLVSVKDYTSPRIVKIGDFGLARDIYKNDYYRKRGEGLLPVRWMAPESLMDGIFTTQSDVWSFGILIWEILTLGHQPYPAHSNLDVLNYVQTGGRLEPPRNCPDDLWNLMTQCWAQEPDQRPTFHRIQDQLQLFRNFFLNSIYKSRDEANNSGVINESFEGEDGDVICLNSDDIMPVALMETKNREGLNYMVLATECGQGEEKSEGPLGSQESESCGLRKEEKEPHADKDFCQEKQVAYCPSGKPEGLNYACLTHSGYGDGSD

SEQ ID NO: 1432 - protein, 2321 aa, Artificial Sequence
  Synthetic polypeptide
DVTWSSLPSAMIVRSPQPRGTGQQLDLGTPHNLSEPCIQGCHFWNSVDQKNCALKCNDTYATVCERESCEVGCSSAEGAYEEEVLENADLPTAPFASSIGSHNMTLRWKSANFSGVKYIIQWKYAQLLGSWTYTKTVSRPSYVVKPLHPFTEYIFRVVWIFTAQLQLYSPPSPSYRTHPHGVPETAPLIRNIESSSPDTVEVSWDPPQFPGGPILGYNLRLISKNQKLDAGTQRTSFQFYSTLPNTIYRFSIAAVNEVGEGPEAESSITTSSSAVQQEEQWLFLSRKTSLRKRSLKHLVDEAHCLRLDAIYHNITGISVDVHQQIVYFSEGTLIWAKKAANMSDVSDLRIFYRGSGLISSISIDWLYQRMYFIMDELVCVCDLENCSNIEEITPPSISAPQKIVADSYNGYVFYLLRDGIYRADLPVPSGRCAEAVRIVESCTLKDFAIKPQAKRIIYFNDTAQVFMSTFLDGSASHLILPRIPFADVKSFACENNDFLVTDGKVIFQQDALSFNEFIVGCDLSHIEEFGFGNLVIFGSSSQLHPLPGRPQELSVLFGSHQALVQWKPPALAIGASPSAWQNWTYEVKVSTQDPPEVTHIFLNISGTMLNVPELQSAMKYKVSVRASSPKRPGPWSEPSVGTTLVPASEPPFIMAVKEDGLWSKPLNSFGPGEFLSSDIGNVSDMDWYNNSLYYSDTKGDVFVWLLNGTDISENYHLPSIAGAGALAFEWLGHFLYWAGKTYVIQRQSVLTGHTDIVTHVKLLVNDMVVDSVGGYLYWTTLYSVESTRLNGESSLVLQTQPWFSGKKVIALTLDLSDGLLYWLVQDSQCIHLYTAVLRGQSTGDTTITEFAAWSTSEISQNALMYYSGRLFWINGFRIITTQEIGQKTSVSVLEPARFNQFTIIQTSLKPLPGNFSFTPKVIPDSVQESSFRIEGNASSFQILWNGPPAVDWGVVFYSVEFSAHSKFLASEQHSLPVFTVEGLEPYALFNLSVTPYTYWGKGPKTSLSLRAPETVPSAPENPRIFILPSGKCCNKNEVVVEFRWNKPKHENGVLTKFEIFYNISNQSITNKTCEDWIAVNVTPSVMSFQLEGMSPRCFIAFQVRAFTSKGPGPYADVVKSTTSEINPFPHLITLLGNKIVFLDMDQNQVVWTFSAERVISAVCYTADNEMGYYAEGDSLFLLHLHNRSSSELFQDSLVFDITVITIDWISRHLYFALKESQNGMQVFDVDLEHKVKYPREVKIHNRNSTIISFSVYPLLSRLYWTEVSNFGYQMFYYSIISHTLHRILQPTATNQQNKRNQCSCNVTEFELSGAMAIDTSNLEKPLIYFAKAQEIWAMDLEGCQCWRVITVPAMLGKTLVSLTVDGDLIYWIITAKDSTQIYQAKKGNGAIVSQVKALRSRHILAYSSVMQPFPDKAFLSLASDTVEPTILNATNTSLTIRLPLAKTNLTWYGITSPTPTYLVYYAEVNDRKNSSDLKYRILEFQDSIALIEDLQPFSTYMIQIAVKNYYSDPLEHLPPGKEIWGKTKNGVPEAVQLINTTVRSDTSLIISWRESHKPNGPKESVRYQLAISHLALIPETPLRQSEFPNGRLTLLVTRLSGGNIYVLKVLACHSEEMWCTESHPVTVEMFNTPEKPYSLVPENTSLQFNWKAPLNVNLIRFWVELQKWKYNEFYHVKTSCSQGPAYVCNITNLQPYTSYNVRVVVVYKTGENSTSLPESFKTKAGVPNKPGIPKLLEGSKNSIQWEKAEDNGCRITYYILEIRKSTSNNLQNQNLRWKMTFNGSCSSVCTWKSKNLKGIFQFRVVAANNLGFGEYSGISENIILVGDDFWIPETSFILTIIVGIFLVVTIPLTFVWHRRLKNQKSAKEGVTVLINEDKELAELRGLAAGVGLANACYAIHTLPTQEEIENLPAFPREKLTLRLLLGSGAFGEVYEGTAVDILGVGSGEIKVAVKTLKKGSTDQEKIEFLKEAHLMSKFNHPNILKQLGVCLLNEPQYIILELMEGGDLLTYLRKARMATFYGPLLTLVDLVDLCVDISKGCVYLERMHFIHRDLAARNCLVSVKDYTSPRIVKIGDFGLARDIYKNDYYRKRGEGLLPVRWMAPESLMDGIFTTQSDVWSFGILIWEILTLGHQPYPAHSNLDVLNYVQTGGRLEPPRNCPDDLWNLMTQCWAQEPDQRPTFHRIQDQLQLFRNFFLNSIYKSRDEANNSGVINESFEGEDGDVICLNSDDIMPVALMETKNREGLNYMVLATECGQGEEKSEGPLGSQESESCGLRKEEKEPHADKDFCQEKQVAYCPSGKPEGLNYACLTHSGYGDGSD

SEQ ID NO: 1433 - protein, 2314 aa, Artificial Sequence
  Synthetic polypeptide
TSFSSRFQGQQLDLGTPHNLSEPCIQGCHFWNSVDQKNCALKCRESCEVGCSSAEGAYEEEVLENADLPTAPFASSIGSHNMTLRWKSANFSGVKYIIQWKYAQLLGSWTYTKTVSRPSYVVKPLHPFTEYIFRVVWIFTAQLQLYSPPSPSYRTHPHGVPETAPLIRNIESSSPDTVEVSWDPPQFPGGPILGYNLRLISKNQKLDAGTQRTSFQFYSTLPNTIYRFSIAAVNEVGEGPEAESSITTSSSAVQQEEQWLFLSRKTSLRKRSLKHLVDEAHCLRLDAIYHNITGISVDVHQQIVYFSEGTLIWAKKAANMSDVSDLRIFYRGSGLISSISIDWLYQRMYFIMDELVCVCDLENCSNIEEITPPSISAPQKIVADSYNGYVFYLLRDGIYRADLPVPSGRCAEAVRIVESCTLKDFAIKPQAKRIIYFNDTAQVFMSTFLDGSASHLILPRIPFADVKSFACENNDFLVTDGKVIFQQDALSFNEFIVGCDLSHIEEFGFGNLVIFGSSSQLHPLPGRPQELSVLFGSHQALVQWKPPALAIGANVILISDIIELFELGPSAWQNWTYEVKVSTQDPPEVTHIFLNISGTMLNVPELQSAMKYKVSVRASSPKRPGPWSEPSVGTTLVPASEPPFIMAVKEDGLWSKPLNSFGPGEFLSSDIGNVSDMDWYNNSLYYSDTKGDVFVWLLNGTDISENYHLPSIAGAGALAFEWLGHFLYWAGKTYVIQRQSVLTGHTDIVTHVKLLVNDMVVDSVGGYLYWTTLYSVESTRLNGESSLVLQTQPWFSGKKVIALTLDLSDGLLYWLVQDSQCIHLYTAVLRGQSTGDTTITEFAAWSTSEISQNALMYYSGRLFWINGFRIITTQEIGQKTSVSVLEPARFNQFTIIQTSLKPLPGNFSFTPKVIPDSVQESSFRIEGNASSFQILWNGPPAVDWGVVFYSVEFSAHSKFLASEQHSLPVFTVEGLEPYALFNLSVTPYTYWGKGPKTSLSLRAPETVPSAPENPRIFILPSGKCCNKNEVVVEFRWNKPKHENGVLTKFEIFYNISNQSITNKTCEDWIAVNVTPSVMSFQLEGMSPRCFIAFQVRAFTSKGPGPYADVVKSTTSEINPFPHLITLLGNKIVFLDMDQNQVVWTFSAERVISAVCYTADNEMGYYAEGDSLFLLHLHNRSSSELFQDSLVFDITVITIDWISRHLYFALKESQNGMQVFDVDLEHKVKYPREVKIHNRNSTIISFSVYPLLSRLYWTEVSNFGYQMFYYSIISHTLHRILQPTATNQQNKRNQCSCNVTEFELSGAMAIDTSNLEKPLIYFAKAQEIWAMDLEGCQCWRVITVPAMLAGKTLVSLTVDGDLIYWIITAKDSTQIYQAKKGNGAIVSQVKALRSRHILAYSSVMQPFPDKAFLSLASDTVEPTILNATNTSLTIRLPLAKTNLTWYGITSPTPTYLVYYAEVNDRKNSSDLKYRILEFQDSIALIEDLQPFSTYMIQIAVKNYYSDPLEHLPPGKEIWGKTKNGVPEAVQLINTTVRSDTSLIISWRESHKPNGPKESVRYQLAISHLALIPETPLRQSEFPNGRLTLLVTRLSGGNIYVLKVLACHSEEMWCTESHPVTVEMFNTPEKPYSLVPENTSLQFNWKAPLNVNLIRFWVELQKWKYNEFYHVKTSCSQGPAYVCNITNLQPYTSYNVRVVVVYKTGENSTSLPESFKTKAGVPNKPGIPKLLEGSKNSIQWEKAEDNGCRITYYILEIRKSTSNNLQNQNLRWKMTFNGSCSSVCTWKSKNLKGIFQFRVVAANNLGFGEYSGISENIILVGDDFWIPETSFILTIIVGIFLVVTIPLTFVWHRRLKNQKSAKEGVTVLINEDKELAELRGLAAGVGLANACYAIHTLPTQEEIENLPAFPREKLTLRLLLGSGAFGEVYEGTAVDILGVGSGEIKVAVKTLKKGSTDQEKIEFLKEAHLMSKFNHPNILKQLGVCLLNEPQYIILELMEGGDLLTYLRKARMATFYGPLLTLVDLVDLCVDISKGCVYLERMHFIHRDLAARNCLVSVKDYTSPRIVKIGDFGLARDIYKNDYYRKRGEGLLPVRWMAPESLMDGIFTTQSDVWSFGILIWEILTLGHQPYPAHSNLDVLNYVQTGGRLEPPRNCPDDLWNLMTQCWAQEPDQRPTFHRIQDQLQLFRNFFLNSIYKSRDEANNSGVINESFEGEDGDVICLNSDDIMPVALMETKNREGLNYMVLATECGQGEEKSEGPLGSQESESCGLRKEEKEPHADKDFCQEKQVAYCPSGKPEGLNYACLTHSGYGDGSD

SEQ ID NO: 1434 - protein, 2308 aa, Artificial Sequence
  Synthetic polypeptide
TSFSSRFQGQQLDLGTPHNLSEPCIQGCHFWNSVDQKNCALKCNDTYATVCERESCEVGCSSAEGAYEEEVLENADLPTAPFASSIGSHNMTLRWKSANFSGVKYIIQWKYAQLLGSWTYTKTVSRPSYVVKPLHPFTEYIFRVVWIFTAQLQLYSPPSPSYRTHPHGVPETAPLIRNIESSSPDTVEVSWDPPQFPGGPILGYNLRLISKNQKLDAGTQRTSFQFYSTLPNTIYRFSIAAVNEVGEGPEAESSITTSSSAVQQEEQWLFLSRKTSLRKRSLKHLVDEAHCLRLDAIYHNITGISVDVHQQIVYFSEGTLIWAKKAANMSDVSDLRIFYRGSGLISSISIDWLYQRMYFIMDELVCVCDLENCSNIEEITPPSISAPQKIVADSYNGYVFYLLRDGIYRADLPVPSGRCAEAVRIVESCTLKDFAIKPQAKRIIYFNDTAQVFMSTFLDGSASHLILPRIPFADVKSFACENNDFLVTDGKVIFQQDALSFNEFIVGCDLSHIEEFGFGNLVIFGSSSQLHPLPGRPQELSVLFGSHQALVQWKPPALAIGASPSAWQNWTYEVKVSTQDPPEVTHIFLNISGTMLNVPELQSAMKYKVSVRASSPKRPGPWSEPSVGTTLVPASEPPFIMAVKEDGLWSKPLNSFGPGEFLSSDIGNVSDMDWYNNSLYYSDTKGDVFVWLLNGTDISENYHLPSIAGAGALAFEWLGHFLYWAGKTYVIQRQSVLTGHTDIVTHVKLLVNDMVVDSVGGYLYWTTLYSVESTRLNGESSLVLQTQPWFSGKKVIALTLDLSDGLLYWLVQDSQCIHLYTAVLRGQSTGDTTITEFAAWSTSEISQNALMYYSGRLFWINGFRIITTQEIGQKTSVSVLEPARFNQFTIIQTSLKPLPGNFSFTPKVIPDSVQESSFRIEGNASSFQILWNGPPAVDWGVVFYSVEFSAHSKFLASEQHSLPVFTVEGLEPYALFNLSVTPYTYWGKGPKTSLSLRAPETVPSAPENPRIFILPSGKCCNKNEVVVEFRWNKPKHENGVLTKFEIFYNISNQSITNKTCEDWIAVNVTPSVMSFQLEGMSPRCFIAFQVRAFTSKGPGPYADVVKSTTSEINPFPHLITLLGNKIVFLDMDQNQVVWTFSAERVISAVCYTADNEMGYYAEGDSLFLLHLHNRSSSELFQDSLVFDITVITIDWISRHLYFALKESQNGMQVFDVDLEHKVKYPREVKIHNRNSTIISFSVYPLLSRLYWTEVSNFGYQMFYYSIISHTLHRILQPTATNQQNKRNQCSCNVTEFELSGAMAIDTSNLEKPLIYFAKAQEIWAMDLEGCQCWRVITVPAMLGKTLVSLTVDGDLIYWIITAKDSTQIYQAKKGNGAIVSQVKALRSRHILAYSSVMQPFPDKAFLSLASDTVEPTILNATNTSLTIRLPLAKTNLTWYGITSPTPTYLVYYAEVNDRKNSSDLKYRILEFQDSIALIEDLQPFSTYMIQIAVKNYYSDPLEHLPPGKEIWGKTKNGVPEAVQLINTTVRSDTSLIISWRESHKPNGPKESVRYQLAISHLALIPETPLRQSEFPNGRLTLLVTRLSGGNIYVLKVLACHSEEMWCTESHPVTVEMFNTPEKPYSLVPENTSLQFNWKAPLNVNLIRFWVELQKWKYNEFYHVKTSCSQGPAYVCNITNLQPYTSYNVRVVVVYKTGENSTSLPESFKTKAGVPNKPGIPKLLEGSKNSIQWEKAEDNGCRITYYILEIRKSTSNNLQNQNLRWKMTFNGSCSSVCTWKSKNLKGIFQFRVVAANNLGFGEYSGISENIILVGDDFWIPETSFILTIIVGIFLVVTIPLTFVWHRRLKNQKSAKEGVTVLINEDKELAELRGLAAGVGLANACYAIHTLPTQEEIENLPAFPREKLTLRLLLGSGAFGEVYEGTAVDILGVGSGEIKVAVKTLKKGSTDQEKIEFLKEAHLMSKFNHPNILKQLGVCLLNEPQYIILELMEGGDLLTYLRKARMATFYGPLLTLVDLVDLCVDISKGCVYLERMHFIHRDLAARNCLVSVKDYTSPRIVKIGDFGLARDIYKNDYYRKRGEGLLPVRWMAPESLMDGIFTTQSDVWSFGILIWEILTLGHQPYPAHSNLDVLNYVQTGGRLEPPRNCPDDLWNLMTQCWAQEPDQRPTFHRIQDQLQLFRNFFLNSIYKSRDEANNSGVINESFEGEDGDVICLNSDDIMPVALMETKNREGLNYMVLATECGQGEEKSEGPLGSQESESCGLRKEEKEPHADKDFCQEKQVAYCPSGKPEGLNYACLTHSGYGDGSD

SEQ ID NO: 1435 - protein, 2302 aa, Artificial Sequence
  Synthetic polypeptide
DHPGQHDWANGYYRQQRKLVEEIGWSYTGALNQKNWGKKYPTCNSPKQSPINIDEDLTQVNVNLKKLKFQGWDKTSLENTFIHNTGKTVEINLTNDYRVSGGVSEMVFKASKITFHWGKCNMSSDGSEHSLEGQKFPLEMQIYCFDADRFSSFEEAVKGKGKLRALSILFEVGTEENLDFKAIIDGVESVSRFGKQAALDPFILLNLLPNSTDKYYIYNGSLTSPPCTDTVDWIVFKDTVSISESQLAVFCEVLTMQQSGYVMLMDYLQNNFREQQYKFSRQVFSSYTGKEEIHEAVCSSEPENVQADPENYTSLLVTWERPRVVYDTMIEKFAVLYQQLDGEDQTKHEFLTDGYQDLGAILNNLLPNMSYVLQIVAICTNGLYGKYSDQLIVDMPTDNPELDLFPELIGTEEIIKEEEEGKDIEEGAIVNPGRDSATNQIRKKEPQISTTTHYNRIGTKYNEAKTNRSPTRGSEFSGKGDVPNTSLNSTSQPVTKLATEKDISLTSQTVTELPPHTVEGTSASLNDGSKTVLRSPHMNLSGTAESLNTVSITEYEEESLLTSFKLDTGAEDSSGSSPATSAIPFISENISQGYIFSSENPETITYDVLIPESARNASEDSTSSGSEESLKDPSMEGNVWFPSSTDITAQPDVGSGRESFLQTNYTEIRVDESEKTTKSFSAGPVMSQGPSVTDLEMPHYSTFAYFPTEVTPHAFTPSSRQQDLVSTVNVVYSQTTQPVYNGETPLQPSYSSEVFPLVTPLLLDNQILNTTPAASSSDSALHATPVFPSVDVSFESILSSYDGAPLLPFSSASFSSELFRHLHTVSQILPQVTSATESDKVPLHASLPVAGGDLLLEPSLAQYSDVLSTTHAASETLEFGSESGVLYKTLMFSQVEPPSSDAMMHARSSGPEPSYALSDNEGSQHIFTVSYSSAIPVHDSVGVTYQGSLFSGPSHIPIPKSSLITPTASLLQPTHALSGDGEWSGASSDSEFLLPDTDGLTALNISSPVSVAEFTYTTSVFGDDNKALSKSEIIYGNETELQIPSFNEMVYPSESTVMPNMYDNVNKLNASLQETSVSISSTKGMFPGSLAHTTTKVFDHEISQVPENNFSVQPTHTVSQASGDTSLKPVLSANSEPASSDPASSEMLSPSTQLLFYETSASFSTEVLLQPSFQASDVDTLLKTVLPAVPSDPILVETPKVDKISSTMLHLIVSNSASSENMLHSTSVPVFDVSPTSHMHSASLQGLTISYASEKYEPVLLKSESSHQVVPSLYSNDELFQTANLEINQAHPPKGRHVFATPVLSIDEPLNTLINKLIHSDEILTSTKSSVTGKVFAGIPTVASDTFVSTDHSVPIGNGHVAITAVSPHRDGSVTSTKLLFPSKATSELSHSAKSDAGLVGGGEDGDTDDDGDDDDDDRGSDGLSIHKCMSCSSYRESQEKVMNDSDTHENSLMDQNNPISYSLSENSEEDNRVTSVSSDSQTGMDRSPGKSPSANGLSQKHNDGKEENDIQTGSALLPLSPESKAWAVLTSDEESGSGQGTSDSLNENETSTDFSFADTNEKDADGILAAGDSEITPGFPQSPTSSVTSENSEVFHVSEAEASNSSHESRIGLAEGLESEKKAVIPLVIVSALTFICLVVLVGILIYWRKCFQTAHFYLEDSTSPRVISTPPTPIFPISDDVGAIPIKHFPKHVADLHASSGFTEEFETLKEFYQEVQSCTVDLGITADSSNHPDNKHKNRYINIVAYDHSRVKLAQLAEKDGKLTDYINANYVDGYNRPKAYIAAQGPLKSTAEDFWRMIWEHNVEVIVMITNLVEKGRRKCDQYWPADGSEEYGNFLVTQKSVQVLAYYTVRNFTLRNTKIKKGSQKGRPSGRVVTQYHYTQWPDMGVPEYSLPVLTFVRKAAYAKRHAVGPVVVHCSAGVGRTGTYIVLDSMLQQIQHEGTVNIFGFLKHIRSQRNYLVQTEEQYVFIHDTLVEAILSKETEVLDSHIHAYVNALLIPGPAGKTKLEKQFQLLSQSNIQQSDYSAALKQCNREKNRTSSIIPVERSRVGISSLSGEGTDYINASYIMGYYQSNEFIITQHPLLHTIKDFWRMIWDHNAQLVVMIPDGQNMAEDEFVYWPNKDEPINCESFKVTLMAEEHKCLSNEEKLIIQDFILEATQDDYVLEVRHFQCPKWPNPDSPISKTFELISVIKEEAANRDGPMIVHDEHGGVTAGTFCALTTLMHQLEKENSVDVYQVAKMINLMRPGVFADIEQYQFLYKVILSLVSTRQEENPSTSLDSNGAALPDGNIAESLESLV

SEQ ID NO: 1436 - protein, 2285 aa, Artificial Sequence
  Synthetic polypeptide
GTSRLWSTLQMGALNQKNWGKKYPTCNSPKQSPINIDEDLTQVNVNLKKLKFQGWDKTSLENTFIHNTGKTVEINLTNDYRVSGGVSEMVFKASKITFHWGKCNMSSDGSEHSLEGQKFPLEMQIYCFDADRFSSFEEAVKGKGKLRALSILFEVGTEENLDFKAIIDGVESVSRFGKQAALDPFILLNLLPNSTDKYYIYNGSLTSPPCTDTVDWIVFKDTVSISESQLAVFCEVLTMQQSGYVMLMDYLQNNFREQQYKFSRQVFSSYTGKEEIHEAVCSSEPENVQADPENYTSLLVTWERPRVVYDTMIEKFAVLYQQLDGEDQTKHEFLTDGYQDLGAILNNLLPNMSYVLQIVAICTNGLYGKYSDQLIVDMPTDNPELDLFPELIGTEEIIKEEEEGKDIEEGAIVNPGRDSATNQIRKKEPQISTTTHYNRIGTKYNEAKTNRSPTRGSEFSGKGDVPNTSLNSTSQPVTKLATEKDISLTSQTVTELPPHTVEGTSASLNDGSKTVLRSPHMNLSGTAESLNTVSITEYEEESLLTSFKLDTGAEDSSGSSPATSAIPFISENISQGYIFSSENPETITYDVLIPESARNASEDSTSSGSEESLKDPSMEGNVWFPSSTDITAQPDVGSGRESFLQTNYTEIRVDESEKTTKSFSAGPVMSQGPSVTDLEMPHYSTFAYFPTEVTPHAFTPSSRQQDLVSTVNVVYSQTTQPVYNGETPLQPSYSSEVFPLVTPLLLDNQILNTTPAASSSDSALHATPVFPSVDVSFESILSSYDGAPLLPFSSASFSSELFRHLHTVSQILPQVTSATESDKVPLHASLPVAGGDLLLEPSLAQYSDVLSTTHAASETLEFGSESGVLYKTLMFSQVEPPSSDAMMHARSSGPEPSYALSDNEGSQHIFTVSYSSAIPVHDSVGVTYQGSLFSGPSHIPIPKSSLITPTASLLQPTHALSGDGEWSGASSDSEFLLPDTDGLTALNISSPVSVAEFTYTTSVFGDDNKALSKSEIIYGNETELQIPSFNEMVYPSESTVMPNMYDNVNKLNASLQETSVSISSTKGMFPGSLAHTTTKVFDHEISQVPENNFSVQPTHTVSQASGDTSLKPVLSANSEPASSDPASSEMLSPSTQLLFYETSASFSTEVLLQPSFQASDVDTLLKTVLPAVPSDPILVETPKVDKISSTMLHLIVSNSASSENMLHSTSVPVFDVSPTSHMHSASLQGLTISYASEKYEPVLLKSESSHQVVPSLYSNDELFQTANLEINQAHPPKGRHVFATPVLSIDEPLNTLINKLIHSDEILTSTKSSVTGKVFAGIPTVASDTFVSTDHSVPIGNGHVAITAVSPHRDGSVTSTKLLFPSKATSELSHSAKSDAGLVGGGEDGDTDDDGDDDDDDRGSDGLSIHKCMSCSSYRESQEKVMNDSDTHENSLMDQNNPISYSLSENSEEDNRVTSVSSDSQTGMDRSPGKSPSANGLSQKHNDGKEENDIQTGSALLPLSPESKAWAVLTSDEESGSGQGTSDSLNENETSTDFSFADTNEKDADGILAAGDSEITPGFPQSPTSSVTSENSEVFHVSEAEASNSSHESRIGLAEGLESEKKAVIPLVIVSALTFICLVVLVGILIYWRKCFQTAHFYLEDSTSPRVISTPPTPIFPISDDVGAIPIKHFPKHVADLHASSGFTEEFETLKEFYQEVQSCTVDLGITADSSNHPDNKHKNRYINIVAYDHSRVKLAQLAEKDGKLTDYINANYVDGYNRPKAYIAAQGPLKSTAEDFWRMIWEHNVEVIVMITNLVEKGRRKCDQYWPADGSEEYGNFLVTQKSVQVLAYYTVRNFTLRNTKIKKGSQKGRPSGRVVTQYHYTQWPDMGVPEYSLPVLTFVRKAAYAKRHAVGPVVVHCSAGVGRTGTYIVLDSMLQQIQHEGTVNIFGFLKHIRSQRNYLVQTEEQYVFIHDTLVEAILSKETEVLDSHIHAYVNALLIPGPAGKTKLEKQFQLLSQSNIQQSDYSAALKQCNREKNRTSSIIPVERSRVGISSLSGEGTDYINASYIMGYYQSNEFIITQHPLLHTIKDFWRMIWDHNAQLVVMIPDGQNMAEDEFVYWPNKDEPINCESFKVTLMAEEHKCLSNEEKLIIQDFILEATQDDYVLEVRHFQCPKWPNPDSPISKTFELISVIKEEAANRDGPMIVHDEHGGVTAGTFCALTTLMHQLEKENSVDVYQVAKMINLMRPGVFADIEQYQFLYKVILSLVSTRQEENPSTSLDSNGAALPDGNIAESLESLV

SEQ ID NO: 1437 - protein, 2191 aa, Artificial Sequence
  Synthetic polypeptide
HLELGFLASITSNDASGNTWNWLYFIPLIIIGSFFMLNLVLGVLSGEFAKERERVENRRAFLKLRRQQQIERELNGYMEWISKAEEVILAEDETDGEQRHPFDALRRTTIKKSKTDLLNPEEAEDQLADIASVGSPFARASIKSAKLENSTFFHKKERRMRFYIRRMVKTQAFYWTVLSLVALNTLCVAIVHYNQPEWLSDFLYYAEFIFLGLFMSEMFIKMYGLGTRPYFHSSFNCFDCGVIIGSIFEVIWAVIKPGTSFGISVLRALRLLRIFKVTKYWASLRNLVVSLLNSMKSIISLLFLLFLFIVVFALLGMQLFGGQFNFDEGTPPTNFDTFPAAIMTVFQILTGEDWNEVMYDGIKSQGGVQGGMVFSIYFIVLTLFGNYTLLNVFLAIAVDNLANAQELTKDEQEEEEAANQKLALQKAKEVAEVSPLSAANMSIAVKEQQKNQKPAKSVWEQRTSEMRKQNLLASREALYNEMDPDERWKAAYTRHLRPDMKTHLDRPLVVDPQENRNNNTNKSRAAEPTVDQRLGQQRAEDFLRKQARYHDRARDPSGSAGLDARRPWAGSQEAELSREGPYGRESDHHAREGSLEQPGFWEGEAERGKAGDPHRRHVHRQGGSRESRSGSPRTGADGEHRRHRAHRRPGEEGPEDKAERRARHREGSRPARGGEGEGEGPDGGERRRRHRHGAPATYEGDARREDKERRHRRRKENQGSGVPVSGPNLSTTRPIQQDLGRQDPPLAEDIDNMKNNKLATAESAAPHGSLGHAGLPQSPAKMGNSTDPGPMLAIPAMATNPQNAASRRTPNNPGNPSNPGPPKTPENSLIVTNPSGTQTNSAKTARKPDHTTVDIPPACPPPLNHTVVQVNKNANPDPLPKKEEEKKEEEEDDRGEDGPKPMPPYSSMFILSTTNPLRRLCHYILNLRYFEMCILMVIAMSSIALAAEDPVQPNAPRNNVLRYFDYVFTGVFTFEMVIKMIDLGLVLHQGAYFRDLWNILDFIVVSGALVAFAFTGNSKGKDINTIKSLRVLRVLRPLKTIKRLPKLKAVFDCVVNSLKNVFNILIVYMLFMFIFAVVAVQLFKGKFFHCTDESKEFEKDCRGKYLLYEKNEVKARDREWKKYEFHYDNVLWALLTLFTVSTGEGWPQVLKHSVDATFENQGPSPGYRMEMSIFYVVYFVVFPFFFVNIFVALIIITFQEQGDKMMEEYSLEKNERACIDFAISAKPLTRHMPQNKQSFQYRMWQFVVSPPFEYTIMAMIALNTIVLMMKFYGASVAYENALRVFNIVFTSLFSLECVLKVMAFGILNYFRDAWNIFDFVTVLGSITDILVTEFGNNFINLSFLRLFRAARLIKLLRQGYTIRILLWTFVQSFKALPYVCLLIAMLFFIYAIIGMQVFGNIGIDVEDEDSDEDEFQITEHNNFRTFFQALMLLFRSATGEAWHNIMLSCLSGKPCDKNSGILTRECGNEFAYFYFVSFIFLCSFLMLNLFVAVIMDNFEYLTRDSSILGPHHLDEYVRVWAEYDPAAWGRMPYLDMYQMLRHMSPPLGLGKKCPARVAYKRLLRMDLPVADDNTVHFNSTLMALIRTALDIKIAKGGADKQQMDAELRKEMMAIWPNLSQKTLDLLVTPHKSTDLTVGKIYAAMMIMEYYRQSKAKKLQAMREEQDRTPLMFQRMEPPSPTQEGGPGQNALPSTQLDPGGALMAHESGLKESPSWVTQRAQEMFQKTGTWSPEQGPPTDMPNSQPNSQSVEMREMGRDGYSDSEHYLPMEGQGRAASMPRLPAENQRRRGRPRGNNLSTISDTSPMKRSASVLGPKARRLDDYSLERVPPEENQRHHQRRRDRSHRASERSLGRYTDVDTGLGTDLSMTTQSGDLPSKERDQERGRPKDRKHRQHHHHHHHHHHPPPPDKDRYAQERPDHGRARARDQRWSRSPSEGREHMAHRQGSSSVSGSPAPSTSGTSTPRRGRRQLPQTPSTPRPHVSYSPVIRKAGGSGPPQQQQQQQQQQQQQAVARPGRAATSGPRRYPGPTAEPLAGDRPPTGGHSSGRSPRMERRVPGPARSESPRACRHGGARWPASGPHVSEGPPGPRHHGYYRGSDYDEADGPGSGGGEEAMAGAYDAPPPVRHASSGATGRSPRTPRASGPACASPSRHGRRLPNGYYPAHGLARPRGPGSRKGLHEPYSESDDDWC

SEQ ID NO: 1438 - protein, 2178 aa, Artificial Sequence
  Synthetic polypeptide
RRWHAPVVPTTPEAEMQIYCFDADRFSSFEEAVKGKGKLRALSILFEVGTEENLDFKAIIDGVESVSRFGKQAALDPFILLNLLPNSTDKYYIYNGSLTSPPCTDTVDWIVFKDTVSISESQLAVFCEVLTMQQSGYVMLMDYLQNNFREQQYKFSRQVFSSYTGKEEIHEAVCSSEPENVQADPENYTSLLVTWERPRVVYDTMIEKFAVLYQQLDGEDQTKHEFLTDGYQDLGAILNNLLPNMSYVLQIVAICTNGLYGKYSDQLIVDMPTDNPELDLFPELIGTEEIIKEEEEGKDIEEGAIVNPGRDSATNQIRKKEPQISTTTHYNRIGTKYNEAKTNRSPTRGSEFSGKGDVPNTSLNSTSQPVTKLATEKDISLTSQTVTELPPHTVEGTSASLNDGSKTVLRSPHMNLSGTAESLNTVSITEYEEESLLTSFKLDTGAEDSSGSSPATSAIPFISENISQGYIFSSENPETITYDVLIPESARNASEDSTSSGSEESLKDPSMEGNVWFPSSTDITAQPDVGSGRESFLQTNYTEIRVDESEKTTKSFSAGPVMSQGPSVTDLEMPHYSTFAYFPTEVTPHAFTPSSRQQDLVSTVNVVYSQTTQPVYNGETPLQPSYSSEVFPLVTPLLLDNQILNTTPAASSSDSALHATPVFPSVDVSFESILSSYDGAPLLPFSSASFSSELFRHLHTVSQILPQVTSATESDKVPLHASLPVAGGDLLLEPSLAQYSDVLSTTHAASETLEFGSESGVLYKTLMFSQVEPPSSDAMMHARSSGPEPSYALSDNEGSQHIFTVSYSSAIPVHDSVGVTYQGSLFSGPSHIPIPKSSLITPTASLLQPTHALSGDGEWSGASSDSEFLLPDTDGLTALNISSPVSVAEFTYTTSVFGDDNKALSKSEIIYGNETELQIPSFNEMVYPSESTVMPNMYDNVNKLNASLQETSVSISSTKGMFPGSLAHTTTKVFDHEISQVPENNFSVQPTHTVSQASGDTSLKPVLSANSEPASSDPASSEMLSPSTQLLFYETSASFSTEVLLQPSFQASDVDTLLKTVLPAVPSDPILVETPKVDKISSTMLHLIVSNSASSENMLHSTSVPVFDVSPTSHMHSASLQGLTISYASEKYEPVLLKSESSHQVVPSLYSNDELFQTANLEINQAHPPKGRHVFATPVLSIDEPLNTLINKLIHSDEILTSTKSSVTGKVFAGIPTVASDTFVSTDHSVPIGNGHVAITAVSPHRDGSVTSTKLLFPSKATSELSHSAKSDAGLVGGGEDGDTDDDGDDDDDDRGSDGLSIHKCMSCSSYRESQEKVMNDSDTHENSLMDQNNPISYSLSENSEEDNRVTSVSSDSQTGMDRSPGKSPSANGLSQKHNDGKEENDIQTGSALLPLSPESKAWAVLTSDEESGSGQGTSDSLNENETSTDFSFADTNEKDADGILAAGDSEITPGFPQSPTSSVTSENSEVFHVSEAEASNSSHESRIGLAEGLESEKKAVIPLVIVSALTFICLVVLVGILIYWRKCFQTAHFYLEDSTSPRVISTPPTPIFPISDDVGAIPIKHFPKHVADLHASSGFTEEFETLKEFYQEVQSCTVDLGITADSSNHPDNKHKNRYINIVAYDHSRVKLAQLAEKDGKLTDYINANYVDGYNRPKAYIAAQGPLKSTAEDFWRMIWEHNVEVIVMITNLVEKGRRKCDQYWPADGSEEYGNFLVTQKSVQVLAYYTVRNFTLRNTKIKKGSQKGRPSGRVVTQYHYTQWPDMGVPEYSLPVLTFVRKAAYAKRHAVGPVVVHCSAGVGRTGTYIVLDSMLQQIQHEGTVNIFGFLKHIRSQRNYLVQTEEQYVFIHDTLVEAILSKETEVLDSHIHAYVNALLIPGPAGKTKLEKQFQLLSQSNIQQSDYSAALKQCNREKNRTSSIIPVERSRVGISSLSGEGTDYINASYIMGYYQSNEFIITQHPLLHTIKDFWRMIWDHNAQLVVMIPDGQNMAEDEFVYWPNKDEPINCESFKVTLMAEEHKCLSNEEKLIIQDFILEATQDDYVLEVRHFQCPKWPNPDSPISKTFELISVIKEEAANRDGPMIVHDEHGGVTAGTFCALTTLMHQLEKENSVDVYQVAKMINLMRPGVFADIEQYQFLYKVILSLVSTRQEENPSTSLDSNGAALPDGNIAESLESLV

SEQ ID NO: 1439 - protein, 2131 aa, Artificial Sequence
  Synthetic polypeptide
AEERRGQLCFCSPLCCQHHFISRHETGGKLIFMAPGPIELRAHAILVSDGGELRIGSEDKPFQGRAQITLYGSSYSTPFFPYGVKFLAVRNGTLSLHGSLPEVIVTCLRATAHALDTVLALEDAVDWNPGDEVVIISGTGVKGAKPMEEIVTVETVQDTDLYLKSPLRYSHNFTENWVAGEHHILKATVALLSRSITIQGNLTNEREKLLVSCQEANAPEGNLQHCLYSMSEKMLGSRDMGARVIVQSFPEEPSQVQLKGVQFQVLGQAFHKHLSSLTLVGAMRESFIQGCTVRNSFSRGLSMCGTLGLKVDSNVFYNILGHALLVGTCTEMRYISWEAIHGRKDDWSGHGNIIRNNVIIQVSGAEGLSNPEMLTPSGIYICSPTNVIEGNRVCGAGYGYFFHLMTNQTSQAPLLSFTQNIAHSCTRYGLFVYPKFQPPWDNVTGTTLFQSFTVWESAGGAQIFRSSNLRLKNFKVYSCRDFGIDVLESDANTSVTDSLLLGHFAHKGSLCMSSGIKTPKRWELMVSNTTFVNFDLINCVAIRTCSDCSQGQGGFTVKTSQLKFTNSSNLVAFPFPHAAILEDLDGSLSGKNRSHILASMETLSASCLVNSSFGRVVHGSACGGGVLFHRMSIGLANTPEVSYDLTMTDSRNKTTTVNYVRDTLSNPRGWMALLLDQETYSLQSENLWINRSLQYSATFDNFAPGNYLLLVHTDLPPYPDILLRCGSRVGLSFPFLPSPGQNQGCDWFFNSQLRQLTYLVSGEGQVQVILRVKEGMPPTISASTSAPESALKWSLPETWQGVEEGWGGYNNTIPGPGDDVLILPNRTVLVDTDLPFFKGLYVMGTLDFPVDRSNVLSVACMVIAGGELKVGTLENPLEKEQKLLILLRASEGVFCDRMNGIHIDPGTIGVYGKVHLYSAYPKNSWTHLGADIASGNERIIVEDAVDWRPHDKIVLSSSSYEPHEAEVLTVKEVKGHHVRIYERLKHRHIGSVHVTEDGRHIRLAAEVGLLTRNIQIQPDVSCRGRLFVGSFRKSSREEFSGVLQLLNVEIQNFGSPLYSSVEFSNVSAGSWIISSTLHQSCGGGIHAAASHGVLLNDNIVFGTAGHGIDLEGQAYTVTNNLVVLMTQPAWSTIWVAGIKVNQVKDINLHGNVVAGSERLGFHIRGHKCSSCELLWSDNVAHSSLHGLHLYKESGLDNCTRISGFLAFKNFDYGAMLHVENSVEIENITLVDNTIGLLAVVYVFSAPQNSVKKVQIVLRNSVIVATSSSFDCIQDKVKPHSANLTSTDRAPSNPRGGRIGILWPVFTSEPNQWPQEPWHKVRNDHSISGIMKLQDVTFSSFVKSCYSDDLDVCILPNAENSGIMHPITAERTRMLKIKDKNKFYFPSLQPRKDLGKVVCPELDCASPRKYLFKDLDGRALGLPPPVSVFPKTEAEWTASFFNAGTFREEQKCTYQFLMQGFICKQTDQVVLILDSADAIWAIQKLYPVVSVTSGFVDVFSSVNANIPCSTSGSVSTFYSILPIRQITKVCFMDQTPQVLRFFLLGNKSTSKLLLAVFYHELQSPHVFLGESFIPPTLVQSASLLLNESIGANYFNIMDNLLYVVLQGEEPIEIRSGVSIHLALTVMVSVLEKGWEIVILERLTNFLQIGQNQIRFIHEMPGHEETLKAIADSRAKRKRNCPTVTCTSHYRRVGQRRPLMMEMNSHRASPPMTVETISKVIVIEIGDSPTVRSTGMISSLSSNKLQNLAHRVITAQQTGVLENVLNMTIGALLVTQSKGVIGYGNTSSFKTGNLIYIRPYALSILVQPSDGEVGNELPVQPQLVFLDEQNRRVESLGPPSEPWTISASLEGASDSVLKGCTQAETQDGYVSFYNLAVLISGSNWHFIFTVTSPPGVNFTARSKPFAVLPVTRKEKSTIILAASLSSVASWLALSCLVCCWLKRSKSRKTKPEEIPESQTNNQNIHIHISSKRRESQGPKKEDTVVGEDMRMKVMLGKVNQCPHQLMNGVSRRKVSRHIVREEEAAVPAPGTTGITSHGHICAPGAPAQQVYLQETGNWKEGQEQLLRYQLAGQNQLLLLCPDFRQERQQLPGQSRLSKQSGSLGLSQEKKASCGATEAFCLHSVHPETIQEQL

SEQ ID NO: 1440 - protein, 2095 aa, Artificial Sequence
  Synthetic polypeptide
GPEAGCVRGGNNNLTFLRPYYQTEEGEENPFICSSRRDNGMQKCSHIPGRRELRMPCTLGWEAYTQPQAEGVGAARNACINWNQYYNVCRSGDSNPHNGAINFDNIGYAWIAIFQVITLEGWVDIMYYVMDAHSFYNFIYFILLIIVGSFFMINLCLVVIATQFSETKQRESQLMREQRARHLSNDSTLASFSEPGSCYEELLKYVGHIFRKVKRRSLRLYARWQSRWRKKVDPSAVQGQGPGHRQRRAGRHTASVHHLVYHHHHHHHHHYHFSHGSPRRPGPEPGACDTRLVRAGAPPSPPSPGRGPPDAESVHSIYHADCHIEGPQERARVAHAAATAAASLRLATGLGTMNYPTILPSGVGSGKGSTSPGPKGKWAGGPPGTGGHGPLSLNSPDPYEKIPHVVGEHGLGQAPGHLSGLSVPCPLPSPPAGTLTCELKSCPYCTRALEDPEGELSGSESGDSDGRGVYEFTQDVRHGDRWDPTRPPRATDTPGPGPGSPQRRAQQRAAPGEPGWMGRLWVTFSGKLRRIVDSKYFSRGIMMAILVNTLSMGVEYHEQPEELTNALEISNIVFTSMFALEMLLKLLACGPLGYIRNPYNIFDGIIVVISVWEIVGQADGGLSVLRTFRLLRVLKLVRFLPALRRQLVVLVKTMDNVATFCTLLMLFIFIFSILGMHLFGCKFSLKTDTGDTVPDRKNFDSLLWAIVTVFQILTQEDWNVVLYNGMASTSSWAALYFVALMTFGNYVLFNLLVAILVEGFQAEGDANRSDTDEDKTSVHFEEDFHKLRELQTTELKMCSLAVTPNGHLEGRGSLSPPLIMCTAATPMPTPKSSPFLDAAPSLPDSRRGSSSSGDPPLGDQKPPASLRSSPCAPWGPSGAWSSRRSSWSSLGRAPSLKRRGQCGERESLLSGEGKGSTDDEAEDGRAAPGPRATPLRRAESLDPRPLRPAALPPTKCRDRDGQVVALPSDFFLRIDSHREDAAELDDDSEDSCCLRLHKVLEPYKPQWCRSREAWALYLFSPQNRFRVSCQKVITHKMFDHVVLVFIFLNCVTIALERPDIDPGSTERVFLSVSNYIFTAIFVAEMMVKVVALGLLSGEHAYLQSSWNLLDGLLVLVSLVDIVVAMASAGGAKILGVLRVLRLLRTLRPLRVISRAPGLKLVVETLISSLRPIGNIVLICCAFFIIFGILGVQLFKGKFYYCEGPDTRNISTKAQCRAAHYRWVRRKYNFDNLGQALMSLFVLSSKDGWVNIMYDGLDAVGVDQQPVQNHNPWMLLYFISFLLIVSFFVLNMFVGVVVENFHKCRQHQEAEEARRREEKRLRRLERRRRSTFPSPEAQRRPYYADYSPTRRSIHSLCTSHYLDLFITFIICVNVITMSMEHYNQPKSLDEALKYCNYVFTIVFVFEAALKLVAFGFRRFFKDRWNQLDLAIVLLSLMGITLEEIEMSAALPINPTIIRIMRVLRIARVLKLLKMATGMRALLDTVVQALPQVGNLGLLFMLLFFIYAALGVELFGRLECSEDNPCEGLSRHATFSNFGMAFLTLFRVSTGDNWNGIMKDTLRECSREDKHCLSYLPALSPVYFVTFVLVAQFVLVNVVVAVLMKHLEESNKEAREDAELDAEIELEMAQGPGSARRVDADRPPLPQESPGARDAPNLVARKVSVSRMLSLPNDSYMFRPVVPASAPHPRPLQEVEMETYGAGTPLGSVASVHSPPAESCASLQIPLAVSSPARSGEPLHALSPRGTARSPSLSRLLCRQEAVHTDSLEGKIDSPRDTLDPAEPGEKTPVRPVTQGGSLQSPPRSPRPASVRTRKHTFGQRCVSSRPAAPGGEEAEASDPADEEVSHITSSACPWQPTAEPHGPEASPVAGGERDLRRLYSVDAQGFLDKPGRADEQWRPSAELGSGEPGEAKAWGPEAEPALGARRKKKMSPPCISVEPPAEDEGSARPSAAEGGSTTLRRRTPSCEATPHRDSLEPTEGSGAGGDPAAKGERWGQASCRAEHLTVPSFAFEPLDLGVPSGDPFLDGSHSVTPESRASSSGAIVPLEPPESEPPMPVGDPPEKRRGLYLTVPQCPLEKPGSPSATPAPGGGADDPV

SEQ ID NO: 1441 - protein, 2089 aa, Artificial Sequence
  Synthetic polypeptide
GPEAGCVRGGNNNLTFLRPYYQTEEGEENPFICSSRRDNGMQKCSHIPGRRELRMPCTLGWEAYTQPQAEGVGAARNACINWNQYYNVCRSGDSNPHNGAINFDNIGYAWIAIFQVITLEGWVDIMYYVMDAHSFYNFIYFILLIIVGSFFMINLCLVVIATQFSETKQRESQLMREQRARHLSNDSTLASFSEPGSCYEELLKYVGHIFRKVKRRSLRLYARWQSRWRKKVDPSAVQGQGPGHRQRRAGRHTASVHHLVYHHHHHHHHHYHFSHGSPRRPGPEPGACDTRLVRAGAPPSPPSPGRGPPDAESVHSIYHADCHIEGPQERARVAHAAATAAASLRLATGLGTMNYPTILPSGVGSGKGSTSPGPKGKWAGGPPGTGGHGPLSLNSPDPYEKIPHVVGEHGLGQAPGHLSGLSVPCPLPSPPAGTLTCELKSCPYCTRALEDPEGELSGSESGDSDGRGVYEFTQDVRHGDRWDPTRPPRATDTPGPGPGSPQRRAQQRAAPGEPGWMGRLWVTFSGKLRRIVDSKYFSRGIMMAILVNTLSMGVEYHEQPEELTNALEISNIVFTSMFALEMLLKLLACGPLGYIRNPYNIFDGIIVVISVWEIVGQADGGLSVLRTFRLLRVLKLVRFLPALRRQLVVLVKTMDNVATFCTLLMLFIFIFSILGMHLFGCKFSLKTDTGDTVPDRKNFDSLLWAIVTVFQILTQEDWNVVLYNGMASTSSWAALYFVALMTFGNYVLFNLLVAILVEGFQAEGDANRSDTDEDKTSVHFEEDFHKLRELQTTELKMCSLAVTPNGHLEGRGSLSPPLIMCTAATPMPTPKSSPFLDAAPSLPDSRRGSSSSGDPPLGDQKPPASLRSSPCAPWGPSGAWSSRRSSWSSLGRAPSLKRRGQCGERESLLSGEGKGSTDDEAEDGRAAPGPRATPLRRAESLDPRPLRPAALPPTKCRDRDGQVVALPSDFFLRIDSHREDAAELDDDSEDSCCLRLHKVLEPYKPQWCRSREAWALYLFSPQNRFRVSCQKVITHKMFDHVVLVFIFLNCVTIALERPDIDPGSTERVFLSVSNYIFTAIFVAEMMVKVVALGLLSGEHAYLQSSWNLLDGLLVLVSLVDIVVAMASAGGAKILGVLRVLRLLRTLRPLRVISRAPGLKLVVETLISSLRPIGNIVLICCAFFIIFGILGVQLFKGKFYYCEGPDTRNISTKAQCRAAHYRWVRRKYNFDNLGQALMSLFVLSSKDGWVNIMYDGLDAVGVDQQPVQNHNPWMLLYFISFLLIVSFFVLNMFVGVVVENFHKCRQHQEAEEARRREEKRLRRLERRRRKAQRRPYYADYSPTRRSIHSLCTSHYLDLFITFIICVNVITMSMEHYNQPKSLDEALKYCNYVFTIVFVFEAALKLVAFGFRRFFKDRWNQLDLAIVLLSLMGITLEEIEMSAALPINPTIIRIMRVLRIARVLKLLKMATGMRALLDTVVQALPQVGNLGLLFMLLFFIYAALGVELFGRLECSEDNPCEGLSRHATFSNFGMAFLTLFRVSTGDNWNGIMKDTLRECSREDKHCLSYLPALSPVYFVTFVLVAQFVLVNVVVAVLMKHLEESNKEAREDAELDAEIELEMAQGPGSARRVDADRPPLPQESPGARDAPNLVARKVSVSRMLSLPNDSYMFRPVVPASAPHPRPLQEVEMETYGAGTPLGSVASVHSPPAESCASLQIPLAVSSPARSGEPLHALSPRGTARSPSLSRLLCRQEAVHTDSLEGKIDSPRDTLDPAEPGEKTPVRPVTQGGSLQSPPRSPRPASVRTRKHTFGQRCVSSRPAAPGGEEAEASDPADEEVSHITSSACPWQPTAEPHGPEASPVAGGERDLRRLYSVDAQGFLDKPGRADEQWRPSAELGSGEPGEAKAWGPEAEPALGARRKKKMSPPCISVEPPAEDEGSARPSAAEGGSTTLRRRTPSCEATPHRDSLEPTEGSGAGGDPAAKGERWGQASCRAEHLTVPSFAFEPLDLGVPSGDPFLDGSHSVTPESRASSSGAIVPLEPPESEPPMPVGDPPEKRRGLYLTVPQCPLEKPGSPSATPAPGGGADDPV

SEQ ID NO: 1442 - protein, 2089 aa, Artificial Sequence; identical to SEQ ID NO: 1441
  Synthetic polypeptide

SEQ ID NO: 1443 - protein, 2049 aa, Artificial Sequence
  Synthetic polypeptide
AQEFETSLGNMYIFADAYAQYLWITFDFCNTLQGFSIPFRAADLLLHSKASNLLLGFDRSHPNKQLWKSDDFGQTWIMIQEHVKSFSWGIDPYDKPNTIYIERHEPSGYSTVFRSTDFFQSRENQEVILEEVRDFQLRDKYMFATKVVHLLGSEQQSSVQLWVSFGRKPMRAAQFVTRHPINEYYIADASEDQVFVCVSHSNNRTNLYISEAEGLKFSLSLENVLYYSPGGAGSDTLVRYFANEPFADFHRVEGLQGVYIATLINGSMNEENMRSVITFDKGGTWEFLQAPAFTGYGEKINCELSQGCSLHLAQRLSQLLNLQLRRMPILSKESAPGLIIATGSVGKNLASKTNVYISSSAGARWREALPGPHYYTWGDHGGIITAIAQGMETNELKYSTNEGETWKTFIFSEKPVFVYGLLTEPGEKSTVFTIFGSNKENVHSWLILQVNATDALGVPCTENDYKLWSPSDERGNECLLGHKTVFKRRTPHATCFNGEDFDRPVVVSNCSCTREDYECDFGFKMSEDLSLEVCVPDPEFSGKSYSPPVPCPVGSTYRRTRGYRKISGDTCSGGDVEARLEGELVPCPLAEENEFILYAVRKSIYRYDLASGATEQLPLTGLRAAVALDFDYEHNCLYWSDLALDVIQRLCLNGSTGQEVIINSGLETVEALAFEPLSQLLYWVDAGFKKIEVANPDGDFRLTIVNSSVLDRPRALVLVPQEGVMFWTDWGDLKPGIYRSNMDGSAAYHLVSEDVKWPNGISVDDQWIYWTDAYLECIERITFSGQQRSVILDNLPHPYAIAVFKNEIYWDDWSQLSIFRASKYSGSQMEILANQLTGLMDMKIFYKGKNTGSNACVPRPCSLLCLPKANNSRSCRCPEDVSSSVLPSGDLMCDCPQGYQLKNNTCVKQENTCLRNQYRCSNGNCINSIWWCDFDNDCGDMSDERNCPTTICDLDTQFRCQESGTCIPLSYKCDLEDDCGDNSDESHCEMHQCRSDEYNCSSGMCIRSSWVCDGDNDCRDWSDEANCTAIYHTCEASNFQCRNGHCIPQRWACDGDTDCQDGSDEDPVNCEKKCNGFRCPNGTCIPSSKHCDGLRDCSDGSDEQHCEPLCTHFMDFVCKNRQQCLFHSMVCDGIIQCRDGSDEDAAFAGCSQDPEFHKVCDEFGFQCQNGVCISLIWKCDGMDDCGDYSDEANCENPTEAPNCSRYFQFRCENGHCIPNRWKCDRENDCGDWSDEKDCGDSHILPFSTPGPSTCLPNYYRCSSGTCVMDTWVCDGYRDCADGSDEEACPLLANVTAASTPTQLGRCDRFEFECHQPKTCIPNWKRCDGHQDCQDGRDEANCPTHSTLTCMSREFQCEDGEACIVLSERCDGFLDCSDESDEKACSDELTVYKVQNLQWTADFSGDVTLTWMRPKKMPSASCVYNVYYRVVGESIWKTLETHSNKTNTVLKVLKPDTTYQVKVQVQCLSKAHNTNDFVTLRTPEGLPDAPRNLQLSLPREAEGVIVGHWAPPIHTHGLIREYIVEYSRSGSKMWASQRAASNFTEIKNLLVNTLYTVRVAAVTSRGIGNWSDSKSITTIKGKVIPPPDIHIDSYGENYLSFTLTMESDIKVNGYVVNLFWAFDTHKQERRTLNFRGSILSHKVGNLTAHTSYEISAWAKTDLGDSPLAFEHVMTRGVRPPAPSLKAKAINQTAVECTWTGPRNVVYGIFYATSFLDLYRNPKSLTTSLHNKTVIVSKDEQYLFLVRVVVPYQGPSSDYVVVKMIPDSRLPPRHLHVVHTGKTSVVIKWESPYDSPDQDLLYAVAVKDLIRKTDRSYKVKSRNSTVEYTLNKLEPGGKYHIIVQLGNMSKDSSIKITTVSLSAPDALKIITENDHVLLFWKSLALKEKHFNESRGYEIHMFDSAMNITAYLGNTTDNFFKISNLKMGHNYTFTVQARCLFGNQICGEPAILLYDELGSGADASATQAARSTDVAAVVVPILFLILLSLGVGFAILYTKHRRLQSSFTAFANSHYSSRLGSAIFSSGDDLGEDDEDAPMITGFSDDVPMVIA

SEQ ID NO: 1444 - protein, 1946 aa, Artificial Sequence
  Synthetic polypeptide
HLELGFLASITSNDASGNTWNWLYFIPLIIIGSFFMLNLVLGVLSGEFAKERERVENRRAFLKLRRQQQIERELNGYMEWISKAEEVILAEDETDGEQRHPFDGALRRTTIKKSKTDLLNPEEAEDQLADIASVGSPFARASIKSAKLENSTFFHKKERRMRFYIRRMVKTQAFYWTVLSLVALNTLCVAIVHYNQPEWLSDFLYYAEFIFLGLFMSEMFIKMYGLGTRPYFHSSFNCFDCGVIIGSIFEVIWAVIKPGTSFGISVLRALRLLRIFKVTKYWASLRNLVVSLLNSMKSIISLLFLLFLFIVVFALLGMQLFGGQFNFDEGTPPTNFDTFPAAIMTVFQILTGEDWNEVMYDGIKSQGGVQGGMVFSIYFIVLTLFGNYTLLNVFLAIAVDNLANAQELTKDEQEEEEAANQKLALQKAKEVAEVSPLSAANMSIAVKEQQKNQKPAKSVWEQRTSEMRKQNLLASREALYNEMDPDERWKAAYTRHLRPDMKTHLDRPLVVDPQENRNNNTNKSRAAEPTVDQRLGQQRAEDFLRKQARYHDRARDPSGSAGLDARRPWAGSQEAELSREGPYGRESDHHAREGSLEQPGFWEGEAERGKAGDPHRRHVHRQGGSRESRSGSPRTGADGEHRRHRAHRRPGEEGPEDKAERRARHREGSRPARGGEGEGEGPDGGERRRRHRHGAPATYEGDARREDKERRHRRRKENQGSGVPVSGPNLSTTRPIQQDLGRQDPPLAEDIDNMKNNKLATAESAAPHGSLGHAGLPQSPAKMGNSTDPGPMLAIPAMATNPQNAASRRTPNNPGNPSNPGPPKTPENSLIVTNPSGTQTNSAKTARKPDHTTVDIPPACPPPLNHTVVQVNKNANPDPLPKKEEEKKEEEEDDRGEDGPKPMPPYSSMFILSTTNPLRRLCHYILNLRYFEMCILMVIAMSSIALAAEDPVQPNAPRNNVLRYFDYVFTGVFTFEMVIKMIDLGLVLHQGAYFRDLWNILDFIVVSGALVAFAFTGNSKGKDINTIKSLRVLRVLRPLKTIKRLPKLKAVFDCVVNSLKNVFNILIVYMLFMFIFAVVAVQLFKGKFFHCTDESKEFEKDCRGKYLLYEKNEVKARDREWKKYEFHYDNVLWALLTLFTVSTGEGWPQVLKHSVDATFENQGPSPGYRMEMSIFYVVYFVVFPFFFVNIFVALIIITFQEQGDKMMEEYSLEKNERACIDFAISAKPLTRHMPQNKQSFQYRMWQFVVSPPFEYTIMAMIALNTIVLMMKFYGASVAYENALRVFNIVFTSLFSLECVLKVMAFGILNYFRDAWNIFDFVTVLGSITDILVTEFGNNFINLSFLRLFRAARLIKLLRQGYTIRILLWTFVQSFKALPYVCLLIAMLFFIYAIIGMQVFGNIGIDVEDEDSDEDEFQITEHNNFRTFFQALMLLFRSATGEAWHNIMLSCLSGKPCDKNSGILTRECGNEFAYFYFVSFIFLCSFLMLNLFVAVIMDNFEYLTRDSSILGPHHLDEYVRVWAEYDPAACGRIHYKDMYSLLRVISPPLGLGKKCPHRVACKRLLRMDLPVADDNTVHFNSTLMALIRTALDIKIAKGGADKQQMDAELRKEMMAIWPNLSQKTLDLLVTPHKSTDLTVGKIYAAMMIMEYYRQSKAKKLQAMREEQDRTPLMFQRMEPPSPTQEGGPGQNALPSTQLDPGGALMAHESGLKESPSWVTQRAQEMFQKTGTWSPEQGPPTDMPNSQPNSQSVEMREMGRDGYSDSEHYLPMEGQGRAASMPRLPAENQRRRGRPRGNNLSTISDTSPMKRSASVLGPKARRLDDYSLERVPPEENQRHHQRRRDRSHRASERSLGRYTDVDTGLGTDLSMTTQSGDLPSKERDQERGRPKDRKHRQHHHHHHHHHHPPPPDKDRYAQERPDHGRARARDQRWSRSPSEGREHMAHRQ

SEQ ID NO: 1445 - protein, 1883 aa, Artificial Sequence
  Synthetic polypeptide
KKNFLYKCSAAWCSVLIKSAGVHSYVLGLHIHSPLTHLPRATSSPETFIPDGIHSVTAFCTLRVTIITDDMLTNSITVRLENMSQEKFLSPLLALFVEGVAAVLSTTKDDVFVFNVQNDTDVSSNILNVTFSALLPGGVRGQFFPSEDLQEQIYLNRTLLTTISTQRVLPFDDNICLREPCENYMKCVSVLRFDSSAPFLSSTTVLFRPIHPINGLRCRCPPGFTGDYCETEIDLCYSDPCGANGRCRSREGGYTCECFEDFTGEHCEVDARSGRCANGVCKNGGTCVNLLIGGFHCVCPPGEYERPYCEVTTRSFPPQSFVTFRGLRQRFHFTISLTFATQERNGLLLYNGRFNEKHDFIALEIVDEQVQLTFSAGETTTTVAPKVPSGVSDGRWHSVQVQYYNKPNIGHLGLPHGPSGEKMAVVTVDDCDTTMAVRFGKDIGNYSCAAQGTQTGSKKSLDLTGPLLLGGVPNLPEDFPVHNRQFVGCMRNLSVDGKNVDMAGFIANNGTREGCAARRNFCDGRRCQNGGTCVNRWNMYLCECPLRFGGKNCEQAMPHPQLFSGESVVSWSDLNIIISVPWYLGLMFRTRKEDSVLMEATSGGPTSFRLQILNNYLQFEVSHGPSDVESVMLSGLRVTDGEWHHLLIELKNVKEDSEMKHLVTMTLDYGMDQNKADIGGMLPGLTVRSVVVGGASEDKVSVRRGFRGCMQGVRMGGTPTNVATLNMNNALKVRVKDGCDVDDPCTSSPCPPNSRCHDAWEDYSCVCDKGYLGINCVDACHLNPCENMGACVRSPGSPQGYVCECGPSHYGPYCENKLDLPCPRGWWGNPVCGPCHCAVSKGFDPDCNKTNGQCQCKENYYKLLAQDTCLPCDCFPHGSHSRTCDMATGQCACKPGVIGRQCNRCDNPFAEVTTLGCEVIYNGCPKAFEAGIWWPQTKFGQPAAVPCPKGSVGNAVRHCSGEKGWLPPELFNCTTISFVDLRAMNEKLSRNETQVDGARALQLVRALRSATQHTGTLFGNDVRTAYQLLGHVLQHESWQQGFDLAATQDADFHEDVIHSGSALLAPATRAAWEQIQRSEGGTAQLLRRLEGYFSNVARNVRRTYLRPFVIVTANMILAVDIFDKFNFTGARVPRFDTIHEEFPRELESSVSFPADFFRPPEEKEGPLLRPAGRRTTPQTTRPGPGTEREAPISRRRRHPDDAGQFAVALVIIYRTLGQLLPERYDPDRRSLRLPHRPIINTPMVSTLVYSEGAPLPRPLERPVLVEFALLEVEERTKPVCVFWNHSLAVGGTGGWSARGCELLSRNRTHVACQCSHTASFAVLMDISRRENGEVLPLKIVTYAAVSLSLAALLVAFVLLSLVRMLRSNLHSIHKHLAVALFLSQLVFVIGINQTENPFLCTVVAILLHYIYMSTFAWTLVESLHVYRMLTEVRNIDTGPMRFYYVVGWGIPAIVTGLAVGLDPQGYGNPDFCWLSLQDTLIWSFAGPIGAVIIINTVTSVLSAKVSCQRKHHYYGKKGIVSLLRTAFLLLLLISATWLLGLLAVNRDALSFHYLFAIFSGLQGPFVLLFHCVLNQEVRKHLKGVLGGRKLHLEDSATTRATLLTRSLNCNTTFGDGPDMLRTDLGESTASLDSIVRDEGIQKLGVSSGLVRGSHGEPDASLMPRSCKDPPGHDSDSDSELSLDEQSSSYASSHSSDSEDDGVGAEEKWDPARGAVHSTPKGDAVANHVPAGWPDQSLAESDSEDPSGKPRLKVETKVSVELHREEQGSHRGEYPPDQESGGAARLASSQPPEQRKGILKNKVTYPPPLTLTEQTLKGRLREKLADCEQSPTSSRTSSLGSGGPDCAITVKSPGREPGRDHLNGVAMNVRTGSAQADGSDSEKP

SEQ ID NO: 1446 - protein, 1866 aa, Artificial Sequence
  Synthetic polypeptide
SGTQMGLLFPLGDVAMSGDVSVVTVWRAVLLASDGIHSVTAFCTLRVTIITDDMLTNSITVRLENMSQEKFLSPLLALFVEGVAAVLSTTKDDVFVFNVQNDTDVSSNILNVTFSALLPGGVRGQFFPSEDLQEQIYLNRTLLTTISTQRVLPFDDNICLREPCENYMKCVSVLRFDSSAPFLSSTTVLFRPIHPINGLRCRCPPGFTGDYCETEIDLCYSDPCGANGRCRSREGGYTCECFEDFTGEHCEVDARSGRCANGVCKNGGTCVNLLIGGFHCVCPPGEYERPYCEVTTRSFPPQSFVTFRGLRQRFHFTISLTFATQERNGLLLYNGRFNEKHDFIALEIVDEQVQLTFSAGETTTTVAPKVPSGVSDGRWHSVQVQYYNKPNIGHLGLPHGPSGEKMAVVTVDDCDTTMAVRFGKDIGNYSCAAQGTQTGSKKSLDLTGPLLLGGVPNLPEDFPVHNRQFVGCMRNLSVDGKNVDMAGFIANNGTREGCAARRNFCDGRRCQNGGTCVNRWNMYLCECPLRFGGKNCEQAMPHPQLFSGESVVSWSDLNIIISVPWYLGLMFRTRKEDSVLMEATSGGPTSFRLQILNNYLQFEVSHGPSDVESVMLSGLRVTDGEWHHLLIELKNVKEDSEMKHLVTMTLDYGMDQNKADIGGMLPGLTVRSVVVGGASEDKVSVRRGFRGCMQGVRMGGTPTNVATLNMNNALKVRVKDGCDVDDPCTSSPCPPNSRCHDAWEDYSCVCDKGYLGINCVDACHLNPCENMGACVRSPGSPQGYVCECGPSHYGPYCENKLDLPCPRGWWGNPVCGPCHCAVSKGFDPDCNKTNGQCQCKENYYKLLAQDTCLPCDCFPHGSHSRTCDMATGQCACKPGVIGRQCNRCDNPFAEVTTLGCEVIYNGCPKAFEAGIWWPQTKFGQPAAVPCPKGSVGNAVRHCSGEKGWLPPELFNCTTISFVDLRAMNEKLSRNETQVDGARALQLVRALRSATQHTGTLFGNDVRTAYQLLGHVLQHESWQQGFDLAATQDADFHEDVIHSGSALLAPATRAAWEQIQRSEGGTAQLLRRLEGYFSNVARNVRRTYLRPFVIVTANMILAVDIFDKFNFTGARVPRFDTIHEEFPRELESSVSFPADFFRPPEEKEGPLLRPAGRRTTPQTTRPGPGTEREAPISRRRRHPDDAGQFAVALVIIYRTLGQLLPERYDPDRRSLRLPHRPIINTPMVSTLVYSEGAPLPRPLERPVLVEFALLEVEERTKPVCVFWNHSLAVGGTGGWSARGCELLSRNRTHVACQCSHTASFAVLMDISRRENGEVLPLKIVTYAAVSLSLAALLVAFVLLSLVRMLRSNLHSIHKHLAVALFLSQLVFVIGINQTENPFLCTVVAILLHYIYMSTFAWTLVESLHVYRMLTEVRNIDTGPMRFYYVVGWGIPAIVTGLAVGLDPQGYGNPDFCWLSLQDTLIWSFAGPIGAVIIINTVTSVLSAKVSCQRKHHYYGKKGIVSLLRTAFLLLLLISATWLLGLLAVNRDALSFHYLFAIFSGLQGPFVLLFHCVLNQEVRKHLKGVLGGRKLHLEDSATTRATLLTRSLNCNTTFGDGPDMLRTDLGESTASLDSIVRDEGIQKLGVSSGLVRGSHGEPDASLMPRSCKDPPGHDSDSDSELSLDEQSSSYASSHSSDSEDDGVGAEEKWDPARGAVHSTPKGDAVANHVPAGWPDQSLAESDSEDPSGKPRLKVETKVSVELHREEQGSHRGEYPPDQESGGAARLASSQPPEQRKGILKNKVTYPPPLTLTEQTLKGRLREKLADCEQSPTSSRTSSLGSGGPDCAITVKSPGREPGRDHLNGVAMNVRTGSAQADGSDSEKP

SEQ ID NO: 1447 - protein, 1852 aa, Artificial Sequence
  Synthetic polypeptide
IPQLPHPQILTGEDWNEVMYDGIKSQGGVQGGMVFSIYFIVLTLFGNYTLLNVFLAIAVDNLANAQELTKDEQEEEEAANQKLALQKAKEVAEVSPLSAANMSIAVKEQQKNQKPAKSVWEQRTSEMRKQNLLASREALYNEMDPDERWKAAYTRHLRPDMKTHLDRPLVVDPQENRNNNTNKSRAAEPTVDQRLGQQRAEDFLRKQARYHDRARDPSGSAGLDARRPWAGSQEAELSREGPYGRESDHHAREGSLEQPGFWEGEAERGKAGDPHRRHVHRQGGSRESRSGSPRTGADGEHRRHRAHRRPGEEGPEDKAERRARHREGSRPARGGEGEGEGPDGGERRRRHRHGAPATYEGDARREDKERRHRRRKENQGSGVPVSGPNLSTTRPIQQDLGRQDPPLAEDIDNMKNNKLATAESAAPHGSLGHAGLPQSPAKMGNSTDPGPMLAIPAMATNPQNAASRRTPNNPGNPSNPGPPKTPENSLIVTNPSGTQTNSAKTARKPDHTTVDIPPACPPPLNHTVVQVNKNANPDPLPKKEEEKKEEEEDDRGEDGPKPMPPYSSMFILSTTNPLRRLCHYILNLRYFEMCILMVIAMSSIALAAEDPVQPNAPRNNVLRYFDYVFTGVFTFEMVIKMIDLGLVLHQGAYFRDLWNILDFIVVSGALVAFAFTGNSKGKDINTIKSLRVLRVLRPLKTIKRLPKLKAVFDCVVNSLKNVFNILIVYMLFMFIFAVVAVQLFKGKFFHCTDESKEFEKDCRGKYLLYEKNEVKARDREWKKYEFHYDNVLWALLTLFTVSTGEGWPQVLKHSVDATFENQGPSPGYRMEMSIFYVVYFVVFPFFFVNIFVALIIITFQEQGDKMMEEYSLEKNERACIDFAISAKPLTRHMPQNKQSFQYRMWQFVVSPPFEYTIMAMIALNTIVLMMKFYGASVAYENALRVFNIVFTSLFSLECVLKVMAFGILNYFRDAWNIFDFVTVLGSITDILVTEFGNNFINLSFLRLFRAARLIKLLRQGYTIRILLWTFVQSFKALPYVCLLIAMLFFIYAIIGMQVFGNIGIDVEDEDSDEDEFQITEHNNFRTFFQALMLLFRSATGEAWHNIMLSCLSGKPCDKNSGILTRECGNEFAYFYFVSFIFLCSFLMLNLFVAVIMDNFEYLTRDSSILGPHHLDEYVRVWAEYDPAAWGRMPYLDMYQMLRHMSPPLGLGKKCPARVAYKRLLRMDLPVADDNTVHFNSTLMALIRTALDIKIAKGGADKQQMDAELRKEMMAIWPNLSQKTLDLLVTPHKSTDLTVGKIYAAMMIMEYYRQSKAKKLQAMREEQDRTPLMFQRMEPPSPTQEGGPGQNALPSTQLDPGGALMAHESGLKESPSWVTQRAQEMFQKTGTWSPEQGPPTDMPNSQPNSQSVEMREMGRDGYSDSEHYLPMEGQGRAASMPRLPAENQRRRGRPRGNNLSTISDTSPMKRSASVLGPKARRLDDYSLERVPPEENQRHHQRRRDRSHRASERSLGRYTDVDTGLGTDLSMTTQSGDLPSKERDQERGRPKDRKHRQHHHHHHHHHHPPPPDKDRYAQERPDHGRARARDQRWSRSPSEGREHMAHRQGSSSVSGSPAPSTSGTSTPRRGRRQLPQTPSTPRPHVSYSPVIRKAGGSGPPQQQQQQQQQQQQQAVARPGRAATSGPRRYPGPTAEPLAGDRPPTGGHSSGRSPRMERRVPGPARSESPRACRHGGARWPASGPHVSEGPPGPRHHGYYRGSDYDEADGPGSGGGEEAMAGAYDAPPPVRHASSGATGRSPRTPRASGPACASPSRHGRRLPNGYYPAHGLARPRGPGSRKGLHEPYSESDDDWC

SEQ ID NO: 1448 - protein, 1618 aa, Artificial Sequence
  Synthetic polypeptide
GCPLSLLLFNILMEVQAKAIRCCCGQFTNQHIPPLPSATPSKNEEESKQVETQPEKWSVAKHTQSYPTDSYGVLEFQGGGYSNKAMYIRVSYDTKPDSLLHLMVKDWQLELPKLLISVHGGLQNFEMQPKLKQVFGKGLIKAAMTTGAWIFTGGVSTGVISHVGDALKDHSSKSRGRVCAIGIAPWGIVENKEDLVGKDVTRVYQTMSNPLSKLSVLNNSHTHFILADNGTLGKYGAEVKLRRLLEKHISLQKINTRLGQGVPLVGLVVEGGPNVVSIVLEYLQEEPPIPVVICDGSGRASDILSFAHKYCEEGGIINESLREQLLVTIQKTFNYNKAQSHQLFAIIMECMKKKELVTVFRMGSEGQQDIEMAILTALLKGTNVSAPDQLSLALAWNRVDIARSQIFVFGPHWPPLGSLAPPTDSKATEKEKKPPMATTKGGRGKGKGKKKGKVKEEVEEETDPRKIELLNWVNALEQAMLDALVLDRVDFVKLLIENGVNMQHFLTIPRLEELYNTRLGPPNTLHLLVRDVKKSNLPPDYHISLIDIGLVLEYLMGGAYRCNYTRKNFRTLYNNLFGPKRPKALKLLGMEDDEPPAKGKKKKKKKKEEEIDIDVDDPAVSRFQYPFHELMVWAVLMKRQKMAVFLWQRGEESMAKALVACKLYKAMAHESSESDLVDDISQDLDNNSKDFGQLALELLDQSYKHDEQIAMKLLTYELKNWSNSTCLKLAVAAKHRDFIAHTCSQMLLTDMWMGRLRMRKNPGLKVIMGILLPPTILFLEFRTYDDFSYQTSKENEDGKEKEEENTDANADAGSRKGDEENEHKKQRSIPIGTKICEFYNAPIVKFWFYTISYLGYLLLFNYVILVRMDGWPSLQEWIVISYIVSLALEKIREILMSEPGKLSQKIKVWLQEYWNITDLVAISTFMIGAILRLQNQPYMGYGRVIYCVDIIFWYIRVLDIFGVNKYLGPYVMMIGKMMIDMLYFVVIMLVVLMSFGVARQAILHPEEKPSWKLARNIFYMPYWMIYGEVFADQIDLYAMEINPPCGENLYDEEGKRLPPCIPGAWLTPALMACYLLVANILLVNLLIAVFNNTFFEVKSISNQVWKFQRYQLIMTFHDRPVLPPPMIILSHIYIIIMRLSGRCRKKREGDQEERDRGLKLFLSDEELKRLHEFEEQCVQEHFREKEDEQQSSSDERIRVTSERVENMSMRLEEINERETFMKTSLQTVDLRLAQLEELSNRMVNALENLAGIDRSDLIQARSRASSECEATYLLRQSSINSADGYSLYRYHFNGEELLFEDTSLSTSPGTGVRKKTCSFRIKEEKDVKTHLVPECQNSLHLSLGTSTSATPDGSHLAVDDLKNAEESKLGPDIGISKEDDERQTDSKKEETISPSLNKTDVIHGQDKSDVQNTQLTVETTNIEGTISYPLEETKITRYFPDETINACKTMKSRSFVYSRGRKLVGGVNQDVEYSSITDQQLTTEWQCQVQKITRSHSTDIPYIVSEAAVQAEHKEQFADMQDEHHVAEAIPRIPRLSLTITDRNGMENLLSVKPDQTLGFPSLRSKSLHGHPRNVKSIQGKLDRSGHASSVSSLVIVSGMTAEEKKVKKEKASTETEC

SEQ ID NO: 1449 - protein, 1618 aa, Artificial Sequence; identical to SEQ ID NO: 1448
  Synthetic polypeptide

SEQ ID NO: 1450 - protein, 1618 aa, Artificial Sequence; identical to SEQ ID NO: 1448
  Synthetic polypeptide

SEQ ID NO: 1451 - protein, 1606 aa, Artificial Sequence
  Synthetic polypeptide
IPQLPHPQILTGEDWNEVMYDGIKSQGGVQGGMVFSIYFIVLTLFGNYTLLNVFLAIAVDNLANAQELTKDEQEEEEAANQKLALQKAKEVAEVSPLSAANMSIAVKEQQKNQKPAKSVWEQRTSEMRKQNLLASREALYNEMDPDERWKAAYTRHLRPDMKTHLDRPLVVDPQENRNNNTNKSRAAEPTVDQRLGQQRAEDFLRKQARYHDRARDPSGSAGLDARRPWAGSQEAELSREGPYGRESDHHAREGSLEQPGFWEGEAERGKAGDPHRRHVHRQGGSRESRSGSPRTGADGEHRRHRAHRRPGEEGPEDKAERRARHREGSRPARGGEGEGEGPDGGERRRRHRHGAPATYEGDARREDKERRHRRRKENQGSGVPVSGPNLSTTRPIQQDLGRQDPPLAEDIDNMKNNKLATAESAAPHGSLGHAGLPQSPAKMGNSTDPGPMLAIPAMATNPQNAASRRTPNNPGNPSNPGPPKTPENSLIVTNPSGTQTNSAKTARKPDHTTVDIPPACPPPLNHTVVQVNKNANPDPLPKKEEEKKEEEEDDRGEDGPKPMPPYSSMFILSTTNPLRRLCHYILNLRYFEMCILMVIAMSSIALAAEDPVQPNAPRNNVLRYFDYVFTGVFTFEMVIKMIDLGLVLHQGAYFRDLWNILDFIVVSGALVAFAFTGNSKGKDINTIKSLRVLRVLRPLKTIKRLPKLKAVFDCVVNSLKNVFNILIVYMLFMFIFAVVAVQLFKGKFFHCTDESKEFEKDCRGKYLLYEKNEVKARDREWKKYEFHYDNVLWALLTLFTVSTGEGWPQVLKHSVDATFENQGPSPGYRMEMSIFYVVYFVVFPFFFVNIFVALIIITFQEQGDKMMEEYSLEKNERACIDFAISAKPLTRHMPQNKQSFQYRMWQFVVSPPFEYTIMAMIALNTIVLMMKFYGASVAYENALRVFNIVFTSLFSLECVLKVMAFGILNYFRDAWNIFDFVTVLGSITDILVTEFGNNFINLSFLRLFRAARLIKLLRQGYTIRILLWTFVQSFKALPYVCLLIAMLFFIYAIIGMQVFGNIGIDVEDEDSDEDEFQITEHNNFRTFFQALMLLFRSATGEAWHNIMLSCLSGKPCDKNSGILTRECGNEFAYFYFVSFIFLCSFLMLNLFVAVIMDNFEYLTRDSSILGPHHLDEYVRVWAEYDPAACGRIHYKDMYSLLRVISPPLGLGKKCPHRVACKRLLRMDLPVADDNTVHFNSTLMALIRTALDIKIAKGGADKQQMDAELRKEMMAIWPNLSQKTLDLLVTPHKSTDLTVGKIYAAMMIMEYYRQSKAKKLQAMREEQDRTPLMFQRMEPPSPTQEGGPGQNALPSTQLDPGGALMAHESGLKESPSWVTQRAQEMFQKTGTWSPEQGPPTDMPNSQPNSQSVEMREMGRDGYSDSEHYLPMEGQGRAASMPRLPAENQRRRGRPRGNNLSTISDTSPMKRSASVLGPKARRLDDYSLERVPPEENQRHHQRRRDRSHRASERSLGRYTDVDTGLGTDLSMTTQSGDLPSKERDQERGRPKDRKHRQHHHHHHHHHHPPPPDKDRYAQERPDHGRARARDQRWSRSPSEGREHMAHRQ

SEQ ID NO: 1452 - protein, 1573 aa, Artificial Sequence
  Synthetic polypeptide
TVCARDPGCVLLLRMQCLMIYHCLPSQLRWDHLVAGKQTQGSHRFYIMDWNVTWNTSNPDFTKCFQNTVLVWVPCFYLWACFPFYFLYLSRHDRGYIQMTPLNKTKTALGFLLWIVCWADLFYSFWERSRGIFLAPVFLVSPTLLGITMLLATFLIQLERRKGVQSSGIMLTFWLVALVCALAILRSKIMTALKEDAQVDLFRDITFYVYFSLLLIQLVLSCFSDRSPLFSETIHDPNPCPESSASFLSRITFWWITGLIVRGYRQPLEGSDLWSLNKEDTSEQVVPVLVKNWKKECAKTRKQPVKVVYSSKDPAQPKESSKVDANEEVEALIVKSPQKEWNPSLFKVLYKTFGPYFLMSFFFKAIHDLMMFSGPQILKLLIKFVNDTKAPDWQGYFYTVLLFVTACLQTLVLHQYFHICFVSGMRIKTAVIGAVYRKALVITNSARKSSTVGEIVNLMSVDAQRFMDLATYINMIWSAPLQVILALYLLWLNLGPSVLAGVAVMVLMVPVNAVMAMKTKTYQVAHMKSKDNRIKLMNEILNGIKVLKLYAWELAFKDKVLAIRQEELKVLKKSAYLSAVGTFTWVCTPFLVALCTFAVYVTIDENNILDAQTAFVSLALFNILRFPLNILPMVISSIVQASVSLKRLRIFLSHEELEPDSIERRPVKDGGGTNSITVRNATFTWARSDPPTLNGITFSIPEGALVAVVGQVGCGKSSLLSALLAEMDKVEGHVAIKGSVAYVPQQAWIQNDSLRENILFGCQLEEPYYRSVIQACALLPDLEILPSGDRTEIGEKGVNLSGGQKQRVSLARAVYSNADIYLFDDPLSAVDAHVGKHIFENVIGPKGMLKNKTRILVTHSMSYLPQVDVIIVMSGGKISEMGSYQELLARDGAFAEFLRTYASTEQEQDAEENGSTVMDEEEAGVTGVSGPGKEAKQMENGMLVTDSAGKQLQRQLSSSSSYSGDISRHHNSTAELQKAEAKKEETWKLMEADKAQTGQVKLSVYWDYMKAIGLFISFLSIFLFMCNHVSALASNYWLSLWTDDPIVNGTQEHTKVRLSVYGALGISQGIAVFGYSMAVSIGGILASRCLHVDLLHSILRSPMSFFERTPSGNLVNRFSKELDTVDSMIPEVIKMFMGSLFNVIGACIVILLATPIAAIIIPPLGLIYFFVQRFYVASSRQLKRLESVSRSPVYSHFNETLLGVSVIRAFEEQERFIHQSDLKVDENQKAYYPSIVANRWLAVRLECVGNCIVLFAALFAVISRHSLSAGLVGLSVSYSLQVTTYLNWLVRMSSEMETNIVAVERLKEYSETEKEAPWQIQETAPPSSWPQVGRVEFRNYCLRYREDLDFVLRHINVTINGGEKVGIVGRTGAGKSSLTLGLFRINESAEGEIIIDGINIAKIGLHDLRFKITIIPQDPVLFSGSLRMNLDPFSQYSDEEVWTSLELAHLKDFVSALPDKLDHECAEGGENLSVGQRQLVCLARALLRKTKILVLDEATAAVDLETDDLIQSTIRTQFEDCTVLTIAHRLNTIMDYTRVIVLDKGEIQEYGAPSDLLQQRGLFYSMAKDAGLV

SEQ ID NO: 1453 - protein, 1563 aa, Artificial Sequence
  Synthetic polypeptide
TVCARDPGCVLLLRMQCLMIYHCLPSQLRWDHLVAGKQTQGSHRFYIMDWNVTWNTSNPDFTKCFQNTVLVWVPCFYLWACFPFYFLYLSRHDRGYIQMTPLNKTKTALGFLLWIVCWADLFYSFWERSRGIFLAPVFLVSPTLLGITMLLATFLIQLERRKGVQSSGIMLTFWLVALVCALAILRSKIMTALKEDAQVDLFRDITFYVYFSLLLIQLVLSCFSDRSPLFSETIHDPNPCPESSASFLSRITFWWITGLIVRGYRQPLEGSDLWSLNKEDTSEQVVPVLVKNWKKECAKTRKQPVKVVYSSKDPAQPKESSKVDANEEVEALIVKSPQKEWNPSLFKVLYKTFGPYFLMSFFFKAIHDLMMFSGPQILKLLIKFVNDTKAPDWQGYFYTVLLFVTACLQTLVLHQYFHICFVSGMRIKTAVIGAVYRKALVITNSARKSSTVGEIVNLMSVDAQRFMDLATYINMIWSAPLQVILALYLLWLNLGPSVLAGVAVMVLMVPVNAVMAMKTKTYQVAHMKSKDNRIKLMNEILNGIKVLKLYAWELAFKDKVLAIRQEELKVLKKSAYLSAVGTFTWVCTPFLVALCTFAVYVTIDENNILDAQTAFVSLALFNILRFPLNILPMVISSIVQASVSLKRLRIFLSHEELEPDSIERRPVKDGGGTNSITVRNATFTWARSDPPTLNGITFSIPEGALVAVVGQVGCGKSSLLSALLAEMDKVEGHVAIKGSVAYVPQQAWIQNDSLRENILFGCQLEEPYYRSVIQACALLPDLEILPSGDRTEIGEKGVNLSGGQKQRVSLARAVYSNADIYLFDDPLSAVDAHVGKHIFENVIGPKGMLKNKTRILVTHSMSYLPQVDVIIVMSGGKISEMGSYQELLARDGAFAEFLRTYASTEQEQDAEENGVTGVSGPGKEAKQMENGMLVTDSAGKQLQRQLSSSSSYSGDISRHHNSTAELQKAEAKKEETWKLMEADKAQTGQVKLSVYWDYMKAIGLFISFLSIFLFMCNHVSALASNYWLSLWTDDPIVNGTQEHTKVRLSVYGALGISQGIAVFGYSMAVSIGGILASRCLHVDLLHSILRSPMSFFERTPSGNLVNRFSKELDTVDSMIPEVIKMFMGSLFNVIGACIVILLATPIAAIIIPPLGLIYFFVQRFYVASSRQLKRLESVSRSPVYSHFNETLLGVSVIRAFEEQERFIHQSDLKVDENQKAYYPSIVANRWLAVRLECVGNCIVLFAALFAVISRHSLSAGLVGLSVSYSLQVTTYLNWLVRMSSEMETNIVAVERLKEYSETEKEAPWQIQETAPPSSWPQVGRVEFRNYCLRYREDLDFVLRHINVTINGGEKVGIVGRTGAGKSSLTLGLFRINESAEGEIIIDGINIAKIGLHDLRFKITIIPQDPVLFSGSLRMNLDPFSQYSDEEVWTSLELAHLKDFVSALPDKLDHECAEGGENLSVGQRQLVCLARALLRKTKILVLDEATAAVDLETDDLIQSTIRTQFEDCTVLTIAHRLNTIMDYTRVIVLDKGEIQEYGAPSDLLQQRGLFYSMAKDAGLV

SEQ ID NO: 1454 - protein, 1558 aa, Artificial Sequence
  Synthetic polypeptide
YWTQYLTLLCLSFTSEKGDDKNNYRMKGDNTHEDWNVTWNTSNPDFTKCFQNTVLVWVPCFYLWACFPFYFLYLSRHDRGYIQMTPLNKTKTALGFLLWIVCWADLFYSFWERSRGIFLAPVFLVSPTLLGITMLLATFLIQLERRKGVQSSGIMLTFWLVALVCALAILRSKIMTALKEDAQVDLFRDITFYVYFSLLLIQLVLSCFSDRSPLFSETIHDPNPCPESSASFLSRITFWWITGLIVRGYRQPLEGSDLWSLNKEDTSEQVVPVLVKNWKKECAKTRKQPVKVVYSSKDPAQPKESSKVDANEEVEALIVKSPQKEWNPSLFKVLYKTFGPYFLMSFFFKAIHDLMMFSGPQILKLLIKFVNDTKAPDWQGYFYTVLLFVTACLQTLVLHQYFHICFVSGMRIKTAVIGAVYRKALVITNSARKSSTVGEIVNLMSVDAQRFMDLATYINMIWSAPLQVILALYLLWLNLGPSVLAGVAVMVLMVPVNAVMAMKTKTYQVAHMKSKDNRIKLMNEILNGIKVLKLYAWELAFKDKVLAIRQEELKVLKKSAYLSAVGTFTWVCTPFLVALCTFAVYVTIDENNILDAQTAFVSLALFNILRFPLNILPMVISSIVQASVSLKRLRIFLSHEELEPDSIERRPVKDGGGTNSITVRNATFTWARSDPPTLNGITFSIPEGALVAVVGQVGCGKSSLLSALLAEMDKVEGHVAIKGSVAYVPQQAWIQNDSLRENILFGCQLEEPYYRSVIQACALLPDLEILPSGDRTEIGEKGVNLSGGQKQRVSLARAVYSNADIYLFDDPLSAVDAHVGKHIFENVIGPKGMLKNKTRILVTHSMSYLPQVDVIIVMSGGKISEMGSYQELLARDGAFAEFLRTYASTEQEQDAEENGSTVMDEEEAGVTGVSGPGKEAKQMENGMLVTDSAGKQLQRQLSSSSSYSGDISRHHNSTAELQKAEAKKEETWKLMEADKAQTGQVKLSVYWDYMKAIGLFISFLSIFLFMCNHVSALASNYWLSLWTDDPIVNGTQEHTKVRLSVYGALGISQGIAVFGYSMAVSIGGILASRCLHVDLLHSILRSPMSFFERTPSGNLVNRFSKELDTVDSMIPEVIKMFMGSLFNVIGACIVILLATPIAAIIIPPLGLIYFFVQRFYVASSRQLKRLESVSRSPVYSHFNETLLGVSVIRAFEEQERFIHQSDLKVDENQKAYYPSIVANRWLAVRLECVGNCIVLFAALFAVISRHSLSAGLVGLSVSYSLQVTTYLNWLVRMSSEMETNIVAVERLKEYSETEKEAPWQIQETAPPSSWPQVGRVEFRNYCLRYREDLDFVLRHINVTINGGEKVGIVGRTGAGKSSLTLGLFRINESAEGEIIIDGINIAKIGLHDLRFKITIIPQDPVLFSGSLRMNLDPFSQYSDEEVWTSLELAHLKDFVSALPDKLDHECAEGGENLSVGQRQLVCLARALLRKTKILVLDEATAAVDLETDDLIQSTIRTQFEDCTVLTIAHRLNTIMDYTRVIVLDKGEIQEYGAPSDLLQQRGLFYSMAKDAGLV

SEQ ID NO: 1455 - protein, 1548 aa, Artificial Sequence
  Synthetic polypeptide
YWTQYLTLLCLSFTSEKGDDKNNYRMKGDNTHEDWNVTWNTSNPDFTKCFQNTVLVWVPCFYLWACFPFYFLYLSRHDRGYIQMTPLNKTKTALGFLLWIVCWADLFYSFWERSRGIFLAPVFLVSPTLLGITMLLATFLIQLERRKGVQSSGIMLTFWLVALVCALAILRSKIMTALKEDAQVDLFRDITFYVYFSLLLIQLVLSCFSDRSPLFSETIHDPNPCPESSASFLSRITFWWITGLIVRGYRQPLEGSDLWSLNKEDTSEQVVPVLVKNWKKECAKTRKQPVKVVYSSKDPAQPKESSKVDANEEVEALIVKSPQKEWNPSLFKVLYKTFGPYFLMSFFFKAIHDLMMFSGPQILKLLIKFVNDTKAPDWQGYFYTVLLFVTACLQTLVLHQYFHICFVSGMRIKTAVIGAVYRKALVITNSARKSSTVGEIVNLMSVDAQRFMDLATYINMIWSAPLQVILALYLLWLNLGPSVLAGVAVMVLMVPVNAVMAMKTKTYQVAHMKSKDNRIKLMNEILNGIKVLKLYAWELAFKDKVLAIRQEELKVLKKSAYLSAVGTFTWVCTPFLVALCTFAVYVTIDENNILDAQTAFVSLALFNILRFPLNILPMVISSIVQASVSLKRLRIFLSHEELEPDSIERRPVKDGGGTNSITVRNATFTWARSDPPTLNGITFSIPEGALVAVVGQVGCGKSSLLSALLAEMDKVEGHVAIKGSVAYVPQQAWIQNDSLRENILFGCQLEEPYYRSVIQACALLPDLEILPSGDRTEIGEKGVNLSGGQKQRVSLARAVYSNADIYLFDDPLSAVDAHVGKHIFENVIGPKGMLKNKTRILVTHSMSYLPQVDVIIVMSGGKISEMGSYQELLARDGAFAEFLRTYASTEQEQDAEENGVTGVSGPGKEAKQMENGMLVTDSAGKQLQRQLSSSSSYSGDISRHHNSTAELQKAEAKKEETWKLMEADKAQTGQVKLSVYWDYMKAIGLFISFLSIFLFMCNHVSALASNYWLSLWTDDPIVNGTQEHTKVRLSVYGALGISQGIAVFGYSMAVSIGGILASRCLHVDLLHSILRSPMSFFERTPSGNLVNRFSKELDTVDSMIPEVIKMFMGSLFNVIGACIVILLATPIAAIIIPPLGLIYFFVQRFYVASSRQLKRLESVSRSPVYSHFNETLLGVSVIRAFEEQERFIHQSDLKVDENQKAYYPSIVANRWLAVRLECVGNCIVLFAALFAVISRHSLSAGLVGLSVSYSLQVTTYLNWLVRMSSEMETNIVAVERLKEYSETEKEAPWQIQETAPPSSWPQVGRVEFRNYCLRYREDLDFVLRHINVTINGGEKVGIVGRTGAGKSSLTLGLFRINESAEGEIIIDGINIAKIGLHDLRFKITIIPQDPVLFSGSLRMNLDPFSQYSDEEVWTSLELAHLKDFVSALPDKLDHECAEGGENLSVGQRQLVCLARALLRKTKILVLDEATAAVDLETDDLIQSTIRTQFEDCTVLTIAHRLNTIMDYTRVIVLDKGEIQEYGAPSDLLQQRGLFYSMAKDAGLV

SEQ ID NO: 1456 - protein, 1508 aa, Artificial Sequence
  Synthetic polypeptide
FVIVDGILEQKENISTSPAHKYYLAMDPVSESLYLSDTNTRKVYKLKSLVETKDLSKNFEVVAGTGDQCLPFDQSHCGDGGRASEASLNSPRGITVDRHGFIYFVDGTMIRKIDENAVITTVIGSNGLTSTQPLSCDSGMDITQVRLEWPTDLAVNPMDNSLYVLDNNIVLQISENRRVRIIAGRPIHCQVPGIDHFLVSKVAIHSTLESARAISVSHSGLLFIAETDERKVNRIQQVTTNGEIYIIAGAPTDCDCKIDPNCDCFSGDGGYAKDAKMKAPSSLAVSPDGTLYVADLGNVRIRTISRNQAHLNDMNIYEIASPADQELYQFTVNGTHLHTLNLITRDYVYNFTYNSEGDLGAITSSNGNSVHIRRDAGGMPLWLVVPGGQVYWLTISSNGVLKRVSAQGYNLALMTYPGNTGLLATKSNENGWTTVYEYDPEGHLTNATFPTGEVSSFHSDLEKLTKVELDTSNRENVLMSTNLTATSTIYILKQENTQSTYRVNPDGSLRVTFASGMEIGLSSEPHILAGAVNPTLGKCNISLPGEHNANLIEWRQRKEQNKGNVSAFERRLRAHNRNLLSIDFDHITRTGKIYDDHRKFTLRILYDQTGRPILWSPVSRYNEVNITYSPSGLVTFIQRGTWNEKMEYDQSGKIISRTWADGKIWSYTYLEKSVMLLLHSQRRYIFEYDQPDCLLSVTMPSMVRHSLQTMLSVGYYRNIYTPPDSSTSFIQDYSRDGRLLQTLHLGTGRRVLYKYTKQARLSEVLYDTTQVTLTYEESSGVIKTIHLMHDGFICTIRYRQTGPLIGRQIFRFSEEGLVNARFDYSYNNFRVTSMQAVINETPLPIDLYRYVDVSGRTEQFGKFSVINYDLNQVITTTVMKHTKIFSANGQVIEVQYEILKAIAYWMTIQYDNVGRMVICDIRVGVDANITRYFYEYDADGQLQTVSVNDKTQWRYSYDLNGNINLLSHGKSARLTPLRYDLRDRITRLGEIQYKMDEDGFLRQRGNDIFEYNSNGLLQKAYNKASGWTVQYYYDGLGRRVASKSSLGQHLQFFYADLTNPIRVTHLYNHTSSEITSLYYDLQGHLIAMELSSGEEYYVACDNTGTPLAVFSSRGQVIKEILYTPYGDIYHDTYPDFQVIIGFHGGLYDFLTKLVHLGQRDYDVVAGRWTTPNHHIWKQLNLLPKPFNLYSFENNYPVGKIQDVAKYTTDIRSWLELFGFQLHNVLPGFPKPELENLELTYELLRLQTKTQEWDPGKTILGIQCELQKQLRNFISLDQLPMTPRYNDGRCLEGGKQPRFAAVPSVFGKGIKFAIKDGIVTADIIGVANEDSRRLAAILNNAHYLENLHFTIEGRDTHYFIKLGSLEEDLVLIGNTGGRRILENGVNVTVSQMTSVLNGRTRRFADIQLQHGALCFNIRYGTTVEEEKNHVLEIARQRAVAQAWTKEQRRLQEGEEGIRAWTEGEKQQLLSTGRVQGYDGYFVLSVEQYLELSDSANNIHFMRQSEIGRR

SEQ ID NO: 1457 - protein, 1508 aa, Artificial Sequence; identical to SEQ ID NO: 1456
  Synthetic polypeptide

SEQ ID NO: 1458 - protein, 1507 aa, Artificial Sequence
  Synthetic polypeptide
TVCARDPGCVLLLRMQCLMIYHCLPSQLRWDHLVAGKQTQGSHRFYIMDWNVTWNTSNPDFTKCFQNTVLVWVPCFYLWACFPFYFLYLSRHDRGYIQMTPLNKTKTALGFLLWIVCWADLFYSFWERSRGIFLAPVFLVSPTLLGITMLLATFLIQLERRKGVQSSGIMLTFWLVALVCALAILRSKIMTALKEDAQVDLFRDITFYVYFSLLLIQLVLSCFSDRSPLFSETIHDPNPCPESSASFLSRITFWWITGLIVRGYRQPLEGSDLWSLNKEDTSEQVVPVLVKNWKKECAKTRKQPVKVVYSSKDPAQPKESSKVDANEEVEALIVKSPQKEWNPSLFKVLYKTFGPYFLMSFFFKAIHDLMMFSGPQILKLLIKFVNDTKAPDWQGYFYTVLLFVTACLQTLVLHQYFHICFVSGMRIKTAVIGAVYRKALVITNSARKSSTVGEIVNLMSVDAQRFMDLATYINMIWSAPLQVILALYLLWLNLGPSVLAGVAVMVLMVPVNAVMAMKTKTYQVAHMKSKDNRIKLMNEILNGIKVLKLYAWELAFKDKVLAIRQEELKVLKKSAYLSAVGTFTWVCTPFLVALCTFAVYVTIDENNILDAQTAFVSLALFNILRFPLNILPMVISSIVQASVSLKRLRIFLSHEELEPDSIERRPVKDGGGTNSITVRNATFTWARSDPPTLNGITFSIPEGALVAVVGQVGCGKSSLLSALLAEMDKVEGHVAIKGSVAYVPQQAWIQNDSLRENILFGCQLEEPYYRSVIQACALLPDLEILPSGDRTEIGEKTRILVTHSMSYLPQVDVIIVMSGGKISEMGSYQELLARDGAFAEFLRTYASTEQEQDAEENGVTGVSGPGKEAKQMENGMLVTDSAGKQLQRQLSSSSSYSGDISRHHNSTAELQKAEAKKEETWKLMEADKAQTGQVKLSVYWDYMKAIGLFISFLSIFLFMCNHVSALASNYWLSLWTDDPIVNGTQEHTKVRLSVYGALGISQGIAVFGYSMAVSIGGILASRCLHVDLLHSILRSPMSFFERTPSGNLVNRFSKELDTVDSMIPEVIKMFMGSLFNVIGACIVILLATPIAAIIIPPLGLIYFFVQRFYVASSRQLKRLESVSRSPVYSHFNETLLGVSVIRAFEEQERFIHQSDLKVDENQKAYYPSIVANRWLAVRLECVGNCIVLFAALFAVISRHSLSAGLVGLSVSYSLQVTTYLNWLVRMSSEMETNIVAVERLKEYSETEKEAPWQIQETAPPSSWPQVGRVEFRNYCLRYREDLDFVLRHINVTINGGEKVGIVGRTGAGKSSLTLGLFRINESAEGEIIIDGINIAKIGLHDLRFKITIIPQDPVLFSGSLRMNLDPFSQYSDEEVWTSLELAHLKDFVSALPDKLDHECAEGGENLSVGQRQLVCLARALLRKTKILVLDEATAAVDLETDDLIQSTIRTQFEDCTVLTIAHRLNTIMDYTRVIVLDKGEIQEYGAPSDLLQQRGLFYSMAKDAGLV

SEQ ID NO: 1459 - protein, 1504 aa, Artificial Sequence
  Synthetic polypeptide
TVCARDPGCVLLLRMQCLMIYHCLPSQLRWDHLVAGKQTQGSHRFYIMDWNVTWNTSNPDFTKCFQNTVLVWVPCFYLWACFPFYFLYLSRHDRGYIQMTPLNKTKTALGFLLWIVCWADLFYSFWERSRGIFLAPVFLVSPTLLGITMLLATFLIQLERRKGVQSSGIMLTFWLVALVCALAILRSKIMTALKEDAQVDLFRDITFYVYFSLLLIQLVLSCFSDRSPLFSETIHDPNPCPESSASFLSRITFWWITGLIVRGYRQPLEGSDLWSLNKEDTSEQVVPVLVKNWKKECAKTRKQPVKVVYSSKDPAQPKESSKVDANEEVEALIVKSPQKEWNPSLFKVLYKTFGPYFLMSFFFKAIHDLMMFSGPQILKLLIKFVNDTKAPDWQGYFYTVLLFVTACLQTLVLHQYFHICFVSGMRIKTAVIGAVYRKALVITNSARKSSTVGEIVNLMSVDAQRFMDLATYINMIWSAPLQVILALYLLWLNLGPSVLAGVAVMVLMVPVNAVMAMKTKTYQVAHMKSKDNRIKLMNEILNGIKVLKLYAWELAFKDKVLAIRQEELKVLKKSAYLSAVGTFTWVCTPFLVALCTFAVYVTIDENNILDAQTAFVSLALFNILRFPLNILPMVISSIVQASVSLKRLRIFLSHEELEPDSIERRPVKDGGGTNSITVRNATFTWARSDPPTLNGITFSIPEGALVAVVGQVGCGKSSLLSALLAEMDKVEGHVAIKGVNLSGGQKQRVSLARAVYSNADIYLFDDPLSAVDAHVGKHIFENVIGPKGMLKNKTRILVTHSMSYLPQVDVIIVMSGGKISEMGSYQELLARDGAFAEFLRTYASTEQEQDAEENGVTGVSGPGKEAKQMENGMLVTDSAGKQLQRQLSSSSSYSGDISRHHNSTAELQKAEAKKEETWKLMEADKAQTGQVKLSVYWDYMKAIGLFISFLSIFLFMCNHVSALASNYWLSLWTDDPIVNGTQEHTKVRLSVYGALGISQGIAVFGYSMAVSIGGILASRCLHVDLLHSILRSPMSFFERTPSGNLVNRFSKELDTVDSMIPEVIKMFMGSLFNVIGACIVILLATPIAAIIIPPLGLIYFFVQRFYVASSRQLKRLESVSRSPVYSHFNETLLGVSVIRAFEEQERFIHQSDLKVDENQKAYYPSIVANRWLAVRLECVGNCIVLFAALFAVISRHSLSAGLVGLSVSYSLQVTTYLNWLVRMSSEMETNIVAVERLKEYSETEKEAPWQIQETAPPSSWPQVGRVEFRNYCLRYREDLDFVLRHINVTINGGEKVGIVGRTGAGKSSLTLGLFRINESAEGEIIIDGINIAKIGLHDLRFKITIIPQDPVLFSGSLRMNLDPFSQYSDEEVWTSLELAHLKDFVSALPDKLDHECAEGGENLSVGQRQLVCLARALLRKTKILVLDEATAAVDLETDDLIQSTIRTQFEDCTVLTIAHRLNTIMDYTRVIVLDKGEIQEYGAPSDLLQQRGLFYSMAKDAGLV

SEQ ID NO: 1460 - protein, 1498 aa, Artificial Sequence
  Synthetic polypeptide
TVCARDPGCVLLLRMQCLMIYHCLPSQLRWDHLVAGKQTQGSHRFYIMDWNVTWNTSNPDFTKCFQNTVLVWVPCFYLWACFPFYFLYLSRHDRGYIQMTPLNKTKTALGFLLWIVCWADLFYSFWERSRGIFLAPVFLVSPTLLGITMLLATFLIQLERRKGVQSSGIMLTFWLVALVCALAILRSKIMTALKEDAQVDLFRDITFYVYFSLLLIQLVLSCFSDRSPLFSETIHDPNPCPESSASFLSRITFWWITGLIVRGYRQPLEGSDLWSLNKEDTSEQVVPVLVKNWKKECAKTRKQPVKVVYSSKDPAQPKESSKVDANEEVEALIVKSPQKEWNPSLFKVLYKTFGPYFLMSFFFKAIHDLMMFSGPQILKLLIKFVNDTKAPDWQGYFYTVLLFVTACLQTLVLHQYFHICFVSGMRIKTAVIGAVYRKALVITNSARKSSTVGEIVNLMSVDAQRFMDLATYINMIWSAPLQVILALYLLWLNLGPSVLAGVAVMVLMVPVNAVMAMKTKTYQVAHMKSKDNRIKLMNEILNGIKVLKLYAWELAFKDKVLAIRQEELKVLKKSAYLSAVGTFTWVCTPFLVALCTFAVYVTIDENNILDAQTAFVSLALFNILRFPLNILPMVISSIVQASVSLKRLRIFLSHEELEPDSIERRPVKDGGGTNSITVRNATFTWARSDPPTLNGITFSIPEGALVAVVGQVGCGKSSLLSALLAEMDKVEGHVAIKGSVAYVPQQAWIQNDSLRENILFGCQLEEPYYRSVIQACALLPDLEILPSGDRTEIGEKGVNLSGGQKQRVSLARAVYSNADIYLFDDPLSAVDAHVGKHIFENVIGPKGMLKNKTRILVTHSMSYLPQVDVIIVMSGGKISEMGSYQELLARDGAFAEFLRTYASTEQEQDAEENGVTGVSGPGKEAKQMENGMLVTDSAGKQLQRQLSSSSSYSGDISRHHNSTAELQKAEAKKEETWKLMEADKAQTGQVKLSVYWDYMKAIGLFISFLSIFLFMCNHVSALASNYWLSLWTDDPIVNGTQEHTKVRLSVYGALGISQGIAVFGYSMAVSIGGILASRCLHVDLLHSILRSPMSFFERTPSGNLVNRFSKELDTVDSMIPEVIKMFMGSLFNVIGACIVILLATPIAAIIIPPLGLIYFFVQRFYVASSRQLKRLESVSRSPVYSHFNETLLGVSVIRAFEEQERFIHQSDLKVDENQKAYYPSIVANRWLAVRLECVGNCIVLFAALFAVISRHSLSAGLVGLSVSYSLQVTTYLNWLVRMSSEMETNIVAVERLKEYSETEKEAPWQIQETAPPSSWPQVGRVEFRNYCLRYREDLDFVLRHINVTINGGEKVGIVGRTGAGKSSLTLGLFRINESAEGEIIIDGINIAKIGLHDLRFKITIIPQDPVLFSGSLRMNLDPFSQYSDEEVWTSLELAHLKDFVSALPDKLDHECAEGGENLRVIVLDKGEIQEYGAPSDLLQQRGLFYSMAKDAGLV

SEQ ID NO: 1461 - protein, 1492 aa, Artificial Sequence
  Synthetic polypeptide
YWTQYLTLLCLSFTSEKGDDKNNYRMKGDNTHEDWNVTWNTSNPDFTKCFQNTVLVWVPCFYLWACFPFYFLYLSRHDRGYIQMTPLNKTKTALGFLLWIVCWADLFYSFWERSRGIFLAPVFLVSPTLLGITMLLATFLIQLERRKGVQSSGIMLTFWLVALVCALAILRSKIMTALKEDAQVDLFRDITFYVYFSLLLIQLVLSCFSDRSPLFSETIHDPNPCPESSASFLSRITFWWITGLIVRGYRQPLEGSDLWSLNKEDTSEQVVPVLVKNWKKECAKTRKQPVKVVYSSKDPAQPKESSKVDANEEVEALIVKSPQKEWNPSLFKVLYKTFGPYFLMSFFFKAIHDLMMFSGPQILKLLIKFVNDTKAPDWQGYFYTVLLFVTACLQTLVLHQYFHICFVSGMRIKTAVIGAVYRKALVITNSARKSSTVGEIVNLMSVDAQRFMDLATYINMIWSAPLQVILALYLLWLNLGPSVLAGVAVMVLMVPVNAVMAMKTKTYQVAHMKSKDNRIKLMNEILNGIKVLKLYAWELAFKDKVLAIRQEELKVLKKSAYLSAVGTFTWVCTPFLVALCTFAVYVTIDENNILDAQTAFVSLALFNILRFPLNILPMVISSIVQASVSLKRLRIFLSHEELEPDSIERRPVKDGGGTNSITVRNATFTWARSDPPTLNGITFSIPEGALVAVVGQVGCGKSSLLSALLAEMDKVEGHVAIKGSVAYVPQQAWIQNDSLRENILFGCQLEEPYYRSVIQACALLPDLEILPSGDRTEIGEKTRILVTHSMSYLPQVDVIIVMSGGKISEMGSYQELLARDGAFAEFLRTYASTEQEQDAEENGVTGVSGPGKEAKQMENGMLVTDSAGKQLQRQLSSSSSYSGDISRHHNSTAELQKAEAKKEETWKLMEADKAQTGQVKLSVYWDYMKAIGLFISFLSIFLFMCNHVSALASNYWLSLWTDDPIVNGTQEHTKVRLSVYGALGISQGIAVFGYSMAVSIGGILASRCLHVDLLHSILRSPMSFFERTPSGNLVNRFSKELDTVDSMIPEVIKMFMGSLFNVIGACIVILLATPIAAIIIPPLGLIYFFVQRFYVASSRQLKRLESVSRSPVYSHFNETLLGVSVIRAFEEQERFIHQSDLKVDENQKAYYPSIVANRWLAVRLECVGNCIVLFAALFAVISRHSLSAGLVGLSVSYSLQVTTYLNWLVRMSSEMETNIVAVERLKEYSETEKEAPWQIQETAPPSSWPQVGRVEFRNYCLRYREDLDFVLRHINVTINGGEKVGIVGRTGAGKSSLTLGLFRINESAEGEIIIDGINIAKIGLHDLRFKITIIPQDPVLFSGSLRMNLDPFSQYSDEEVWTSLELAHLKDFVSALPDKLDHECAEGGENLSVGQRQLVCLARALLRKTKILVLDEATAAVDLETDDLIQSTIRTQFEDCTVLTIAHRLNTIMDYTRVIVLDKGEIQEYGAPSDLLQQRGLFYSMAKDAGLV

SEQ ID NO: 1462 - protein, 1489 aa, Artificial Sequence
  Synthetic polypeptide
YWTQYLTLLCLSFTSEKGDDKNNYRMKGDNTHEDWNVTWNTSNPDFTKCFQNTVLVWVPCFYLWACFPFYFLYLSRHDRGYIQMTPLNKTKTALGFLLWIVCWADLFYSFWERSRGIFLAPVFLVSPTLLGITMLLATFLIQLERRKGVQSSGIMLTFWLVALVCALAILRSKIMTALKEDAQVDLFRDITFYVYFSLLLIQLVLSCFSDRSPLFSETIHDPNPCPESSASFLSRITFWWITGLIVRGYRQPLEGSDLWSLNKEDTSEQVVPVLVKNWKKECAKTRKQPVKVVYSSKDPAQPKESSKVDANEEVEALIVKSPQKEWNPSLFKVLYKTFGPYFLMSFFFKAIHDLMMFSGPQILKLLIKFVNDTKAPDWQGYFYTVLLFVTACLQTLVLHQYFHICFVSGMRIKTAVIGAVYRKALVITNSARKSSTVGEIVNLMSVDAQRFMDLATYINMIWSAPLQVILALYLLWLNLGPSVLAGVAVMVLMVPVNAVMAMKTKTYQVAHMKSKDNRIKLMNEILNGIKVLKLYAWELAFKDKVLAIRQEELKVLKKSAYLSAVGTFTWVCTPFLVALCTFAVYVTIDENNILDAQTAFVSLALFNILRFPLNILPMVISSIVQASVSLKRLRIFLSHEELEPDSIERRPVKDGGGTNSITVRNATFTWARSDPPTLNGITFSIPEGALVAVVGQVGCGKSSLLSALLAEMDKVEGHVAIKGVNLSGGQKQRVSLARAVYSNADIYLFDDPLSAVDAHVGKHIFENVIGPKGMLKNKTRILVTHSMSYLPQVDVIIVMSGGKISEMGSYQELLARDGAFAEFLRTYASTEQEQDAEENGVTGVSGPGKEAKQMENGMLVTDSAGKQLQRQLSSSSSYSGDISRHHNSTAELQKAEAKKEETWKLMEADKAQTGQVKLSVYWDYMKAIGLFISFLSIFLFMCNHVSALASNYWLSLWTDDPIVNGTQEHTKVRLSVYGALGISQGIAVFGYSMAVSIGGILASRCLHVDLLHSILRSPMSFFERTPSGNLVNRFSKELDTVDSMIPEVIKMFMGSLFNVIGACIVILLATPIAAIIIPPLGLIYFFVQRFYVASSRQLKRLESVSRSPVYSHFNETLLGVSVIRAFEEQERFIHQSDLKVDENQKAYYPSIVANRWLAVRLECVGNCIVLFAALFAVISRHSLSAGLVGLSVSYSLQVTTYLNWLVRMSSEMETNIVAVERLKEYSETEKEAPWQIQETAPPSSWPQVGRVEFRNYCLRYREDLDFVLRHINVTINGGEKVGIVGRTGAGKSSLTLGLFRINESAEGEIIIDGINIAKIGLHDLRFKITIIPQDPVLFSGSLRMNLDPFSQYSDEEVWTSLELAHLKDFVSALPDKLDHECAEGGENLSVGQRQLVCLARALLRKTKILVLDEATAAVDLETDDLIQSTIRTQFEDCTVLTIAHRLNTIMDYTRVIVLDKGEIQEYGAPSDLLQQRGLFYSMAKDAGLV

SEQ ID NO: 1463 - protein, 1483 aa, Artificial Sequence
  Synthetic polypeptide
YWTQYLTLLCLSFTSEKGDDKNNYRMKGDNTHEDWNVTWNTSNPDFTKCFQNTVLVWVPCFYLWACFPFYFLYLSRHDRGYIQMTPLNKTKTALGFLLWIVCWADLFYSFWERSRGIFLAPVFLVSPTLLGITMLLATFLIQLERRKGVQSSGIMLTFWLVALVCALAILRSKIMTALKEDAQVDLFRDITFYVYFSLLLIQLVLSCFSDRSPLFSETIHDPNPCPESSASFLSRITFWWITGLIVRGYRQPLEGSDLWSLNKEDTSEQVVPVLVKNWKKECAKTRKQPVKVVYSSKDPAQPKESSKVDANEEVEALIVKSPQKEWNPSLFKVLYKTFGPYFLMSFFFKAIHDLMMFSGPQILKLLIKFVNDTKAPDWQGYFYTVLLFVTACLQTLVLHQYFHICFVSGMRIKTAVIGAVYRKALVITNSARKSSTVGEIVNLMSVDAQRFMDLATYINMIWSAPLQVILALYLLWLNLGPSVLAGVAVMVLMVPVNAVMAMKTKTYQVAHMKSKDNRIKLMNEILNGIKVLKLYAWELAFKDKVLAIRQEELKVLKKSAYLSAVGTFTWVCTPFLVALCTFAVYVTIDENNILDAQTAFVSLALFNILRFPLNILPMVISSIVQASVSLKRLRIFLSHEELEPDSIERRPVKDGGGTNSITVRNATFTWARSDPPTLNGITFSIPEGALVAVVGQVGCGKSSLLSALLAEMDKVEGHVAIKGSVAYVPQQAWIQNDSLRENILFGCQLEEPYYRSVIQACALLPDLEILPSGDRTEIGEKGVNLSGGQKQRVSLARAVYSNADIYLFDDPLSAVDAHVGKHIFENVIGPKGMLKNKTRILVTHSMSYLPQVDVIIVMSGGKISEMGSYQELLARDGAFAEFLRTYASTEQEQDAEENGVTGVSGPGKEAKQMENGMLVTDSAGKQLQRQLSSSSSYSGDISRHHNSTAELQKAEAKKEETWKLMEADKAQTGQVKLSVYWDYMKAIGLFISFLSIFLFMCNHVSALASNYWLSLWTDDPIVNGTQEHTKVRLSVYGALGISQGIAVFGYSMAVSIGGILASRCLHVDLLHSILRSPMSFFERTPSGNLVNRFSKELDTVDSMIPEVIKMFMGSLFNVIGACIVILLATPIAAIIIPPLGLIYFFVQRFYVASSRQLKRLESVSRSPVYSHFNETLLGVSVIRAFEEQERFIHQSDLKVDENQKAYYPSIVANRWLAVRLECVGNCIVLFAALFAVISRHSLSAGLVGLSVSYSLQVTTYLNWLVRMSSEMETNIVAVERLKEYSETEKEAPWQIQETAPPSSWPQVGRVEFRNYCLRYREDLDFVLRHINVTINGGEKVGIVGRTGAGKSSLTLGLFRINESAEGEIIIDGINIAKIGLHDLRFKITIIPQDPVLFSGSLRMNLDPFSQYSDEEVWTSLELAHLKDFVSALPDKLDHECAEGGENLRVIVLDKGEIQEYGAPSDLLQQRGLFYSMAKDAGLV

SEQ ID NO: 1464 - protein, 1453 aa, Artificial Sequence
  Synthetic polypeptide
AEERRGQLCFCSPLCCQHHFISRHETGGKLIFMAPGPIELRAHAILVSDGGELRIGSEDKPFQGRAQITLYGSSYSTPFFPYGVKFLAVRNGTLSLHGSLPEVIVTCLRATAHALDTVLALEDAVDWNPGDEVVIISGTGVKGAKPMEEIVTVETVQDTDLYLKSPLRYSHNFTENWVAGEHHILKATVALLSRSITIQGNLTNEREKLLVSCQEANAPEGNLQHCLYSMSEKMLGSRDMGARVIVQSFPEEPSQVQLKGVQFQVLGQAFHKHLSSLTLVGAMRESFIQGCTVRNSFSRGLSMCGTLGLKVDSNVFYNILGHALLVGTCTEMRYISWEAIHGRKDDWSGHGNIIRNNVIIQVSGAEGLSNPEMLTPSGIYICSPTNVIEGNRVCGAGYGYFFHLMTNQTSQAPLLSFTQNIAHSCTRYGLFVYPKFQPPWDNVTGTTLFQSFTVWESAGGAQIFRSSNLRLKNFKVYSCRDFGIDVLESDANTSVTDSLLLGHFAHKGSLCMSSGIKTPKRWELMVSNTTFVNFDLINCVAIRTCSDCSQGQGGFTVKTSQLKFTNSSNLVAFPFPHAAILEDLDGSLSGKNRSHILASMETLSASCLVNSSFGRVVHGSACGGGVLFHRMSIGLANTPEVSYDLTMTDSRNKTTTVNYVRDTLSNPRGWMALLLDQETYSLQSENLWINRSLQYSATFDNFAPGNYLLLVHTDLPPYPDILLRCGSRVGLSFPFLPSPGQNQGCDWFFNSQLRQLTYLVSGEGQVQVILRVKEGMPPTISASTSAPESALKWSLPETWQGVEEGWGGYNNTIPGPGDDVLILPNRTVLVDTDLPFFKGLYVMGTLDFPVDRSNVLSVACMVIAGGELKVGTLENPLEKEQKLLILLRASEGVFCDRMNGIHIDPGTIGVYGKVHLYSAYPKNSWTHLGADIASGNERIIVEDAVDWRPHDKIVLSSSSYEPHEAEVLTVKEVKGHHVRIYERLKHRHIGSVHVTEDGRHIRLAAEVGLLTRNIQIQPDVSCRGRLFVGSFRKSSREEFSGVLQLLNVEIQNFGSPLYSSVEFSNVSAGSWIISSTLHQSCGGGIHAAASHGVLLNDNIVFGTAGHGIDLEGQAYTVTNNLVVLMTQPAWSTIWVAGIKVNQVKDINLHGNVVAGSERLGFHIRGHKCSSCELLWSDNVAHSSLHGLHLYKESGLDNCTRISGFLAFKNFDYGAMLHVENSVEIENITLVDNTIGLLAVVYVFSAPQNSVKKVQIVLRNSVIVATSSSFDCIQDKVKPHSANLTSTDRAPSNPRGGRIGILWPVFTSEPNQWPQEPWHKVRNDHSISGIMKLQDVTFSSFVKSCYSDDLDVCILPNAENSGIMHPITAERTRMLKIKDKNKFYFPSLQPRKDLGKVVCPELDCASPRKYLFKDLDGRALGLPPPVSVFPKTEAEWTASFFNAVTTEQALKISE

SEQ ID NO: 1465 - protein, 1448 aa, Artificial Sequence
  Synthetic polypeptide
TVCARDPGCVLLLRMQCLMIYHCLPSQLRWDHLVAGKQTQGSHRFYIMDWNVTWNTSNPDFTKCFQNTVLVWVPCFYLWACFPFYFLYLSRHDRGYIQMTPLNKTKTALGFLLWIVCWADLFYSFWERSRGIFLAPVFLVSPTLLGITMLLATFLIQLERRKGVQSSGIMLTFWLVALVCALAILRSKIMTALKEDAQVDLFRDITFYVYFSLLLIQLVLSCFSDRSPLFSETIHDPNPCPESSASFLSRITFWWITGLIVRGYRQPLEGSDLWSLNKEDTSEQVVPVLVKNWKKECAKTRKQPVKVVYSSKDPAQPKESSKVDANEEVEALIVKSPQKEWNPSLFKVLYKTFGPYFLMSFFFKAIHDLMMFSGPQILKLLIKFVNDTKAPDWQGYFYTVLLFVTACLQTLVLHQYFHICFVSGMRIKTAVIGAVYRKALVITNSARKSSTVGEIVNLMSVDAQRFMDLATYINMIWSAPLQVILALYLLWLNLGPSVLAGVAVMVLMVPVNAVMAMKTKTYQVAHMKSKDNRIKLMNEILNGIKVLKLYAWELAFKDKVLAIRQEELKVLKKSAYLSAVGTFTWVCTPFLVALCTFAVYVTIDENNILDAQTAFVSLALFNILRFPLNILPMVISSIVQASVSLKRLRIFLSHEELEPDSIERRPVKDGGGTNSITVRNATFTWARSDPPTLNGITFSIPEGALVAVVGQVGCGKSSLLSALLAEMDKVEGHVAIKTRILVTHSMSYLPQVDVIIVMSGGKISEMGSYQELLARDGAFAEFLRTYASTEQEQDAEENGVTGVSGPGKEAKQMENGMLVTDSAGKQLQRQLSSSSSYSGDISRHHNSTAELQKAEAKKEETWKLMEADKAQTGQVKLSVYWDYMKAIGLFISFLSIFLFMCNHVSALASNYWLSLWTDDPIVNGTQEHTKVRLSVYGALGISQGIAVFGYSMAVSIGGILASRCLHVDLLHSILRSPMSFFERTPSGNLVNRFSKELDTVDSMIPEVIKMFMGSLFNVIGACIVILLATPIAAIIIPPLGLIYFFVQRFYVASSRQLKRLESVSRSPVYSHFNETLLGVSVIRAFEEQERFIHQSDLKVDENQKAYYPSIVANRWLAVRLECVGNCIVLFAALFAVISRHSLSAGLVGLSVSYSLQVTTYLNWLVRMSSEMETNIVAVERLKEYSETEKEAPWQIQETAPPSSWPQVGRVEFRNYCLRYREDLDFVLRHINVTINGGEKVGIVGRTGAGKSSLTLGLFRINESAEGEIIIDGINIAKIGLHDLRFKITIIPQDPVLFSGSLRMNLDPFSQYSDEEVWTSLELAHLKDFVSALPDKLDHECAEGGENLSVGQRQLVCLARALLRKTKILVLDEATAAVDLETDDLIQSTIRTQFEDCTVLTIAHRLNTIMDYTRVIVLDKGEIQEYGAPSDLLQQRGLFYSMAKDAGLV

SEQ ID NO: 1466 - protein, 1441 aa, Artificial Sequence
  Synthetic polypeptide
VAPLLVGFLGMQASSPEACWGSKWGIYQVQLRALEHVDGTHVCQLPEDQKGNIHLKPSFSDGLKMDAGIICDVCTCELQKEVRSARCSFNGDFVCGQCVCSEGWSGQTCNCSTGSLSDIQPCLREGEDKPCSGRGECQCGHCVCYGEGRYEGQFCEYDNFQCPRTSGFLCNDRGRCSMGQCVCEPGWTGPSCDCPLSNATCIDSNGGICNGRGHCECGRCHCHQQSLYTDTICEINYSAIHPGLCEDLRSCVQCQAWGTGEKKGRTCEECNFKVKMVDELKRAEEVVVRCSFRDEDDDCTYSYTMEGDGAPGPNSTVLVHKKKDCPPGSFWWLIPLLLLLLPLLALLLLLCWKYCACCKACLALLPCCNRGHMVGFKEDHYMLRENLMASDHLDTPMLRSGNLKGRDVVRWKVTNNMQRPGFATHAASINPTELVPYGLSLRLARLCTENLLKPDTRECAQLRQEVEENLNEVYRQISGVHKLQQTKFRQQPNAGKKQDHTIVDTVLMAPRSAKPALLKLTEKQVEQRAFHDLKVAPGYYTLTADQDARGMVEFQEGVELVDVRVPLFIRPEDDDEKQLLVEAIDVPAGTATLGRRLVNITIIKEQARDVVSFEQPEFSVSRGDQVARIPVIRRVLDGGKSQVSYRTQDGTAQGNRDYIPVEGELLFQPGEAWKELQVKLLELQEVDSLLRGRQVRRFHVQLSNPKFGAHLGQPHSTTIIIRDPDELDRSFTSQMLSSQPPPHGDLGAPQNPNAKAAGSRKIHFNWLPPSGKPMGYRVKYWIQGDSESEAHLLDSKVPSVELTNLYPYCDYEMKVCAYGAQGEGPYSSLVSCRTHQEVPSEPGRLAFNVVSSTVTQLSWAEPAETNGEITAYEVCYGLVNDDNRPIGPMKKVLVDNPKNRMLLIENLRESQPYRYTVKARNGAGWGPEREAIINLATQPKRPMSIPIIPDIPIVDAQSGEDYDSFLMYSDDVLRSPSGSQRPSVSDDTGCGWKFEPLLGEELDLRRVTWRLPPELIPRLSASSGRSSDAEAPHGPPDDGGAGGKGGSLPRSATPGPPGEHLVNGRMDFAFPGSTNSLHRMTTTSAAAYGTHLSPHVPHRVLSTSSTLTRDYNSLTRSEHSHSTTLPRDYSTLTSVSSHDSRLTAGVPDTPTRLVFSALGPTSLRVSWQEPRCERPLQGYSVEYQLLNGGELHRLNIPNPAQTSVVVEDLLPNHSYVFRVRAQSQEGWGREREGVITIESQVHPQSPLCPLPGSAFTLSTPSAPGPLVFTALSPDSLQLSWERPRRPNGDIVGYLVTCEMAQGGGPATAFRVDGDSPESRLTVPGLSENVPYKFKVQARTTEGFGPEREGIITIESQDGGPFPQLGSRAGLFQHPLQSEYSSITTTHTSATEPFLVDGLTLGAQHLEAGGSLTRHVTQEFVSRTLTTSGTLSTHMDQQFFQT

SEQ ID NO: 1467 - protein, 1435 aa, Artificial Sequence
  Synthetic polypeptide
DHPGQHDWANGYYRQQRKLVEEIGWSYTGALNQKNWGKKYPTCNSPKQSPINIDEDLTQVNVNLKKLKFQGWDKTSLENTFIHNTGKTVEINLTNDYRVSGGVSEMVFKASKITFHWGKCNMSSDGSEHSLEGQKFPLEMQIYCFDADRFSSFEEAVKGKGKLRALSILFEVGTEENLDFKAIIDGVESVSRFGKQAALDPFILLNLLPNSTDKYYIYNGSLTSPPCTDTVDWIVFKDTVSISESQLAVFCEVLTMQQSGYVMLMDYLQNNFREQQYKFSRQVFSSYTGKEEIHEAVCSSEPENVQADPENYTSLLVTWERPRVVYDTMIEKFAVLYQQLDGEDQTKHEFLTDGYQDLGAILNNLLPNMSYVLQIVAICTNGLYGKYSDQLIVDMPTDNPELDLFPELIGTEEIIKEEEEGKDIEEGAIVNPGRDSATNQIRKKEPQISTTTHYNRIGTKYNEAKTNRSPTRGSEFSGKGDVPNTSLNSTSQPVTKLATEKDISLTSQTVTELPPHTVEGTSASLNDGSKTVLRSPHMNLSGTAESLNTVSITEYEEESLLTSFKLDTGAEDSSGSSPATSAIPFISENISQGYIFSSENPETITYDVLIPESARNASEDSTSSGSEESLKDPSMEGNVWFPSSTDITAQPDVGSGRESFLQTNYTEIRVDESEKTTKSFSAGPVMSQGPSVTDLEMPHYSTFAYFPTEVTPHAFTPSSRQQDLVSTVNVVYSQTTQPVYNEASNSSHESRIGLAEGLESEKKAVIPLVIVSALTFICLVVLVGILIYWRKCFQTAHFYLEDSTSPRVISTPPTPIFPISDDVGAIPIKHFPKHVADLHASSGFTEEFEEVQSCTVDLGITADSSNHPDNKHKNRYINIVAYDHSRVKLAQLAEKDGKLTDYINANYVDGYNRPKAYIAAQGPLKSTAEDFWRMIWEHNVEVIVMITNLVEKGRRKCDQYWPADGSEEYGNFLVTQKSVQVLAYYTVRNFTLRNTKIKKGSQKGRPSGRVVTQYHYTQWPDMGVPEYSLPVLTFVRKAAYAKRHAVGPVVVHCSAGVGRTGTYIVLDSMLQQIQHEGTVNIFGFLKHIRSQRNYLVQTEEQYVFIHDTLVEAILSKETEVLDSHIHAYVNALLIPGPAGKTKLEKQFQLLSQSNIQQSDYSAALKQCNREKNRTSSIIPVERSRVGISSLSGEGTDYINASYIMGYYQSNEFIITQHPLLHTIKDFWRMIWDHNAQLVVMIPDGQNMAEDEFVYWPNKDEPINCESFKVTLMAEEHKCLSNEEKLIIQDFILEATQDDYVLEVRHFQCPKWPNPDSPISKTFELISVIKEEAANRDGPMIVHDEHGGVTAGTFCALTTLMHQLEKENSVDVYQVAKMINLMRPGVFADIEQYQFLYKVILSLVSTRQEENPSTSLDSNGAALPDGNIAESLESLV

SEQ ID NO: 1468 - protein, 1433 aa, Artificial Sequence
  Synthetic polypeptide
YWTQYLTLLCLSFTSEKGDDKNNYRMKGDNTHEDWNVTWNTSNPDFTKCFQNTVLVWVPCFYLWACFPFYFLYLSRHDRGYIQMTPLNKTKTALGFLLWIVCWADLFYSFWERSRGIFLAPVFLVSPTLLGITMLLATFLIQLERRKGVQSSGIMLTFWLVALVCALAILRSKIMTALKEDAQVDLFRDITFYVYFSLLLIQLVLSCFSDRSPLFSETIHDPNPCPESSASFLSRITFWWITGLIVRGYRQPLEGSDLWSLNKEDTSEQVVPVLVKNWKKECAKTRKQPVKVVYSSKDPAQPKESSKVDANEEVEALIVKSPQKEWNPSLFKVLYKTFGPYFLMSFFFKAIHDLMMFSGPQILKLLIKFVNDTKAPDWQGYFYTVLLFVTACLQTLVLHQYFHICFVSGMRIKTAVIGAVYRKALVITNSARKSSTVGEIVNLMSVDAQRFMDLATYINMIWSAPLQVILALYLLWLNLGPSVLAGVAVMVLMVPVNAVMAMKTKTYQVAHMKSKDNRIKLMNEILNGIKVLKLYAWELAFKDKVLAIRQEELKVLKKSAYLSAVGTFTWVCTPFLVALCTFAVYVTIDENNILDAQTAFVSLALFNILRFPLNILPMVISSIVQASVSLKRLRIFLSHEELEPDSIERRPVKDGGGTNSITVRNATFTWARSDPPTLNGITFSIPEGALVAVVGQVGCGKSSLLSALLAEMDKVEGHVAIKTRILVTHSMSYLPQVDVIIVMSGGKISEMGSYQELLARDGAFAEFLRTYASTEQEQDAEENGVTGVSGPGKEAKQMENGMLVTDSAGKQLQRQLSSSSSYSGDISRHHNSTAELQKAEAKKEETWKLMEADKAQTGQVKLSVYWDYMKAIGLFISFLSIFLFMCNHVSALASNYWLSLWTDDPIVNGTQEHTKVRLSVYGALGISQGIAVFGYSMAVSIGGILASRCLHVDLLHSILRSPMSFFERTPSGNLVNRFSKELDTVDSMIPEVIKMFMGSLFNVIGACIVILLATPIAAIIIPPLGLIYFFVQRFYVASSRQLKRLESVSRSPVYSHFNETLLGVSVIRAFEEQERFIHQSDLKVDENQKAYYPSIVANRWLAVRLECVGNCIVLFAALFAVISRHSLSAGLVGLSVSYSLQVTTYLNWLVRMSSEMETNIVAVERLKEYSETEKEAPWQIQETAPPSSWPQVGRVEFRNYCLRYREDLDFVLRHINVTINGGEKVGIVGRTGAGKSSLTLGLFRINESAEGEIIIDGINIAKIGLHDLRFKITIIPQDPVLFSGSLRMNLDPFSQYSDEEVWTSLELAHLKDFVSALPDKLDHECAEGGENLSVGQRQLVCLARALLRKTKILVLDEATAAVDLETDDLIQSTIRTQFEDCTVLTIAHRLNTIMDYTRVIVLDKGEIQEYGAPSDLLQQRGLFYSMAKDAGLV

SEQ ID NO: 1469 - protein, 1424 aa, Artificial Sequence
  Synthetic polypeptide
VAPLLVGFLGMQASSPEACWGSKWGIYQVQLRALEHVDGTHVCQLPEDQKGNIHLKPSFSDGLKMDAGIICDVCTCELQKEVRSARCSFNGDFVCGQCVCSEGWSGQTCNCSTGSLSDIQPCLREGEDKPCSGRGECQCGHCVCYGEGRYEGQFCEYDNFQCPRTSGFLCNDRGRCSMGQCVCEPGWTGPSCDCPLSNATCIDSNGGICNGRGHCECGRCHCHQQSLYTDTICEINYSAIHPGLCEDLRSCVQCQAWGTGEKKGRTCEECNFKVKMVDELKRAEEVVVRCSFRDEDDDCTYSYTMEGDGAPGPNSTVLVHKKKDCPPGSFWWLIPLLLLLLPLLALLLLLCWKYCACCKACLALLPCCNRGHMVGFKEDHYMLRENLMASDHLDTPMLRSGNLKGRDVVRWKVTNNMQRPGFATHAASINPTELVPYGLSLRLARLCTENLLKPDTRECAQLRQEVEENLNEVYRQISGVHKLQQTKFRQQPNAGKKQDHTIVDTVLMAPRSAKPALLKLTEKQVEQRAFHDLKVAPGYYTLTADQDARGMVEFQEGVELVDVRVPLFIRPEDDDEKQLLVEAIDVPAGTATLGRRLVNITIIKEQARDVVSFEQPEFSVSRGDQVARIPVIRRVLDGGKSQVSYRTQDGTAQGNRDYIPVEGELLFQPGEAWKELQVKLLELQEVDSLLRGRQVRRFHVQLSNPKFGAHLGQPHSTTIIIRDPDELDRSFTSQMLSSQPPPHGDLGAPQNPNAKAAGSRKIHFNWLPPSGKPMGYRVKYWIQGDSESEAHLLDSKVPSVELTNLYPYCDYEMKVCAYGAQGEGPYSSLVSCRTHQEVPSEPGRLAFNVVSSTVTQLSWAEPAETNGEITAYEVCYGLVNDDNRPIGPMKKVLVDNPKNRMLLIENLRESQPYRYTVKARNGAGWGPEREAIINLATQPKRPMSIPIIPDIPIVDAQSGEDYDSFLMYSDDVLRSPSGSQRPSVSDDTEHLVNGRMDFAFPGSTNSLHRMTTTSAAAYGTHLSPHVPHRVLSTSSTLTRDYNSLTRSEHSHSTTLPRDYSTLTSVSSHGLPPIWEHGRSRLPLSWALGSRSRAQMKGFPPSRGPRDSIILAGRPAAPSWGPDSRLTAGVPDTPTRLVFSALGPTSLRVSWQEPRCERPLQGYSVEYQLLNGGELHRLNIPNPAQTSVVVEDLLPNHSYVFRVRAQSQEGWGREREGVITIESQVHPQSPLCPLPGSAFTLSTPSAPGPLVFTALSPDSLQLSWERPRRPNGDIVGYLVTCEMAQGGGPATAFRVDGDSPESRLTVPGLSENVPYKFKVQARTTEGFGPEREGIITIESQDGGPFPQLGSRAGLFQHPLQSEYSSITTTHTSATEPFLVDGLTLGAQHLEAGGSLTRHVTQEFVSRTLTTSGTLSTHMDQQFFQT

SEQ ID NO: 1470 - protein, 1424 aa, Artificial Sequence; identical to SEQ ID NO: 1469
  Synthetic polypeptide

SEQ ID NO: 1471 - protein, 1418 aa, Artificial Sequence
  Synthetic polypeptide
GTSRLWSTLQMGALNQKNWGKKYPTCNSPKQSPINIDEDLTQVNVNLKKLKFQGWDKTSLENTFIHNTGKTVEINLTNDYRVSGGVSEMVFKASKITFHWGKCNMSSDGSEHSLEGQKFPLEMQIYCFDADRFSSFEEAVKGKGKLRALSILFEVGTEENLDFKAIIDGVESVSRFGKQAALDPFILLNLLPNSTDKYYIYNGSLTSPPCTDTVDWIVFKDTVSISESQLAVFCEVLTMQQSGYVMLMDYLQNNFREQQYKFSRQVFSSYTGKEEIHEAVCSSEPENVQADPENYTSLLVTWERPRVVYDTMIEKFAVLYQQLDGEDQTKHEFLTDGYQDLGAILNNLLPNMSYVLQIVAICTNGLYGKYSDQLIVDMPTDNPELDLFPELIGTEEIIKEEEEGKDIEEGAIVNPGRDSATNQIRKKEPQISTTTHYNRIGTKYNEAKTNRSPTRGSEFSGKGDVPNTSLNSTSQPVTKLATEKDISLTSQTVTELPPHTVEGTSASLNDGSKTVLRSPHMNLSGTAESLNTVSITEYEEESLLTSFKLDTGAEDSSGSSPATSAIPFISENISQGYIFSSENPETITYDVLIPESARNASEDSTSSGSEESLKDPSMEGNVWFPSSTDITAQPDVGSGRESFLQTNYTEIRVDESEKTTKSFSAGPVMSQGPSVTDLEMPHYSTFAYFPTEVTPHAFTPSSRQQDLVSTVNVVYSQTTQPVYNEASNSSHESRIGLAEGLESEKKAVIPLVIVSALTFICLVVLVGILIYWRKCFQTAHFYLEDSTSPRVISTPPTPIFPISDDVGAIPIKHFPKHVADLHASSGFTEEFEEVQSCTVDLGITADSSNHPDNKHKNRYINIVAYDHSRVKLAQLAEKDGKLTDYINANYVDGYNRPKAYIAAQGPLKSTAEDFWRMIWEHNVEVIVMITNLVEKGRRKCDQYWPADGSEEYGNFLVTQKSVQVLAYYTVRNFTLRNTKIKKGSQKGRPSGRVVTQYHYTQWPDMGVPEYSLPVLTFVRKAAYAKRHAVGPVVVHCSAGVGRTGTYIVLDSMLQQIQHEGTVNIFGFLKHIRSQRNYLVQTEEQYVFIHDTLVEAILSKETEVLDSHIHAYVNALLIPGPAGKTKLEKQFQLLSQSNIQQSDYSAALKQCNREKNRTSSIIPVERSRVGISSLSGEGTDYINASYIMGYYQSNEFIITQHPLLHTIKDFWRMIWDHNAQLVVMIPDGQNMAEDEFVYWPNKDEPINCESFKVTLMAEEHKCLSNEEKLIIQDFILEATQDDYVLEVRHFQCPKWPNPDSPISKTFELISVIKEEAANRDGPMIVHDEHGGVTAGTFCALTTLMHQLEKENSVDVYQVAKMINLMRPGVFADIEQYQFLYKVILSLVSTRQEENPSTSLDSNGAALPDGNIAESLESLV

SEQ ID NO: 1472 - protein, 1405 aa, Artificial Sequence
  Synthetic polypeptide
GCPLSLLLFNILMEVQAKAIRCCCGQFTNQHIPPLPSATPSKNEEESKQVETQPEKWSVAKHTQSYPTDSYGVLEFQGGGYSNKAMYIRVSYDTKPDSLLHLMVKDWQLELPKLLISVHGGLQNFEMQPKLKQVFGKGLIKAAMTTGAWIFTGGVSTGVISHVGDALKDHSSKSRGRVCAIGIAPWGIVENKEDLVGKDVTRVYQTMSNPLSKLSVLNNSHTHFILADNGTLGKYGAEVKLRRLLEKHISLQKINTRLGQGVPLVGLVVEGGPNVVSIVLEYLQEEPPIPVVICDGSGRASDILSFAHKYCEEGGIINESLREQLLVTIQKTFNYNKAQSHQLFAIIMECMKKKELVTVFRMGSEGQQDIEMAILTALLKGTNVSAPDQLSLALAWNRVDIARSQIFVFGPHWPPLGSLAPPTDSKATEKEKKPPMATTKGGRGKGKGKKKGKVKEEVEEETDPRKIELLNWVNALEQAMLDALVLDRVDFVKLLIENGVNMQHFLTIPRLEELYNTRLGPPNTLHLLVRDVKKSNLPPDYHISLIDIGLVLEYLMGGAYRCNYTRKNFRTLYNNLFGPKRPKALKLLGMEDDEPPAKGKKKKKKKKEEEIDIDVDDPAVSRFQYPFHELMVWAVLMKRQKMAVFLWQRGEESMAKALVACKLYKAMAHESSESDLVDDISQDLDNNSKDFGQLALELLDQSYKHDEQIAMKLLTYELKNWSNSTCLKLAVAAKHRDFIAHTCSQMLLTDMWMGRLRMRKNPGLKVIMGILLPPTILFLEFRTYDDFSYQTSKENEDGKEKEEENTDANADAGSRKGDEENEHKKQRSIPIGTKICEFYNAPIVKFWFYTISYLGYLLLFNYVILVRMDGWPSLQEWIVISYIVSLALEKIREILMSEPGKLSQKIKVWLQEYWNITDLVAISTFMIGAILRLQNQPYMGYGRVIYCVDIIFWYIRVLDIFGVNKYLGPYVMMIGKMMIDMLYFVVIMLVVLMSFGVARQAILHPEEKPSWKLARNIFYMPYWMIYGEVFADQIDLYAMEINPPCGENLYDEEGKRLPPCIPGAWLTPALMACYLLVANILLVNLLIAVFNNTFFEVKSISNQVWKFQRYQLIMTFHDRPVLPPPMIILSHIYIIIMRLSGRCRKKREGDQEERDRGLKLFLSDEELKRLHEFEEQCVQEHFREKEDEQQSSSDERIRVTSERVENMSMRLEEINERETFMKTSLQTVDLRLAQLEELSNRMVNALENLAGIDRSDLIQARSRASSECEATYLLRQSSINSADGYSLYRYHFNGEELLFEDTSLSTSPGTGVRKKTCSFRIKEEKDVKTHLVPECQNSLHLSLGTSTSATPDGSHLAVDDLKNAEESKLGPDIGISKEDDERQTDSKKEETISPSLNKTDVIHGQ

SEQ ID NO: 1473 - protein, 1404 aa, Artificial Sequence
  Synthetic polypeptide
ICIGSSIVTKLECQDALETAARAEGLSLDASMHSQLRILDEEHPKGKYHHGLSALKPIRTTSKHQHPVDNAGLFSCMTFSWLSSLARVAHKKGELSMEDVWSLSKHESSDVNCRRLERLWQEELNEVGPDAASLRRVVWIFCRTRLILSIVCLMITQLAGFSGPAFMVKHLLEYTQATESNLQYSLLLVLGLLLTEIVRSWSLALTWALNYRTGVRLRGAILTMAFKKILKLKNIKEKSLGELINICSNDGQRMFEAAAVGSLLAGGPVVAILGMIYNVIILGPTGFLGSAVFILFYPAMMFASRLTAYFRRKCVAATDERVQKMNEVLTYIKFIKMYAWVKAFSQSVQKIREEERRILEKAGYFQSITVGVAPIVVVIASVVTFSVHMTLGFDLTAAQAFTVVTVFNSMTFALKVTPFSVKSLSEASVAVDRFKSLFLMEEVHMIKNKPASPHIKIEMKNATLAWDSSHSSIQNSPKLTPKMKKDKRASRGKKEKVRQLQRTEHQAVLAEQKGHLLLDSDERPSPEEEEGKHIHLGHLRLQRTLHSIDLEIQEGKLVGICGSVGSGKTSLISAILGQMTLLEGSIAISGTFAYVAQQAWILNATLRDNILFGKEYDEERYNSVLNSCCLRPDLAILPSSDLTEIGERGANLSGGQRQRISLARALYSDRSIYILDDPLSALDAHVGNHIFNSAIRKHLKSKTVLFVTHQLQYLVDCDEVIFMKEGCITERGTHEELMNLNGDYATIFNNLLLGETPPVEINSKKETSGSQKKSQDKGPKTGSVKKEKAVKPEEGQLVQLEEKGQGSVPWSVYGVYIQAAGGPLAFLVIMALFMLNVGSTAFSTWWLSYWIKQGSGNTTVTRGNETSVSDSMKDNPHMQYYASIYALSMAVMLILKAIRGVVFVKGTLRASSRLHDELFRRILRSPMKFFDTTPTGRILNRFSKDMDEVDVRLPFQAEMFIQNVILVFFCVGMIAGVFPWFLVAVGPLVILFSVLHIVSRVLIRELKRLDNITQSPFLSHITSSIQGLATIHAYNKGQEFLHRYQELLDDNQAPFFLFTCAMRWLAVRLDLISIALITTTGLMIVLMHGQIPPAYAGLAISYAVQLTGLFQFTVRLASETEARFTSVERINHYIKTLSLEAPARIKNKAPSPDWPQEGEVTFENAEMRYRENLPLVLKKVSFTIKPKEKIGIVGRTGSGKSSLGMALFRLVELSGGCIKIDGVRISDIGLADLRSKLSIIPQEPVLFSGTVRSNLDPFNQYTEDQIWDALERTHMKECIAQLPLKLESEVMENGDNFSVGERQLLCIARALLRHCKILILDEATAAMDTETDLLIQETIREAFADCTMLTIAHRLHTVLGSDRIMVLAQGQVVEFDTPSVLLSNDSSRFYAMFAAAENKVAVKG

SEQ ID NO: 1474 - protein, 1372 aa, Artificial Sequence
  Synthetic polypeptide
KKKKKKGATTFQEYQKTGELSTSDHIFPLTPGLVYSIPFDHIVLHSGQRPPELPKSTEIHEQKRHCNTTRHSKPTDKPTGNSKTIDHKSSTDNHEAPPTSEENSSNQGKDPMIRNQRSVDPADSTTTHKESAGKKHITPAPKSKINCRKSTTGKSTVTRKSDKTGRPLEKSMSTLDKTSTSSHKTTTSFHNSGNSQTKQKSTSFPEKITAASKTTYKTTGTPEESEKTEDSRTTVASDKLLTKTTKNIQETISANELTQSLAEPTEHGGRTANENNTPSPAEPTENRERTANENTTLSPAEPIENRERTANENTAPFPAGPTENREMTANENTTLFPAEPTEHGERTANENTTPSPAEPTEHGERTANENTTPSPAEPTEHGERTPFANDKTTSSSAESTEHGERTPLANENTTPSPAEPTENRERTANENTTPSPAGPTENRETTANEKTTLSPVEPTENRETTANEKTTPSPAEPTENGQRTPFANEKTTSSSAEPTEHGERTPLANENTTPSPAEPTENRERTANEKTTPSPAEPTENGDRTPLANEKTTPSLAEPTENGQRTPFANEKTTSSSAEPTEHEERTPLANENTTPSPAEPTENRERTANENTTPSPAGPTENREMTANEKTTLFPAEPTENRERTANEKTTSSPAEPTENGQRTPFANEKTTSSSAEPTEHGERTPLANENTTLSPAEPTENRERTANEKTTPFPAEPTENRERTANENTTPSPAQPTENGDRTPLANEKTTPSLAEPTENGKRTPFANEKTTSSSAEPTEHAERTPLANENTTSSPAEPTENRERTANEKTTQFPAEPTENRESTANEKTTPFPAEPTENREWTANENTTLSPAEPTEHEEMTPLANEKTTLSPAEPTENGERTPFTNEKTTPSSAEPTEHGERTPLANEITTPSRAEPTEHGERIANEKATPSPAKPTEHGETTVNEDTTPSSAEPTENGERTPLANENTTTSPTESTEHGERTANEKTTPSPAEPTEHGERTPSANEKTIPSPAKPTEHEEMTPSANENTTPSPVKPTEHGEKTTLANEKITLSPEGPTEHGAKTTSANEKITPSLAKPTEHGERTTSPNDKITSSAAESTEHRDRATSANVITPAPAEPIKHAKRTTLAHEKMTQVTEKSTEHPEKTTSTTEKTTRTPEKPTLYSEKTICTKGKNTPVPEKPTENLGNTTLTTETIKAPVKSTENPEKTAAVTKTIKPSVKVTGDKSLTTTSSHLNKTEVTHQVPTGSFTLITSRTKLSSITSEATGNESHPYLNKDGSQKGIHAGQMGENDSFPAWAIVIVVLVAVILLLVFLGLIFLVSYMMRTRRTLTQNTQYNDAEDEGGPNSYPVYLMEQQNLGMGQIPSPR

SEQ ID NO: 1475 - protein, 1371 aa, Artificial Sequence
  Synthetic polypeptide
VAPLLVGFLGMQASSPEACWGSKWGIYQVQLRALEHVDGTHVCQLPEDQKGNIHLKPSFSDGLKMDAGIICDVCTCELQKEVRSARCSFNGDFVCGQCVCSEGWSGQTCNCSTGSLSDIQPCLREGEDKPCSGRGECQCGHCVCYGEGRYEGQFCEYDNFQCPRTSGFLCNDRGRCSMGQCVCEPGWTGPSCDCPLSNATCIDSNGGICNGRGHCECGRCHCHQQSLYTDTICEINYSAIHPGLCEDLRSCVQCQAWGTGEKKGRTCEECNFKVKMVDELKRAEEVVVRCSFRDEDDDCTYSYTMEGDGAPGPNSTVLVHKKKDCPPGSFWWLIPLLLLLLPLLALLLLLCWKYCACCKACLALLPCCNRGHMVGFKEDHYMLRENLMASDHLDTPMLRSGNLKGRDVVRWKVTNNMQRPGFATHAASINPTELVPYGLSLRLARLCTENLLKPDTRECAQLRQEVEENLNEVYRQISGVHKLQQTKFRQQPNAGKKQDHTIVDTVLMAPRSAKPALLKLTEKQVEQRAFHDLKVAPGYYTLTADQDARGMVEFQEGVELVDVRVPLFIRPEDDDEKQLLVEAIDVPAGTATLGRRLVNITIIKEQARDVVSFEQPEFSVSRGDQVARIPVIRRVLDGGKSQVSYRTQDGTAQGNRDYIPVEGELLFQPGEAWKELQVKLLELQEVDSLLRGRQVRRFHVQLSNPKFGAHLGQPHSTTIIIRDPDELDRSFTSQMLSSQPPPHGDLGAPQNPNAKAAGSRKIHFNWLPPSGKPMGYRVKYWIQGDSESEAHLLDSKVPSVELTNLYPYCDYEMKVCAYGAQGEGPYSSLVSCRTHQEVPSEPGRLAFNVVSSTVTQLSWAEPAETNGEITAYEVCYGLVNDDNRPIGPMKKVLVDNPKNRMLLIENLRESQPYRYTVKARNGAGWGPEREAIINLATQPKRPMSIPIIPDIPIVDAQSGEDYDSFLMYSDDVLRSPSGSQRPSVSDDTEHLVNGRMDFAFPGSTNSLHRMTTTSAAAYGTHLSPHVPHRVLSTSSTLTRDYNSLTRSEHSHSTTLPRDYSTLTSVSSHDSRLTAGVPDTPTRLVFSALGPTSLRVSWQEPRCERPLQGYSVEYQLLNGGELHRLNIPNPAQTSVVVEDLLPNHSYVFRVRAQSQEGWGREREGVITIESQVHPQSPLCPLPGSAFTLSTPSAPGPLVFTALSPDSLQLSWERPRRPNGDIVGYLVTCEMAQGGGPATAFRVDGDSPESRLTVPGLSENVPYKFKVQARTTEGFGPEREGIITIESQDGGPFPQLGSRAGLFQHPLQSEYSSITTTHTSATEPFLVDGLTLGAQHLEAGGSLTRHVTQEFVSRTLTTSGTLSTHMDQQFFQT

SEQ ID NO: 1476 - protein, 1371 aa, Artificial Sequence; identical to SEQ ID NO: 1475
  Synthetic polypeptide

SEQ ID NO: 1477 - protein, 1361 aa, Artificial Sequence
  Synthetic polypeptide
ICIGSSIVTKLECQDALETAARAEGLSLDASMHSQLRILDEEHPKGKYHHGLSALKPIRTTSKHQHPVDNAGLFSCMTFSWLSSLARVAHKKGELSMEDVWSLSKHESSDVNCRRLERLWQEELNEVGPDAASLRRVVWIFCRTRLILSIVCLMITQLAGFSGPAFMVKHLLEYTQATESNLQYSLLLVLGLLLTEIVRSWSLALTWALNYRTGVRLRGAILTMAFKKILKLKNIKEKSLGELINICSNDGQRMFEAAAVGSLLAGGPVVAILGMIYNVIILGPTGFLGSAVFILFYPAMMFASRLTAYFRRKCVAATDERVQKMNEVLTYIKFIKMYAWVKAFSQSVQKIREEERRILEKAGYFQSITVGVAPIVVVIASVVTFSVHMTLGFDLTAAQAFTVVTVFNSMTFALKVTPFSVKSLSEASVAVDRFKSLFLMEEVHMIKNKPASPHIKIEMKNATLAWDSSHSSIQNSPKLTPKMKKDKRASRGKKEKVRQLQRTEHQAVLAEQKGHLLLDSDERPSPEEEEGKHIHLGHLRLQRTLHSIDLEIQEGKLVGICGSVGSGKTSLISAILGQMTLLEGSIAISGTFAYVAQQAWILNATLRDNILFGKEYDEERYNSVLNSCCLRPDLAILPSSDLTEIGERGANLSGGQRQRISLARALYSDRSIYILDDPLSALDAHVGNHIFNSAIRKHLKSKTVLFVTHQLQYLVDCDEVIFMKEGCITERGTHEELMNLNGDYATIFNNLLLGETPPVEINSKKETSGSQKKSQDKGPKTGSVKKEKAVKPEEGQLVQLEEKGQGSVPWSVYGVYIQAAGGPLAFLVIMALFMLNVGSTAFSTWWLSYWIKQGSGNTTVTRGNETSVSDSMKDNPHMQYYASIYALSMAVMLILKAIRGVVFVKGTLRASSRLHDELFRRILRSPMKFFDTTPTGRILNRFSKDMDEVDVRLPFQAEMFIQNVILVFFCVGMIAGVFPWFLVAVGPLVILFSVLHIVSRYQELLDDNQAPFFLFTCAMRWLAVRLDLISIALITTTGLMIVLMHGQIPPAYAGLAISYAVQLTGLFQFTVRLASETEARFTSVERINHYIKTLSLEAPARIKNKAPSPDWPQEGEVTFENAEMRYRENLPLVLKKVSFTIKPKEKIGIVGRTGSGKSSLGMALFRLVELSGGCIKIDGVRISDIGLADLRSKLSIIPQEPVLFSGTVRSNLDPFNQYTEDQIWDALERTHMKECIAQLPLKLESEVMENGDNFSVGERQLLCIARALLRHCKILILDEATAAMDTETDLLIQETIREAFADCTMLTIAHRLHTVLGSDRIMVLAQGQVVEFDTPSVLLSNDSSRFYAMFAAAENKVAVKG

SEQ ID NO: 1478 - protein, 1316 aa, Artificial Sequence
  Synthetic polypeptide
SKFKTIEIGSVIKEPPHFVVKPRDQVVALGRTVTFQCEATGNPQPAIFWRREGSQNLLFSYQPPQSSSRFSVSQTGDLTITNVQRSDVGYYICQTLNVAGSIITKAYLEVTDVIADRPPPVIRQGPVNQTVAVDGTFVLSCVATGSPVPTILWRKDGVLVSTQDSRIKQLENGVLQIRYAKLGDTGRYTCIASTPSGEATWSAYIEVQEFGVPVQPPRPTDPNLIPSAPSKPEVTDVSRNTVTLSWQPNLNSGATPTSYIIEAFSHASGSSWQTVAENVKTETSAIKGLKPNAIYLFLVRAANAYGISDPSQISDPVKTQDVLPTSQGVDHKQVQRELGNAVLHLHNPTVLSSSSIEVHWTVDQQSQYIQGYKILYRPSGANHGESDWLVFEVRTPAKNSVVIPDLRKGVNYEIKARPFFNEFQGADSEIKFAKTLEEAPSAPPQGVTVSKNDGNGTAILVSWQPPPEDTQNGMVQEYKVWCLGNETRYHINKTVDGSTFSVVIPFLVPGIRYSVEVAASTGAGSGVKSEPQFIQLDAHGNPVSPEDQVSLAQQISDVVKQPAFIAGIGAACWIILMVFSIWLYRHRKKRNGLTSTYAGIRKVPSFTFTPTVTYQRGGEAVSSGGRPGLLNISEPAAQPWLADTWPNTGNNHNDCSISCCTAGNGNSDSNLTTYSRPADCIANYNNQLDNKQTNLMLPESTVYGDVDLSNKINEMKTFNSPNLKDGRFVNPSGQPTPYATTQLIQSNLSNNMNNGSGDSGEKHWKPLGQQKQEVAPVQYNIVEQNKLNKDYRANDTVPPTIPYNQSYDQNTGGSYNSSDRGSSTSGSQGHKKGARTPKVPKQGGMNWADLLPPPPAHPPPHSNSEEYNISVDESYDQEMPCPVPPARMYLQQDELEEEEDERGPTPPVRGAASSPAAVSYSHQSTATLTPSPQEELQPMLQDCPEETGHMQHQPDRRRQPVSPPPPPRPISPPHTYGYISGPLVSDMDTDAPEEEEDEADMEVAKMQTRRLLLRGLEQTPASSVGDLESSVTGSMINGWGSASEEDNISSGRSSVSSSDGSFFTDADFAQAVAAAAEYAGLKVARRQMQDAAGRRHFHASQCPRPTSPVSTDSNMSAAVMQKTRPAKKLKHQPGHLRRETYTDDLPPPPVPPPAIKSPTAQSKTQLEVRPVVVPKLPSMDARTDRSSDRKGSSYKGREVLDGRQVVDMRTNPGDPREAQEQQNDGKGRGNKAAKRDLPPAKTHLIQEDILPYCRPTFPTSNNPRDPSSSSSMSSRGSGSRQREQANVGRRNIAEMQVLGGYERGEDNNEELEETES

SEQ ID NO: 1479 - protein, 1316 aa, Artificial Sequence; identical to SEQ ID NO: 1478
  Synthetic polypeptide

SEQ ID NO: 1480 - protein, 1311 aa, Artificial Sequence
  Synthetic polypeptide
RRWHAPVVPTTPEAEMQIYCFDADRFSSFEEAVKGKGKLRALSILFEVGTEENLDFKAIIDGVESVSRFGKQAALDPFILLNLLPNSTDKYYIYNGSLTSPPCTDTVDWIVFKDTVSISESQLAVFCEVLTMQQSGYVMLMDYLQNNFREQQYKFSRQVFSSYTGKEEIHEAVCSSEPENVQADPENYTSLLVTWERPRVVYDTMIEKFAVLYQQLDGEDQTKHEFLTDGYQDLGAILNNLLPNMSYVLQIVAICTNGLYGKYSDQLIVDMPTDNPELDLFPELIGTEEIIKEEEEGKDIEEGAIVNPGRDSATNQIRKKEPQISTTTHYNRIGTKYNEAKTNRSPTRGSEFSGKGDVPNTSLNSTSQPVTKLATEKDISLTSQTVTELPPHTVEGTSASLNDGSKTVLRSPHMNLSGTAESLNTVSITEYEEESLLTSFKLDTGAEDSSGSSPATSAIPFISENISQGYIFSSENPETITYDVLIPESARNASEDSTSSGSEESLKDPSMEGNVWFPSSTDITAQPDVGSGRESFLQTNYTEIRVDESEKTTKSFSAGPVMSQGPSVTDLEMPHYSTFAYFPTEVTPHAFTPSSRQQDLVSTVNVVYSQTTQPVYNEASNSSHESRIGLAEGLESEKKAVIPLVIVSALTFICLVVLVGILIYWRKCFQTAHFYLEDSTSPRVISTPPTPIFPISDDVGAIPIKHFPKHVADLHASSGFTEEFEEVQSCTVDLGITADSSNHPDNKHKNRYINIVAYDHSRVKLAQLAEKDGKLTDYINANYVDGYNRPKAYIAAQGPLKSTAEDFWRMIWEHNVEVIVMITNLVEKGRRKCDQYWPADGSEEYGNFLVTQKSVQVLAYYTVRNFTLRNTKIKKGSQKGRPSGRVVTQYHYTQWPDMGVPEYSLPVLTFVRKAAYAKRHAVGPVVVHCSAGVGRTGTYIVLDSMLQQIQHEGTVNIFGFLKHIRSQRNYLVQTEEQYVFIHDTLVEAILSKETEVLDSHIHAYVNALLIPGPAGKTKLEKQFQLLSQSNIQQSDYSAALKQCNREKNRTSSIIPVERSRVGISSLSGEGTDYINASYIMGYYQSNEFIITQHPLLHTIKDFWRMIWDHNAQLVVMIPDGQNMAEDEFVYWPNKDEPINCESFKVTLMAEEHKCLSNEEKLIIQDFILEATQDDYVLEVRHFQCPKWPNPDSPISKTFELISVIKEEAANRDGPMIVHDEHGGVTAGTFCALTTLMHQLEKENSVDVYQVAKMINLMRPGVFADIEQYQFLYKVILSLVSTRQEENPSTSLDSNGAALPDGNIAESLESLV

SEQ ID NO: 1481 - protein, 1307 aa, Artificial Sequence
  Synthetic polypeptide
SKFKTIEIGSVIKEPPHFVVKPRDQVVALGRTVTFQCEATGNPQPAIFWRREGSQNLLFSYQPPQSSSRFSVSQTGDLTITNVQRSDVGYYICQTLNVAGSIITKAYLEVTDVIADRPPPVIRQGPVNQTVAVDGTFVLSCVATGSPVPTILWRKDGVLVSTQDSRIKQLENGVLQIRYAKLGDTGRYTCIASTPSGEATWSAYIEVQEFGVPVQPPRPTDPNLIPSAPSKPEVTDVSRNTVTLSWQPNLNSGATPTSYIIEAFSHASGSSWQTVAENVKTETSAIKGLKPNAIYLFLVRAANAYGISDPSQISDPVKTQDVLPTSQGVDHKQVQRELGNAVLHLHNPTVLSSSSIEVHWTVDQQSQYIQGYKILYRPSGANHGESDWLVFEVRTPAKNSVVIPDLRKGVNYEIKARPFFNEFQGADSEIKFAKTLEEAPSAPPQGVTVSKNDGNGTAILVSWQPPPEDTQNGMVQEYKVWCLGNETRYHINKTVDGSTFSVVIPFLVPGIRYSVEVAASTGAGSGVKSEPQFIQLDAHGNPVSPEDQVSLAQQISDVVKQPAFIAGIGAACWIILMVFSIWLYRHRKKRNGLTSTYAGIRKVTYQRGGEAVSSGGRPGLLNISEPAAQPWLADTWPNTGNNHNDCSISCCTAGNGNSDSNLTTYSRPADCIANYNNQLDNKQTNLMLPESTVYGDVDLSNKINEMKTFNSPNLKDGRFVNPSGQPTPYATTQLIQSNLSNNMNNGSGDSGEKHWKPLGQQKQEVAPVQYNIVEQNKLNKDYRANDTVPPTIPYNQSYDQNTGGSYNSSDRGSSTSGSQGHKKGARTPKVPKQGGMNWADLLPPPPAHPPPHSNSEEYNISVDESYDQEMPCPVPPARMYLQQDELEEEEDERGPTPPVRGAASSPAAVSYSHQSTATLTPSPQEELQPMLQDCPEETGHMQHQPDRRRQPVSPPPPPRPISPPHTYGYISGPLVSDMDTDAPEEEEDEADMEVAKMQTRRLLLRGLEQTPASSVGDLESSVTGSMINGWGSASEEDNISSGRSSVSSSDGSFFTDADFAQAVAAAAEYAGLKVARRQMQDAAGRRHFHASQCPRPTSPVSTDSNMSAAVMQKTRPAKKLKHQPGHLRRETYTDDLPPPPVPPPAIKSPTAQSKTQLEVRPVVVPKLPSMDARTDRSSDRKGSSYKGREVLDGRQVVDMRTNPGDPREAQEQQNDGKGRGNKAAKRDLPPAKTHLIQEDILPYCRPTFPTSNNPRDPSSSSSMSSRGSGSRQREQANVGRRNIAEMQVLGGYERGEDNNEELEETES

SEQ ID NO: 1482 - protein, 1303 aa, Artificial Sequence
  Synthetic polypeptide
HFLLPSLSLLPPWEDVLASPSPFCHDYKLPEASPPTPAVQPVEFKQKRKKTKTVKMIGVLTLFRYSDWQDKLFMSLGTIMAIAHGSGLPLMMIVFGEMTDKFVDTAGNFSFPVNFSLSLLNPGKILEEEMTRYAYYYSGLGAGVLVAAYIQVSFWTLAAGRQIRKIRQKFFHAILRQEIGWFDINDTTELNTRLTDDISKISEGIGDKVGMFFQAVATFFAGFIVGFIRGWKLTLVIMAISPILGLSAAVWAKILSAFSDKELAAYAKAGAVAEEALGAIRTVIAFGGQNKELERYQKHLENAKEIGIKKAISANISMGIAFLLIYASYALAFWYGSTLVISKEYTIGNAMTVFFSILIGAFSVGQAAPCIDAFANARGAAYVIFDIIDNNPKIDSFSERGHKPDSIKGNLEFNDVHFSYPSRANVKILKGLNLKVQSGQTVALVGSSGCGKSTTVQLIQRLYDPDEGTINIDGQDIRNFNVNYLREIIGVVSQEPVLFSTTIAENICYGRGNVTMDEIKKAVKEANAYEFIMKLPQKFDTLVGERGAQLSGGQKQRIAIARALVRNPKILLLDEATSALDTESEAEVQAALDKAREGRTTIVIAHRLSTVRNADVIAGFEDGVIVEQGSHSELMKKEGVYFKLVNMQTSGSQIQSEEFELNDEKAATRMAPNGWKSRLFRHSTQKNLKNSQMCQKSLDVETDGLEANVPPVSFLKVLKLNKTEWPYFVVGTVCAIANGGLQPAFSVIFSEIIAIFGPGDDAVKQQKCNIFSLIFLFLGIISFFTFFLQGFTFGKAGEILTRRLRSMAFKAMLRQDMSWFDDHKNSTGALSTRLATDAAQVQGATGTRLALIAQNIANLGTGIIISFIYGWQLTLLLLAVVPIIAVSGIVEMKLLAGNAKRDKKELEAAGKIATEAIENIRTVVSLTQERKFESMYVEKLYGPYRNSVQKAHIYGITFSISQAFMYFSYAGCFRFGAYLIVNGHMRFRDVILVFSAIVFGAVALGHASSFAPDYAKAKLSAAHLFMLFERQPLIDSYSEEGLKPDKFEGNITFNEVVFNYPTRANVPVLQGLSLEVKKGQTLALVGSSGCGKSTVVQLLERFYDPLAGTVFVDFGFQLLDGQEAKKLNVQWLRAQLGIVSQEPILFDCSIAENIAYGDNSRVVSQDEIVSAAKAANIHPFIETLPHKYETRVGDKGTQLSGGQKQRIAIARALIRQPQILLLDEATSALDTESEKVVQEALDKAREGRTCIVIAHRLSTIQNADLIVVFQNGRVKEHGTHQQLLAQKGIYFSMVSVQAGTQNL

SEQ ID NO: 1483 - protein, 1302 aa, Artificial Sequence
  Synthetic polypeptide
TMRTFGHRPQNSMPDIIIWMIRGEKRLAYARIPAHQVLYSTSGENASGKYCGKTQTIFLKYPQEKNNGPKVPVELRVNIWLGLSAVEKKFNSFAEGTFTVFAEMYENQALMFGKWGTSGLVGRHKFSDVTGKIKLKREFFLPPKGWEWEGEWIVDPERSLLTEADAGHTEFTDEVYQNESRYPGGDWKPAEDTYTDANGDKAASPSELTCPPGWEWEDDAWSYDINRAVDEKGWEYGITIPPDHKPKSWVAAEKMYHTHRRRRLVRKRKKDLTQTASSTARAMEELQDQEGWEYASLIGWKFHWKQRSSDTFRRRRWRRKMAPSETHGAAAIFKLEGALGADTTEDGDEKSLEKQKHSATTVFGANTPIVSCNFDRVYIYHLRCYVYQARNLLALDKDSFSDPYAHICFLHRSKTTEIIHSTLNPTWDQTIIFDEVEIYGEPQTVLQNPPKVIMELFDNDQVGKDEFLGRSIFSPVVKLNSEMDITPKLLWHPVMNGDKACGDVLVTAELILRGKDGSNLPILPPQRAPNLYMVPQGIRPVVQLTAIEILAWGLRNMKNFQMASITSPSLVVECGGERVESVVIKNLKKTPNFPSSVLFMKVFLPKEELYMPPLVIKVIDHRQFGRKPVVGQCTIERLDRFRCDPYAGKEDIVPQLKASLLSAPPCRDIVIEMEDTKPLLASKLTEKEEEIVDWWSKFYASSGEHEKCGQYIQKGYSKLKIYNCELENVAEFEGLTDFSDTFKLYRGKSDENEDPSVVGEFKGSFRIYPLPDDPSVPAPPRQFRELPDSVPQECTVRIYIVRGLELQPQDNNGLCDPYIKITLGKKVIEDRDHYIPNTLNPVFGRMYELSCYLPQEKDLKISVYDYDTFTRDEKVGETIIDLENRFLSRFGSHCGIPEEYCVSGVNTWRDQLRPTQLLQNVARFKGFPQPILSEDGSRIRYGGRDYSLDEFEANKILHQHLGAPEERLALHILRTQGLVPEHVETRTLHSTFQPNISQGKLQMWVDVFPKSLGPPGPPFNITPRKAKKYYLRVIIWNTKDVILDEKSITGEEMSDIYVKGWIPGNEENKQKTDVHYRSLDGEGNFNWRFVFPFDYLPAEQLCIVAKKEHFWSIDQTEFRIPPRLIIQIWDNDKFSLDDYLGFLELDLRHTIIPAKSPEKCRLDMIPDLKAMNPLKAKTASLFEQKSMKGWWPCYAEKDGARVMAGKVEMTLEILNEKEADERPAGKGRDEPNMNPKLDLPNRPETSFLWFTNPCKTMKFIVWRRFKWVIIGLLFLLILLLFVAVLLYSLPNYLSMKIVKPNV

SEQ ID NO: 1484 - protein, 1302 aa, Artificial Sequence; identical to SEQ ID NO: 1483
  Synthetic polypeptide

SEQ ID NO: 1485 - protein, 1302 aa, Artificial Sequence
  Synthetic polypeptide
TMRTFGHRPQNSMPDIIIWMIRGEKRLAYARIPAHQVLYSTSGENASGKYCGKTQTIFLKYPQEKNNGPKVPVELRVNIWLGLSAVEKKFNSFAEGTFTVFAEMYENQALMFGKWGTSGLVGRHKFSDVTGKIKLKREFFLPPKGWEWEGEWIVDPERSLLTEADAGHTEFTDEVYQNESRYPGGDWKPAEDTYTDANGDKAASPSELTCPPGWEWEDDAWSYDINRAVDEKGWEYGITIPPDHKPKSWVAAEKMYHTHRRRRLVRKRKKDLTQTASSTARAMEELQDQEGWEYASLIGWKFHWKQRSSDTFRRRRWRRKMAPSETHGAAAIFKLEGALGADTTEDGDEKSLEKQKHSATTVFGANTPIVSCNFDRVYIYHLRCYVYQARNLLALDKDSFSDPYAHICFLHRSKTTEIIHSTLNPTWDQTIIFDEVEIYGEPQTVLQNPPKVIMELFDNDQVGKDEFLGRSIFSPVVKLNSEMDITPKLLWHPVMNGDKACGDVLVTAELILRGKDGSNLPILPPQRAPNLYMVPQGIRPVVQLTAIEILAWGLRNMKNFQMASITSPSLVVECGGERVESVVIKNLKKTPNFPSSVLFMKVFLPKEELYMPPLVIKVIDHRQFGRKPVVGQCTIERLDRFRCDPYAGKEDIVPQLKASLLSAPPCRDIVIEMEDTKPLLASKLVSIEEEIVDWWSKFYASSGEHEKCGQYIQKGYSKLKIYNCELENVAEFEGLTDFSDTFKLYRGKSDENEDPSVVGEFKGSFRIYPLPDDPSVPAPPRQFRELPDSVPQECTVRIYIVRGLELQPQDNNGLCDPYIKITLGKKVIEDRDHYIPNTLNPVFGRMYELSCYLPQEKDLKISVYDYDTFTRDEKVGETIIDLENRFLSRFGSHCGIPEEYCVSGVNTWRDQLRPTQLLQNVARFKGFPQPILSEDGSRIRYGGRDYSLDEFEANKILHQHLGAPEERLALHILRTQGLVPEHVETRTLHSTFQPNISQGKLQMWVDVFPKSLGPPGPPFNITPRKAKKYYLRVIIWNTKDVILDEKSITGEEMSDIYVKGWIPGNEENKQKTDVHYRSLDGEGNFNWRFVFPFDYLPAEQLCIVAKKEHFWSIDQTEFRIPPRLIIQIWDNDKFSLDDYLGFLELDLRHTIIPAKSPEKCRLDMIPDLKAMNPLKAKTASLFEQKSMKGWWPCYAEKDGARVMAGKVEMTLEILNEKEADERPAGKGRDEPNMNPKLDLPNRPETSFLWFTNPCKTMKFIVWRRFKWVIIGLLFLLILLLFVAVLLYSLPNYLSMKIVKPNV

SEQ ID NO: 1486 - protein, 1298 aa, Artificial Sequence
  Synthetic polypeptide
QLGLVEGMWDLKAGQPEFQSCLLLTSFMRRELTPASLSCLLCKMEVAAPVSGACYADPPRVPARHTVVCTGTDMKLRLPASPETHLDMLRHLYQGCQVVQGNLELTYLPTNASLSFLQDIQEVQGYVLIAHNQVRQVPLQRLRIVRGTQLFEDNYALAVLDNGDPLNNTTPVTGASPGGLRELQLRSLTEILKGGVLIQRNPQLCYQDTILWKDIFHKNNQLALTLIDTNRSRACHPCSPMCKGSRCWGESSEDCQSLTRTVCAGGCARCKGPLPTDCCHEQCAAGCTGPKHSDCLACLHFNHSGICELHCPALVTYNTDTFESMPNPEGRYTFGASCVTACPYNYLSTDVGSCTLVCPLHNQEVTAEDGTQRCEKCSKPCARVCYGLGMEHLREVRAVTSANIQEFAGCKKIFGSLAFLPESFDGDPASNTAPLQPEQLQVFETLEEITGYLYISAWPDSLPDLSVFQNLQVIRGRILHNGAYSLTLQGLGISWLGLRSLRELGSGLALIHHNTHLCFVHTVPWDQLFRNPHQALLHTANRPEDECVGEGLACHQLCARGHCWGPGPTQCVNCSQFLRGQECVEECRVLQGLPREYVNARHCLPCHPECQPQNGSVTCFGPEADQCVACAHYKDPPFCVARCPSGVKPDLSYMPIWKFPDEEGACQPCPINCTHSCVDLDDKGCPAEQRASPLTSIISAVVGILLVVVLGVVFGILIKRRQQKIRKYTMRRLLQETELVEPLTPSGAMPNQAQMRILKETELRKVKVLGSGAFGTVYKGIWIPDGENVKIPVAIKVLRENTSPKANKEILDEAYVMAGVGSPYVSRLLGICLTSTVQLVTQLMPYGCLLDHVRENRGRLGSQDLLNWCMQIAKGMSYLEDVRLVHRDLAARNVLVKSPNHVKITDFGLARLLDIDETEYHADGGKVPIKWMALESILRRRFTHQSDVWSYGVTVWELMTFGAKPYDGIPAREIPDLLEKGERLPQPPICTIDVYMIMVKCWMIDSECRPRFRELVSEFSRMARDPQRFVVIQNEDLGPASPLDSTFYRSLLEDDDMGDLVDAEEYLVPQQGFFCPDPAPGAGGMVHHRHRSSSTRSGGGDLTLGLEPSEEEAPRSPLAPSEGAGSDVFDGDLGMGAAKGLQSLPTHDPSPLQRYSEDPTVPLPSETDGYVAPLTCSPQPEYVNQPDVRPQPPSPREGPLPAARPAGATLERPKTLSPGKNGVVKDVFAFGGAVENPEYLTPQGGAAPQPHPPPAFSPAFDNLYYWDQDPPERGAPPSTFKGTPTAENPEYLGLDVPV

SEQ ID NO: 1487 - protein, 1298 aa, Artificial Sequence; identical to SEQ ID NO: 1486
  Synthetic polypeptide

SEQ ID NO: 1488 - protein, 1296 aa, Artificial Sequence
  Synthetic polypeptide
HFLLPSLSLLPPWEDVLASPSPFCHDYKLPEASPPTPAVQPVEFKQKRKKTKTVKMIGVLTLFRYSDWQDKLFMSLGTIMAIAHGSGLPLMMIVFGEMTDKFVDTAGNFSFPVNFSLSLLNPGKILEEEMTRYAYYYSGLGAGVLVAAYIQVSFWTLAAGRQIRKIRQKFFHAILRQEIGWFDINDTTELNTRLTDDISKISEGIGDKVGMFFQAVATFFAGFIVGFIRGWKLTLVIMAISPILGLSAAVWAKILSAFSDKELAAYAKAGAVAEEALGAIRTVIAFGGQNKELERYQKHLENAKEIGIKKAISANISMGIAFLLIYASYALAFWYGSTLVISKEYTIGNAMTVFFSILIGAFSVGQAAPCIDAFANARGAAYVIFDIIDNNPKIDSFSERGHKPDSIKGNLEFNDVHFSYPSRANVKILKGLNLKVQSGQTVALVGSSGCGKSTTVQLIQRLYDPDEGTINIDGQDIRNFNVNYLREIIGVVSQEPVLFSTTIAENICYGRGNVTMDEIKKAVKEANAYEFIMKLPQKFDTLVGERGAQLSGGQKQRIAIARALVRNPKILLLDEATSALDTESEAEVQAALDKAREGRTTIVIAHRLSTVRNADVIAGFEDGVIVEQGSHSELMKKEGVYFKLVNMQTSGSQIQSEEFELNDEKAATRMAPNGWKSRLFRHSTQKNLKNSQMCQKSLDVETDGLEANVPPVSFLKVLKLNKTEWPYFVVGTVCAIANGGLQPAFSVIFSEIIAIFGPGDDAVKQQKCNIFSLIFLFLGIISFFTFFLQGFTFGKAGEILTRRLRSMAFKAMLRQDMSWFDDHKNSTGALSTRLATDAAQVQGATGTRLALIAQNIANLGTGIIISFIYGWQLTLLLLAVVPIIAVSGIVEMKLLAGNAKRDKKELEAAGKIATEAIENIRTVVSLTQERKFESMYVEKLYGPYRNSVQKAHIYGITFSISQAFMYFSYAGCFRFGAYLIVNGHMRFRDVILVFSAIVFGAVALGHASSFAPDYAKAKLSAAHLFMLFERQPLIDSYSEEGLKPDKFEGNITFNEVVFNYPTRANVPVLQGLSLEVKKGQTLALVGSSGCGKSTVVQLLERFYDPLAGTVLLDGQEAKKLNVQWLRAQLGIVSQEPILFDCSIAENIAYGDNSRVVSQDEIVSAAKAANIHPFIETLPHKYETRVGDKGTQLSGGQKQRIAIARALIRQPQILLLDEATSALDTESEKVVQEALDKAREGRTCIVIAHRLSTIQNADLIVVFQNGRVKEHGTHQQLLAQKGIYFSMVSVQAGTQNL

SEQ ID NO: 1489 - protein, 1296 aa, Artificial Sequence; identical to SEQ ID NO: 1488
  Synthetic polypeptide

SEQ ID NO: 1490 - protein, 1292 aa, Artificial Sequence
  Synthetic polypeptide
TMRTFGHRPQNSMPDIIIWMIRGEKRLAYARIPAHQVLYSTSGENASGKYCGKTQTIFLKYPQEKNNGPKVPVELRVNIWLGLSAVEKKFNSFAEGTFTVFAEMYENQALMFGKWGTSGLVGRHKFSDVTGKIKLKREFFLPPKGWEWEGEWIVDPERSLLTEADAGHTEFTDEVYQNESRYPGGDWKPAEDTYTDANGDKAASPSELTCPPGWEWEDDAWSYDINRAVDEKGWEYGITIPPDHKPKSWVAAEKMYHTHRRRRLVRKRKKDLTQTASSTARAMEELQDQEGWEYASLIGWKFHWKQRSSDTFRRRRWRRKMAPSETHGAAAIFKLEGALGADTTEDGDEKSLEKQKHSATTVFGANTPIVSCNFDRVYIYHLRCYVYQARNLLALDKDSFSDPYAHICFLHRSKTTEIIHSTLNPTWDQTIIFDEVEIYGEPQTVLQNPPKVIMELFDNDQVGKDEFLGRSIFSPVVKLNSEMDITPKLLWHPVMNGDKACGDVLVTAELILRGKDGSNLPILPPQRAPNLYMVPQGIRPVVQLTAIEILAWGLRNMKNFQMASITSPSLVVECGGERVESVVIKNLKKTPNFPSSVLFMKVFLPKEELYMPPLVIKVIDHRQFGRKPVVGQCTIERLDRFRCDPYAGKEDIVPQLKASLLSAPPCRDIVIEMEDTKPLLASKCLSSMSTALSKMASPATVHVLDEEEEIVDWWSKFYASSGEHEKCGQYIQKGYSKLKIYNCELENVAEFEGLTDFSDTFKLYRGKSDENEDPSVVGEFKGSFRIYPLPDDPSVPAPPRQFRELPDSVPQECTVRIYIVRGLELQPQDNNGLCDPYIKITLGKKVIEDRDHYIPNTLNPVFGRMYELSCYLPQEKDLKISVYDYDTFTRDEKVGETIIDLENRFLSRFGSHCGIPEEYCVSGVNTWRDQLRPTQLLQNVARFKGFPQPILSEDGSRIRYGGRDYSLDEFEANKILHQHLGAPEERLALHILRTQGLVPEHVETRTLHSTFQPNISQRYYLRVIIWNTKDVILDEKSITGEEMSDIYVKGWIPGNEENKQKTDVHYRSLDGEGNFNWRFVFPFDYLPAEQLCIVAKKEHFWSIDQTEFRIPPRLIIQIWDNDKFSLDDYLGFLELDLRHTIIPAKSPEKCRLDMIPDLKAMNPLKAKTASLFEQKSMKGWWPCYAEKDGARVMAGKVEMTLEILNEKEADERPAGKGRDEPNMNPKLDLPNRPETSFLWFTNPCKTMKFIVWRRFKWVIIGLLFLLILLLFVAVLLYSLPNYLSMKIVKPNV

SEQ ID NO: 1491 - protein, 1280 aa, Artificial Sequence
  Synthetic polypeptide
VPVLPVAHKLYEARANPCQPQLSSLQDGGCSPSLWSMLCRSTESACQAHMCTGTDMKLRLPASPETHLDMLRHLYQGCQVVQGNLELTYLPTNASLSFLQDIQEVQGYVLIAHNQVRQVPLQRLRIVRGTQLFEDNYALAVLDNGDPLNNTTPVTGASPGGLRELQLRSLTEILKGGVLIQRNPQLCYQDTILWKDIFHKNNQLALTLIDTNRSRACHPCSPMCKGSRCWGESSEDCQSLTRTVCAGGCARCKGPLPTDCCHEQCAAGCTGPKHSDCLACLHFNHSGICELHCPALVTYNTDTFESMPNPEGRYTFGASCVTACPYNYLSTDVGSCTLVCPLHNQEVTAEDGTQRCEKCSKPCARVCYGLGMEHLREVRAVTSANIQEFAGCKKIFGSLAFLPESFDGDPASNTAPLQPEQLQVFETLEEITGYLYISAWPDSLPDLSVFQNLQVIRGRILHNGAYSLTLQGLGISWLGLRSLRELGSGLALIHHNTHLCFVHTVPWDQLFRNPHQALLHTANRPEDECVGEGLACHQLCARGHCWGPGPTQCVNCSQFLRGQECVEECRVLQGLPREYVNARHCLPCHPECQPQNGSVTCFGPEADQCVACAHYKDPPFCVARCPSGVKPDLSYMPIWKFPDEEGACQPCPINCTHSCVDLDDKGCPAEQRASPLTSIISAVVGILLVVVLGVVFGILIKRRQQKIRKYTMRRLLQETELVEPLTPSGAMPNQAQMRILKETELRKVKVLGSGAFGTVYKGIWIPDGENVKIPVAIKVLRENTSPKANKEILDEAYVMAGVGSPYVSRLLGICLTSTVQLVTQLMPYGCLLDHVRENRGRLGSQDLLNWCMQIAKGMSYLEDVRLVHRDLAARNVLVKSPNHVKITDFGLARLLDIDETEYHADGGKVPIKWMALESILRRRFTHQSDVWSYGVTVWELMTFGAKPYDGIPAREIPDLLEKGERLPQPPICTIDVYMIMVKCWMIDSECRPRFRELVSEFSRMARDPQRFVVIQNEDLGPASPLDSTFYRSLLEDDDMGDLVDAEEYLVPQQGFFCPDPAPGAGGMVHHRHRSSSTRSGGGDLTLGLEPSEEEAPRSPLAPSEGAGSDVFDGDLGMGAAKGLQSLPTHDPSPLQRYSEDPTVPLPSETDGYVAPLTCSPQPEYVNQPDVRPQPPSPREGPLPAARPAGATLERPKTLSPGKNGVVKDVFAFGGAVENPEYLTPQGGAAPQPHPPPAFSPAFDNLYYWDQDPPERGAPPSTFKGTPTAENPEYLGLDVPV

SEQ ID NO: 1492 - protein, 1280 aa, Artificial Sequence; identical to SEQ ID NO: 1491
  Synthetic polypeptide

SEQ ID NO: 1493 - protein, 1267 aa, Artificial Sequence
  Synthetic polypeptide
QDQPHLFSFLFPLLSLLNVKMMRMKTFVMIHFHLMNVCTGTDMKLRLPASPETHLDMLRHLYQGCQVVQGNLELTYLPTNASLSFLQDIQEVQGYVLIAHNQVRQVPLQRLRIVRGTQLFEDNYALAVLDNGDPLNNTTPVTGASPGGLRELQLRSLTEILKGGVLIQRNPQLCYQDTILWKDIFHKNNQLALTLIDTNRSRACHPCSPMCKGSRCWGESSEDCQSLTRTVCAGGCARCKGPLPTDCCHEQCAAGCTGPKHSDCLACLHFNHSGICELHCPALVTYNTDTFESMPNPEGRYTFGASCVTACPYNYLSTDVGSCTLVCPLHNQEVTAEDGTQRCEKCSKPCARVCYGLGMEHLREVRAVTSANIQEFAGCKKIFGSLAFLPESFDGDPASNTAPLQPEQLQVFETLEEITGYLYISAWPDSLPDLSVFQNLQVIRGRILHNGAYSLTLQGLGISWLGLRSLRELGSGLALIHHNTHLCFVHTVPWDQLFRNPHQALLHTANRPEDECVGEGLACHQLCARGHCWGPGPTQCVNCSQFLRGQECVEECRVLQGLPREYVNARHCLPCHPECQPQNGSVTCFGPEADQCVACAHYKDPPFCVARCPSGVKPDLSYMPIWKFPDEEGACQPCPINCTHSCVDLDDKGCPAEQRASPLTSIISAVVGILLVVVLGVVFGILIKRRQQKIRKYTMRRLLQETELVEPLTPSGAMPNQAQMRILKETELRKVKVLGSGAFGTVYKGIWIPDGENVKIPVAIKVLRENTSPKANKEILDEAYVMAGVGSPYVSRLLGICLTSTVQLVTQLMPYGCLLDHVRENRGRLGSQDLLNWCMQIAKGMSYLEDVRLVHRDLAARNVLVKSPNHVKITDFGLARLLDIDETEYHADGGKVPIKWMALESILRRRFTHQSDVWSYGVTVWELMTFGAKPYDGIPAREIPDLLEKGERLPQPPICTIDVYMIMVKCWMIDSECRPRFRELVSEFSRMARDPQRFVVIQNEDLGPASPLDSTFYRSLLEDDDMGDLVDAEEYLVPQQGFFCPDPAPGAGGMVHHRHRSSSTRSGGGDLTLGLEPSEEEAPRSPLAPSEGAGSDVFDGDLGMGAAKGLQSLPTHDPSPLQRYSEDPTVPLPSETDGYVAPLTCSPQPEYVNQPDVRPQPPSPREGPLPAARPAGATLERPKTLSPGKNGVVKDVFAFGGAVENPEYLTPQGGAAPQPHPPPAFSPAFDNLYYWDQDPPERGAPPSTFKGTPTAENPEYLGLDVPV

SEQ ID NO: 1494 - protein, 1267 aa, Artificial Sequence; identical to SEQ ID NO: 1493
  Synthetic polypeptide

SEQ ID NO: 1495 - protein, 1253 aa, Artificial Sequence
  Synthetic polypeptide
PMRGRTFAVLFTTLPPAQNLAYVCTGTDMKLRLPASPETHLDMLRHLYQGCQVVQGNLELTYLPTNASLSFLQDIQEVQGYVLIAHNQVRQVPLQRLRIVRGTQLFEDNYALAVLDNGDPLNNTTPVTGASPGGLRELQLRSLTEILKGGVLIQRNPQLCYQDTILWKDIFHKNNQLALTLIDTNRSRACHPCSPMCKGSRCWGESSEDCQSLTRTVCAGGCARCKGPLPTDCCHEQCAAGCTGPKHSDCLACLHFNHSGICELHCPALVTYNTDTFESMPNPEGRYTFGASCVTACPYNYLSTDVGSCTLVCPLHNQEVTAEDGTQRCEKCSKPCARVCYGLGMEHLREVRAVTSANIQEFAGCKKIFGSLAFLPESFDGDPASNTAPLQPEQLQVFETLEEITGYLYISAWPDSLPDLSVFQNLQVIRGRILHNGAYSLTLQGLGISWLGLRSLRELGSGLALIHHNTHLCFVHTVPWDQLFRNPHQALLHTANRPEDECVGEGLACHQLCARGHCWGPGPTQCVNCSQFLRGQECVEECRVLQGLPREYVNARHCLPCHPECQPQNGSVTCFGPEADQCVACAHYKDPPFCVARCPSGVKPDLSYMPIWKFPDEEGACQPCPINCTHSCVDLDDKGCPAEQRASPLTSIISAVVGILLVVVLGVVFGILIKRRQQKIRKYTMRRLLQETELVEPLTPSGAMPNQAQMRILKETELRKVKVLGSGAFGTVYKGIWIPDGENVKIPVAIKVLRENTSPKANKEILDEAYVMAGVGSPYVSRLLGICLTSTVQLVTQLMPYGCLLDHVRENRGRLGSQDLLNWCMQIAKGMSYLEDVRLVHRDLAARNVLVKSPNHVKITDFGLARLLDIDETEYHADGGKVPIKWMALESILRRRFTHQSDVWSYGVTVWELMTFGAKPYDGIPAREIPDLLEKGERLPQPPICTIDVYMIMVKCWMIDSECRPRFRELVSEFSRMARDPQRFVVIQNEDLGPASPLDSTFYRSLLEDDDMGDLVDAEEYLVPQQGFFCPDPAPGAGGMVHHRHRSSSTRSGGGDLTLGLEPSEEEAPRSPLAPSEGAGSDVFDGDLGMGAAKGLQSLPTHDPSPLQRYSEDPTVPLPSETDGYVAPLTCSPQPEYVNQPDVRPQPPSPREGPLPAARPAGATLERPKTLSPGKNGVVKDVFAFGGAVENPEYLTPQGGAAPQPHPPPAFSPAFDNLYYWDQDPPERGAPPSTFKGTPTAENPEYLGLDVPV

SEQ ID NO: 1496 - protein, 1253 aa, Artificial Sequence; identical to SEQ ID NO: 1495
  Synthetic polypeptide

SEQ ID NO: 1497 - protein, 1253 aa, Artificial Sequence
  Synthetic polypeptide
DQVPWLTPVIPALWEAETGGSQVCTGTDMKLRLPASPETHLDMLRHLYQGCQVVQGNLELTYLPTNASLSFLQDIQEVQGYVLIAHNQVRQVPLQRLRIVRGTQLFEDNYALAVLDNGDPLNNTTPVTGASPGGLRELQLRSLTEILKGGVLIQRNPQLCYQDTILWKDIFHKNNQLALTLIDTNRSRACHPCSPMCKGSRCWGESSEDCQSLTRTVCAGGCARCKGPLPTDCCHEQCAAGCTGPKHSDCLACLHFNHSGICELHCPALVTYNTDTFESMPNPEGRYTFGASCVTACPYNYLSTDVGSCTLVCPLHNQEVTAEDGTQRCEKCSKPCARVCYGLGMEHLREVRAVTSANIQEFAGCKKIFGSLAFLPESFDGDPASNTAPLQPEQLQVFETLEEITGYLYISAWPDSLPDLSVFQNLQVIRGRILHNGAYSLTLQGLGISWLGLRSLRELGSGLALIHHNTHLCFVHTVPWDQLFRNPHQALLHTANRPEDECVGEGLACHQLCARGHCWGPGPTQCVNCSQFLRGQECVEECRVLQGLPREYVNARHCLPCHPECQPQNGSVTCFGPEADQCVACAHYKDPPFCVARCPSGVKPDLSYMPIWKFPDEEGACQPCPINCTHSCVDLDDKGCPAEQRASPLTSIISAVVGILLVVVLGVVFGILIKRRQQKIRKYTMRRLLQETELVEPLTPSGAMPNQAQMRILKETELRKVKVLGSGAFGTVYKGIWIPDGENVKIPVAIKVLRENTSPKANKEILDEAYVMAGVGSPYVSRLLGICLTSTVQLVTQLMPYGCLLDHVRENRGRLGSQDLLNWCMQIAKGMSYLEDVRLVHRDLAARNVLVKSPNHVKITDFGLARLLDIDETEYHADGGKVPIKWMALESILRRRFTHQSDVWSYGVTVWELMTFGAKPYDGIPAREIPDLLEKGERLPQPPICTIDVYMIMVKCWMIDSECRPRFRELVSEFSRMARDPQRFVVIQNEDLGPASPLDSTFYRSLLEDDDMGDLVDAEEYLVPQQGFFCPDPAPGAGGMVHHRHRSSSTRSGGGDLTLGLEPSEEEAPRSPLAPSEGAGSDVFDGDLGMGAAKGLQSLPTHDPSPLQRYSEDPTVPLPSETDGYVAPLTCSPQPEYVNQPDVRPQPPSPREGPLPAARPAGATLERPKTLSPGKNGVVKDVFAFGGAVENPEYLTPQGGAAPQPHPPPAFSPAFDNLYYWDQDPPERGAPPSTFKGTPTAENPEYLGLDVPV

SEQ ID NO: 1498 - protein, 1253 aa, Artificial Sequence; identical to SEQ ID NO: 1497
  Synthetic polypeptide

SEQ ID NO: 1499 - protein, 1252 aa, Artificial Sequence
  Synthetic polypeptide
SKFKTIEIGSVIKEPPHFVVKPRDQVVALGRTVTFQCEATGNPQPAIFWRREGSQNLLFSYQPPQSSSRFSVSQTGDLTITNVQRSDVGYYICQTLNVAGSIITKAYLEVTDVIADRPPPVIRQGPVNQTVAVDGTFVLSCVATGSPVPTILWRKDGVLVSTQDSRIKQLENGVLQIRYAKLGDTGRYTCIASTPSGEATWSAYIEVQEFGVPVQPPRPTDPNLIPSAPSKPEVTDVSRNTVTLSWQPNLNSGATPTSYIIEAFSHASGSSWQTVAENVKTETSAIKGLKPNAIYLFLVRAANAYGISDPSQISDPVKTQDVLPTSQGVDHKQVQRELGNAVLHLHNPTVLSSSSIEVHWTVDQQSQYIQGYKILYRPSGANHGESDWLVFEVRTPAKNSVVIPDLRKGVNYEIKARPFFNEFQGADSEIKFAKTLEEAPSAPPQGVTVSKNDGNGTAILVSWQPPPEDTQNGMVQEYKVWCLGNETRYHINKTVDGSTFSVVIPFLVPGIRYSVEVAASTGAGSGVKSEPQFIQLDAHGNPVSPEDQVSLAQQISDVVKQPAFIAGIGAACWIILMVFSIWLYRHRKKRNGLTSTYAGIRKVTYQRGGEAVSSGGRPGLLNISEPAAQPWLADTWPNTGNNHNDCSISCCTAGNGNSDSNLTTYSRPGQPTPYATTQLIQSNLSNNMNNGSGDSGEKHWKPLGQQKQEVAPVQYNIVEQNKLNKDYRANDTVPPTIPYNQSYDQNTGGSYNSSDRGSSTSGSQGHKKGARTPKVPKQGGMNWADLLPPPPAHPPPHSNSEEYNISVDESYDQEMPCPVPPARMYLQQDELEEEEDERGPTPPVRGAASSPAAVSYSHQSTATLTPSPQEELQPMLQDCPEETGHMQHQPDRRRQPVSPPPPPRPISPPHTYGYISGPLVSDMDTDAPEEEEDEADMEVAKMQTRRLLLRGLEQTPASSVGDLESSVTGSMINGWGSASEEDNISSGRSSVSSSDGSFFTDADFAQAVAAAAEYAGLKVARRQMQDAAGRRHFHASQCPRPTSPVSTDSNMSAAVMQKTRPAKKLKHQPGHLRRETYTDDLPPPPVPPPAIKSPTAQSKTQLEVRPVVVPKLPSMDARTDRSSDRKGSSYKGREVLDGRQVVDMRTNPGDPREAQEQQNDGKGRGNKAAKRDLPPAKTHLIQEDILPYCRPTFPTSNNPRDPSSSSSMSSRGSGSRQREQANVGRRNIAEMQVLGGYERGEDNNEELEETES

SEQ ID NO: 1500 - protein, 1249 aa, Artificial Sequence
  Synthetic polypeptide
HFLLPSLSLLPPWEDVLASPSPFCHDYKLPEASPPTPAVQPVEFKQKRKKTKTVKMIGVLTLFRYSDWQDKLFMSLGTIMAIAHGSGLPLMMIVFGEMTDKFVDTAGNFSFPVNFSLSLLNPGKILEEEMTRYAYYYSGLGAGVLVAAYIQVSFWTLAAGRQIRKIRQKFFHAILRQEIGWFDINDTTELNTRLTDDISKISEGIGDKVGMFFQAVATFFAGFIVGFIRGWKLTLVIMAISPILGLSAAVWAKILSAFSDKELAAYAKAGAVAEEALGAIRTVIAFGGQNKELERYQKHLENAKEIGIKKAISANISMGIAFLLIYASYALAFWYGSTLVISKEYTIGNAMTVFFSILIGAFSVGQAAPCIDAFANARGAAYVIFDIIDNNPKIDSFSERGHKPDSIKGNLEFNDVHFSYPSRANVKILKGLNLKVQSGQTVALVGSSGCGKSTTVQLIQRLYDPDEGTINIDGQDIRNFNVNYLREIIGVVSQEPVLFSTTIAENICYGRGNVTMDEIKKAVKEANAYEFIMKLPQKFDTLVGERGAQLSGGQKQRIAIARALVRNPKILLLDEATSALDTESEAEVQAALDKAREGRTTIVIAHRLSTVRNADVIAGFEDGVIVEQGSHSELMKKEGVYFKLVNMQTSGSQIQSEEFELNDEKAATRMAPNGWKSRLFRHSTQKNLKNSQMCQKSLDVETDGLEANVPPVSFLKVLKLNKTEWPYFVVGTVCAIANGGLQPAFSVIFSEIIAIFGPGDDAVKQQKCNIFSLIFLFLGIISFFTFFLQGFTFGKAGEILTRRLRSMAFKAMLRQDMSWFDDHKNSTGALSTRLATDAAQVQGATGTRLALIAQNIANLGTGIIISFIYGWQLTLLLLAVVPIIAVSGIVEMKLLAGNAKRDKKELEAAGKIATEAIENIRTVVSLTQERKFESMYVEKLYGPYRVFSAIVFGAVALGHASSFAPDYAKAKLSAAHLFMLFERQPLIDSYSEEGLKPDKFEGNITFNEVVFNYPTRANVPVLQGLSLEVKKGQTLALVGSSGCGKSTVVQLLERFYDPLAGTVLLDGQEAKKLNVQWLRAQLGIVSQEPILFDCSIAENIAYGDNSRVVSQDEIVSAAKAANIHPFIETLPHKYETRVGDKGTQLSGGQKQRIAIARALIRQPQILLLDEATSALDTESEKVVQEALDKAREGRTCIVIAHRLSTIQNADLIVVFQNGRVKEHGTHQQLLAQKGIYFSMVSVQAGTQNL

SEQ ID NO: 1501 - protein, 1249 aa, Artificial Sequence; identical to SEQ ID NO: 1500
  Synthetic polypeptide

SEQ ID NO: 1502 - protein, 1217 aa, Artificial Sequence
  Synthetic polypeptide
AVIDPRRPTPLQASCQSQSQARSSQDCPQILPSTQIYVPVGVVKPITLAARNLPQPQSGQRGYECLFHIPGSPARVTALRFNSSSLQCQNSSYSYEGNDVSDLPVNLSVVWNGNFVIDNPQNIQAHLYKCPALRESCGLCLKADPRFECGWCVAERRCSLRHHCAADTPASWMHARHGSSRCTDPKILKLSPETGPRQGGTRLTITGENLGLRFEDVRLGVRVGKVLCSPVESEYISAEQIVCEIGDASSVRAHDALVEVCVRDCSPHYRALSPKRFTFVTPTFYRVSPSRGPLSGGTWIGIEGSHLNAGSDVAVSVGGRPCSFSWRNSREIRCLTPPGQSPGSAPIIININRAQLTNPEVKYNYTEDPTILRIDPEWSINSGGTLLTVTGTNLATVREPRIRAKYGGIERENGCLVYNDTTMVCRAPSVANPVRSPPELGERPDELGFVMDNVRSLLVLNSTSFLYYPDPVLEPLSPTGLLELKPSSPLILKGRNLLPPAPGNSRLNYTVLIGSTPCTLTVSETQLLCEAPNLTGQHKVTVRAGGFEFSPGTLQVYSDSLLTLPAIVGIGGGGGLLLLVIVAVLIAYKRKSRDADRTLKRLQLQMDNLESRVALECKEAFAELQTDIHELTNDLDGAGIPFLDYRTYAMRVLFPGIEDHPVLKEMEVQANVEKSLTLFGQLLTKKHFLLTFIRTLEAQRSFSMRDRGNVASLIMTALQGEMEYATGVLKQLLSDLIEKNLESKNHPKLLLRRTESVAEKMLTNWFTFLLYKFLKECAGEPLFMLYCAIKQQMEKGPIDAITGEARYSLSEDKLIRQQIDYKTLTLNCVNPENENAPEVPVKGLDCDTVTQAKEKLLDAAYKGVPYSQRPKAADMDLEWRQGRMARIILQDEDVTTKIDNDWKRLNTLAHYQVTDGSSVALVPKQTSAYNISNSSTFTKSLSRYESMLRTASSPDSLRSRTPMITPDLESGTKLWHLVKNHDHLDQREGDRGSKMVSEIYLTRLLATKGTLQKFVDDLFETIFSTAHRGSALPLAIKYMFDFLDEQADKHQIHDADVRHTWKSNCLPLRFWVNVIKNPQFVFDIHKNSITDACLSVVAQTFMDSCSTSEHKLGKDSPSNKLLYAKDIPNYKSWVERYYADIAKMPAISDQDMSAYLAEQSRLHLSQFNSMSALHEIYSYITKYKDEILAALEKDEQARRQRLRSKLEQVVDTMALSS

SEQ ID NO: 1503 - protein, 1217 aa, Artificial Sequence; identical to SEQ ID NO: 1502
  Synthetic polypeptide

SEQ ID NO: 1504 - protein, 1212 aa, Artificial Sequence
  Synthetic polypeptide
TVSSIRAETVGISTAHTGPGTHPGLSEHLLNVCQGTSNKLTQLGTFEDHFLSLQRMFNNCEVVLGNLEITYVQRNYDLSFLKTIQEVAGYVLIALNTVERIPLENLQIIRGNMYYENSYALAVLSNYDANKTGLKELPMRNLQEILHGAVRFSNNPALCNVESIQWRDIVSSDFLSNMSMDFQNHLGSCQKCDPSCPNGSCWGAGEENCQKLTKIICAQQCSGRCRGKSPSDCCHNQCAAGCTGPRESDCLVCRKFRDEATCKDTCPPLMLYNPTTYQMDVNPEGKYSFGATCVKKCPRNYVVTDHGSCVRACGADSYEMEEDGVRKCKKCEGPCRKVCNGIGIGEFKDSLSINATNIKHFKNCTSISGDLHILPVAFRGDSFTHTPPLDPQELDILKTVKEITGFLLIQAWPENRTDLHAFENLEIIRGRTKQHGQFSLAVVSLNITSLGLRSLKEISDGDVIISGNKNLCYANTINWKKLFGTSGQKTKIISNRGENSCKATGQVCHALCSPEGCWGPEPRDCVSCRNVSRGRECVDKCNLLEGEPREFVENSECIQCHPECLPQAMNITCTGRGPDNCIQCAHYIDGPHCVKTCPAGVMGENNTLVWKYADAGHVCHLCHPNCTYGCTGPGLEGCPTNGPKIPSIATGMVGALLLLLVVALGIGLFMRRRHIVRKRTLRRLLQERELVEPLTPSGEAPNQALLRILKETEFKKIKVLGSGAFGTVYKGLWIPEGEKVKIPVAIKELREATSPKANKEILDEAYVMASVDNPHVCRLLGICLTSTVQLITQLMPFGCLLDYVREHKDNIGSQYLLNWCVQIAKGMNYLEDRRLVHRDLAARNVLVKTPQHVKITDFGLAKLLGAEEKEYHAEGGKVPIKWMALESILHRIYTHQSDVWSYGVTVWELMTFGSKPYDGIPASEISSILEKGERLPQPPICTIDVYMIMVKCWMIDADSRPKFRELIIEFSKMARDPQRYLVIQGDERMHLPSPTDSNFYRALMDEEDMDDVVDADEYLIPQQGFFSSPSTSRTPLLSSLSATSNNSTVACIDRNGLQSCPIKEDSFLQRYSSDPTGALTEDSIDDTFLPVPEYINQSVPKRPAGSVQNPVYHNQPLNPAPSRDPHYQDPHSTAVGNPEYLNTVQPTCVNSTFDSPAHWAQKGSHQISLDNPDYQQDFFPKEAKPNGIFKGSTAENAEYLRVAPQSSEFIGA

SEQ ID NO: 1505 - protein, 1187 aa, Artificial Sequence
  Synthetic polypeptide
TWETEVVDIQEVQGYVLIAHNQVRQVPLQRLRIVRGTQLFEDNYALAVLDNGDPLNNTTPVTGASPGGLRELQLRSLTEILKGGVLIQRNPQLCYQDTILWKDIFHKNNQLALTLIDTNRSRACHPCSPMCKGSRCWGESSEDCQSLTRTVCAGGCARCKGPLPTDCCHEQCAAGCTGPKHSDCLACLHFNHSGICELHCPALVTYNTDTFESMPNPEGRYTFGASCVTACPYNYLSTDVGSCTLVCPLHNQEVTAEDGTQRCEKCSKPCARVCYGLGMEHLREVRAVTSANIQEFAGCKKIFGSLAFLPESFDGDPASNTAPLQPEQLQVFETLEEITGYLYISAWPDSLPDLSVFQNLQVIRGRILHNGAYSLTLQGLGISWLGLRSLRELGSGLALIHHNTHLCFVHTVPWDQLFRNPHQALLHTANRPEDECVGEGLACHQLCARGHCWGPGPTQCVNCSQFLRGQECVEECRVLQGLPREYVNARHCLPCHPECQPQNGSVTCFGPEADQCVACAHYKDPPFCVARCPSGVKPDLSYMPIWKFPDEEGACQPCPINCTHSCVDLDDKGCPAEQRASPLTSIISAVVGILLVVVLGVVFGILIKRRQQKIRKYTMRRLLQETELVEPLTPSGAMPNQAQMRILKETELRKVKVLGSGAFGTVYKGIWIPDGENVKIPVAIKVLRENTSPKANKEILDEAYVMAGVGSPYVSRLLGICLTSTVQLVTQLMPYGCLLDHVRENRGRLGSQDLLNWCMQIAKGMSYLEDVRLVHRDLAARNVLVKSPNHVKITDFGLARLLDIDETEYHADGGKVPIKWMALESILRRRFTHQSDVWSYGVTVWELMTFGAKPYDGIPAREIPDLLEKGERLPQPPICTIDVYMIMVKCWMIDSECRPRFRELVSEFSRMARDPQRFVVIQNEDLGPASPLDSTFYRSLLEDDDMGDLVDAEEYLVPQQGFFCPDPAPGAGGMVHHRHRSSSTRSGGGDLTLGLEPSEEEAPRSPLAPSEGAGSDVFDGDLGMGAAKGLQSLPTHDPSPLQRYSEDPTVPLPSETDGYVAPLTCSPQPEYVNQPDVRPQPPSPREGPLPAARPAGATLERPKTLSPGKNGVVKDVFAFGGAVENPEYLTPQGGAAPQPHPPPAFSPAFDNLYYWDQDPPERGAPPSTFKGTPTAENPEYLGLDVPV

SEQ ID NO: 1506 - protein, 1187 aa, Artificial Sequence; identical to SEQ ID NO: 1505
  Synthetic polypeptide

SEQ ID NO: 1507 - protein, 1187 aa, Artificial Sequence; identical to SEQ ID NO: 1505
  Synthetic polypeptide

SEQ ID NO: 1508 - protein, 1187 aa, Artificial Sequence; identical to SEQ ID NO: 1505
  Synthetic polypeptide

SEQ ID NO: 1509 - protein, 1187 aa, Artificial Sequence; identical to SEQ ID NO: 1505
  Synthetic polypeptide

SEQ ID NO: 1510 - protein, 1185 aa, Artificial Sequence
  Synthetic polypeptide
QKKGLDIQEVQGYVLIAHNQVRQVPLQRLRIVRGTQLFEDNYALAVLDNGDPLNNTTPVTGASPGGLRELQLRSLTEILKGGVLIQRNPQLCYQDTILWKDIFHKNNQLALTLIDTNRSRACHPCSPMCKGSRCWGESSEDCQSLTRTVCAGGCARCKGPLPTDCCHEQCAAGCTGPKHSDCLACLHFNHSGICELHCPALVTYNTDTFESMPNPEGRYTFGASCVTACPYNYLSTDVGSCTLVCPLHNQEVTAEDGTQRCEKCSKPCARVCYGLGMEHLREVRAVTSANIQEFAGCKKIFGSLAFLPESFDGDPASNTAPLQPEQLQVFETLEEITGYLYISAWPDSLPDLSVFQNLQVIRGRILHNGAYSLTLQGLGISWLGLRSLRELGSGLALIHHNTHLCFVHTVPWDQLFRNPHQALLHTANRPEDECVGEGLACHQLCARGHCWGPGPTQCVNCSQFLRGQECVEECRVLQGLPREYVNARHCLPCHPECQPQNGSVTCFGPEADQCVACAHYKDPPFCVARCPSGVKPDLSYMPIWKFPDEEGACQPCPINCTHSCVDLDDKGCPAEQRASPLTSIISAVVGILLVVVLGVVFGILIKRRQQKIRKYTMRRLLQETELVEPLTPSGAMPNQAQMRILKETELRKVKVLGSGAFGTVYKGIWIPDGENVKIPVAIKVLRENTSPKANKEILDEAYVMAGVGSPYVSRLLGICLTSTVQLVTQLMPYGCLLDHVRENRGRLGSQDLLNWCMQIAKGMSYLEDVRLVHRDLAARNVLVKSPNHVKITDFGLARLLDIDETEYHADGGKVPIKWMALESILRRRFTHQSDVWSYGVTVWELMTFGAKPYDGIPAREIPDLLEKGERLPQPPICTIDVYMIMVKCWMIDSECRPRFRELVSEFSRMARDPQRFVVIQNEDLGPASPLDSTFYRSLLEDDDMGDLVDAEEYLVPQQGFFCPDPAPGAGGMVHHRHRSSSTRSGGGDLTLGLEPSEEEAPRSPLAPSEGAGSDVFDGDLGMGAAKGLQSLPTHDPSPLQRYSEDPTVPLPSETDGYVAPLTCSPQPEYVNQPDVRPQPPSPREGPLPAARPAGATLERPKTLSPGKNGVVKDVFAFGGAVENPEYLTPQGGAAPQPHPPPAFSPAFDNLYYWDQDPPERGAPPSTFKGTPTAENPEYLGLDVPV

SEQ ID NO: 1511 - protein, 1185 aa, Artificial Sequence; identical to SEQ ID NO: 1510
  Synthetic polypeptide

SEQ ID NO: 1512 - protein, 1185 aa, Artificial Sequence; identical to SEQ ID NO: 1510
  Synthetic polypeptide

SEQ ID NO: 1513 - protein, 1185 aa, Artificial Sequence; identical to SEQ ID NO: 1510
  Synthetic polypeptide

SEQ ID NO: 1514 - protein, 1185 aa, Artificial Sequence; identical to SEQ ID NO: 1510
  Synthetic polypeptide

SEQ ID NO: 1515 - protein, 1180 aa, Artificial Sequence
  Synthetic polypeptide
AVIALLHPSLRDRYNALLSNMSRIYSTAKVCLPNKTATCWSLDPDLTNILASSRSYAMLLFAWEGWHNAAGIPLKPLYEDFTALSNEAYKQDGFTDTGAYWRSWYNSPTFEDDLEHLYQQLEPLYLNLHAFVRRALHRRYGDRYINLRGPIPAHLLGDMWAQSWENIYDMVVPFPDKPNLDVTSTMLQQGWNATHMFRVAEEFFTSLELSPMPPEFWEGSMLEKPADGREVVCHASAWDFYNRKDFRIKQCTRVTMDQLSTVHHEMGHIQYYLQYKDLPVSLRRGANPGFHEAIGDVLALSVSTPEHLHKIGLLDRVTNDTESDINYLLKMALEKIAFLPFGYLVDQWRWGVFSGRTPPSRYNFDWWYLRTKYQGICPPVTRNETHFDAGAKFHVPNVTPYIRYFVSFVLQFQFHEALCKEAGYEGPLHQCDIYRSTKAGAKLRKVLQAGSSRPWQEVLKDMVGLDALDAQPLLKYFQPVTQWLQEQNQQNGEVLGWPEYQWHPPLPDNYPEGIDLVTDEAEASKFVEEYDRTSQVVWNEYAEANWNYNTNITTETSKILLQKNMQIANHTLKYGTQARKFDVNQLQNTTIKRIIKKVQDLERAALPAQELEEYNKILLDMETTYSVATVCHPNGSCLQLEPDLTNVMATSRKYEDLLWAWEGWRDKAGRAILQFYPKYVELINQAARLNGYVDAGDSWRSMYETPSLEQDLERLFQELQPLYLNLHAYVRRALHRHYGAQHINLEGPIPAHLLGNMWAQTWSNIYDLVVPFPSAPSMDTTEAMLKQGWTPRRMFKEADDFFTSLGLLPVPPEFWNKSMLEKPTDGREVVCHASAWDFYNGKDFRIKQCTTVNLEDLVVAHHEMGHIQYFMQYKDLPVALREGANPGFHEAIGDVLALSVSTPKHLHSLNLLSSEGGSDEHDINFLMKMALDKIAFIPFSYLVDQWRWRVFDGSITKENYNQEWWSLRLKYQGLCPPVPRTQGDFDPGAKFHIPSSVPYIRYFVSFIIQFQFHEALCQAAGHTGPLHKCDIYQSKEAGQRLATAMKLGFSRPWPEAMQLITGQPNMSASAMLSYFKPLLDWLRTENELHGEKLGWPQYNWTPNSARSEGPLPDSGRVSFLGLDLDAQQARVGQWLLLFLGIALLVATLGLSQRLFSIRHRSLHRHSHGPQFGSEVELRHS

SEQ ID NO: 1516 - protein, 1167 aa, Artificial Sequence
  Synthetic polypeptide
QHQEVTLYGLKWRVCPSTCGKRACTENNECCHPECLGSCSAPDNDTACVACRHYYYAGVCVPACPPNTYRFEGWRCVDRDFCANILSAESSDSEGFVIHDGECMQECPSGFIRNGSQSMYCIPCEGPCPKVCEEEKKTKTIDSVTSAQMLQGCTIFKGNLLINIRRGNNIASELENFMGLIEVVTGYVKIRHSHALVSLSFLKNLRLILGEEQLEGNYSFYVLDNQNLQQLWDWDHRNLTIKAGKMYFAFNPKLCVSEIYRMEEVTGTKGRQSKGDINTRNNGERASCESDVLHFTSTTTSKNRIIITWHRYRPPDYRDLISFTVYYKEAPFKNVTEYDGQDACGSNSWNMVDVDLPPNKDVEPGILLHGLKPWTQYAVYVKAVTLTMVENDHIRGAKSEILYIRTNASVPSIPLDVLSASNSSSQLIVKWNPPSLPNGNLSYYIVRWQRQPQDGYLYRHNYCSKDKIPIRKYADGTIDIEEVTENPKTEVCGGEKGPCCACPKTEAEKQAEKEEAEYRKVFENFLHNSIFVPRPERKRRDVMQVANTTMSSRSRNTTAADTYNITDPEELETEYPFFESRVDNKERTVISNLRPFTLYRIDIHSCNHEAEKLGCSASNFVFARTMPAEGADDIPGPVTWEPRPENSIFLKWPEPENPNGLILMYEIKYGSQVEDQRECVSRQEYRKYGGAKLNRLNPGNYTARIQATSLSGNGSWTDPVFFYVQAKTGYENFIHLIIALPVAVLLIVGGLVIMLYVFHRKRNNSRLGNGVLYASVNPEYFSAADVYVPDEWEVAREKITMSRELGQGSFGMVYEGVAKGVVKDEPETRVAIKTVNEAASMRERIEFLNEASVMKEFNCHHVVRLLGVVSQGQPTLVIMELMTRGDLKSYLRSLRPEMENNPVLAPPSLSKMIQMAGEIADGMAYLNANKFVHRDLAARNCMVAEDFTVKIGDFGMTRDIYETDYYRKGGKGLLPVRWMSPESLKDGVFTTYSDVWSFGVVLWEIATLAEQPYQGLSNEQVLRFVMEGGLLDKPDNCPDMLFELMRMCWQYNPKMRPSFLEIISSIKEEMEPGFREVSFYYSEENKLPEPEELDLEPENMESVPLDPSASSSSLPLPDRHSGHKAENGPGPGVLVLRASFDERQPYAHMNGGRKNERALPLPQSSTC

SEQ ID NO: 1517 - protein, 1166 aa, Artificial Sequence
  Synthetic polypeptide
QHQEVTLYGLKWRVCPSTCGKRACTENNECCHPECLGSCSAPDNDTACVACRHYYYAGVCVPACPPNTYRFEGWRCVDRDFCANILSAESSDSEGFVIHDGECMQECPSGFIRNGSQSMYCIPCEGPCPKVCEEEKKTKTIDSVTSAQMLQGCTIFKGNLLINIRRGNNIASELENFMGLIEVVTGYVKIRHSHALVSLSFLKNLRLILGEEQLEGNYSFYVLDNQNLQQLWDWDHRNLTIKAGKMYFAFNPKLCVSEIYRMEEVTGTKGRQSKGDINTRNNGERASCESDVLHFTSTTTSKNRIIITWHRYRPPDYRDLISFTVYYKEAPFKNVTEYDGQDACGSNSWNMVDVDLPPNKDVEPGILLHGLKPWTQYAVYVKAVTLTMVENDHIRGAKSEILYIRTNASVPSIPLDVLSASNSSSQLIVKWNPPSLPNGNLSYYIVRWQRQPQDGYLYRHNYCSKDKIPIRKYADGTIDIEEVTENPKTEVCGGEKGPCCACPKTEAEKQAEKEEAEYRKVFENFLHNSIFVPRPERKRRDVMQVANTTMSSRSRNTTAADTYNITDPEELETEYPFFESRVDNKERTVISNLRPFTLYRIDIHSCNHEAEKLGCSASNFVFARTMPAEGADDIPGPVTWEPRPENSIFLKWPEPENPNGLILMYEIKYGSQVEDQRECVSRQEYRKYGGAKLNRLNPGNYTARIQATSLSGNGSWTDPVFFYVQAKRYENFIHLIIALPVAVLLIVGGLVIMLYVFHRKRNNSRLGNGVLYASVNPEYFSAADVYVPDEWEVAREKITMSRELGQGSFGMVYEGVAKGVVKDEPETRVAIKTVNEAASMRERIEFLNEASVMKEFNCHHVVRLLGVVSQGQPTLVIMELMTRGDLKSYLRSLRPEMENNPVLAPPSLSKMIQMAGEIADGMAYLNANKFVHRDLAARNCMVAEDFTVKIGDFGMTRDIYETDYYRKGGKGLLPVRWMSPESLKDGVFTTYSDVWSFGVVLWEIATLAEQPYQGLSNEQVLRFVMEGGLLDKPDNCPDMLFELMRMCWQYNPKMRPSFLEIISSIKEEMEPGFREVSFYYSEENKLPEPEELDLEPENMESVPLDPSASSSSLPLPDRHSGHKAENGPGPGVLVLRASFDERQPYAHMNGGRKNERALPLPQSSTC

SEQ ID NO: 1518 - protein, 1121 aa, Artificial Sequence
  Synthetic polypeptide
VVVGLRALGQKLRDLHSNLHSVTESSLTLACGDPKAKPSYLIDKNLESAVKFIVRKFPAVETRNNNQQLAQLQKEKSEILKNLALYYFTFVDVMEFKDHVCELLNTIDVCQVFFDITVNFDLTKNYLDLIITYTTLMILLSRIEERKAIIGLYNYAHEMTHGASDREYPRLGQMIVDYENPLKKMMEEFVPHSKSLSDALISLQMVYPRRNLSADQWRNAQLLSLISAPSTMLNPAQSDTMPCEYLSLDAMEKWIIFGFILCHGILNTDATALNLWKLALQSSSCLSLFRDEVFHIHKAAEDLFVNIRGYNKRINDIRECKEAAVSHAGSMHRERRKFLRSALKELATVLSDQPGLLGPKALFVFMALSFARDEIIWLLRHADNMPKKSADDFIDKHIAELIFYMEELRAHVRKYGPVMQRYYVQYLSGFDAVVLNELVQNLSVCPEDESIIMSSFVNTMTSLSVKQVEDGEVFDFRGMRLDWFRLQAYTSVSKASLGLADHRELGKMMNTIIFHTKMVDSLVEMLVETSDLSIFCFYSRAFEKMFQQCLELPSQSRYSIAFPLLCTHFMSCTHELCPEERHHIGDRSLSLCNMFLDEMAKQARNLITDICTEQCTLSDQLLPKHCAKTISQAVNKKSKKQTGKKGEPEREKPGVESMRKNRLVVTNLDKLHTALSELCFSINYVPNMVVWEHTFTPREYLTSHLEIRFTKSIVGMTMYNQATQEIAKPSELLTSVRAYMTVLQSIENYVQIDITRVFNNVLLQQTQHLDSHGEPTITSLYTNWYLETLLRQVSNGHIAYFPAMKAFVNLPTENELTFNAEEYSDISEMRSLSELLGPYGMKFLSESLMWHISSQVAELKKLVVENVDVLTQMRTSFDKPDQMAALFKRLSSVDSVLKRMTIIGVILSFRSLAQEALRDVLSYHIPFLVSSIEDFKDHIPRETDMKVAMNVYELSSAAGLPCEIDPALVVALSSQKSENISPEEEYKIACLLMVFVAVSLPTLASNVMSQYSPAIEGHCNNIHCLAKAINQIAAALFTIHKGSIEDRLKEFLALASSSLLKIGQETDKTTTRNRESVYLLLDMIVQESPFLTMDLLESCFPYVLLRNAYHAVYKQSVTSSA

SEQ ID NO: 1519 - protein, 1121 aa, Artificial Sequence; identical to SEQ ID NO: 1518
  Synthetic polypeptide

SEQ ID NO: 1520 - protein, 1108 aa, Artificial Sequence
  Synthetic polypeptide
ILHSLICFNVGSGLHLQVLSTRNENKLLPKHPHLVRQKRAWITAPVALREGEDLSKKNPIAKIHSDLAEERGLKITYKYTGKGITEPPFGIFVFNKDTGELNVTSILDREETPFFLLTGYALDARGNNVEKPLELRIKVLDINDNEPVFTQDVFVGSVEELSAAHTLVMKINATDADEPNTLNSKISYRIVSLEPAYPPVFYLNKDTGEIYTTSVTLDREEHSSYTLTVEARDGNGEVTDKPVKQAQVQIRILDVNDNIPVVENKVLEGMVEENQVNVEVTRIKVFDADEIGSDNWLANFTFASGNEGGYFHIETDAQTNEGIVTLIKEVDYEEMKNLDFSVIVANKAAFHKSIRSKYKPTPIPIKVKVKNVKEGIHFKSSVISIYVSESMDRSSKGQIIGNFQAFDEDTGLPAHARYVKLEDRDNWISVDSVTSEIKLAKLPDFESRYVQNGTYTVKIVAISEDYPRKTITGTVLINVEDINDNCPTLIEPVQTICHDAEYVNVTAEDLDGHPNSGPFSFSVIDKPPGMAEKWKIARQESTSVLLQQSEKKLGRSEIQFLISDNQGFSCPEKQVLTLTVCECLHGSGCREAQHDSYVGLGPAAIALMILAFLLLLLVPLLLLMCHCGKGAKGFTPIPGTIEMLHPWNNEGAPPEDKVVPSFLPVDQGGSLVGRNGVGGMAKEATMKGSSSASIVKGQHEMSEMDGRWEEHRSLLSGRATQFTGATGAIMTTETTKTARATGASRDMAGAQAAAVALNEEFLRNYFTDKAASYTEEDENHTAKDCLLVYSQEETESLNASIGCCSFIEGELDDRFLDDLGLKFKTLAEVCLGQKIDINKEIEQRQKPATETSMNTASHSLCEQTMVNSENTYSSGSSFPVPKSLQEANAEKVTQEIVTERSVSSRQAQKVATPLPDPMASRNVIATETSYVTGSTMPPTTVILGPSQPQSLIVTERVYAPASTLVDQPYANEGTVVVTERVIQPHGGGSNPLEGTQHLQDVPYVMVRERESFLAPSSGVQPTLAMPNIAVGQNVTVTERVLAPASTLQSSYQIPTENSMTARNTTVSGAGVPGPLPDFGLEESGHSNSTITTSSTRVTKHSTVQHSYS

SEQ ID NO: 1521 - protein, 1098 aa, Artificial Sequence
  Synthetic polypeptide
QLGLVEGMWDLKAGQPEFQSCLLLTSFMRRELTPASLSCLLCKMEVAAPVSGACYADPPRVPARHTVVCTGTDMKLRLPASPETHLDMLRHLYQGCQVVQGNLELTYLPTNASLSFLQDIQEVQGYVLIAHNQVRQVPLQRLRIVRGTQLFEDNYALAVLDNGDPLNNTTPVTGASPGGLRELQLRSLTEILKGGVLIQRNPQLCYQDTILWKDIFHKNNQLALTLIDTNRSRACHPCSPMCKGSRCWGESSEDCQSLTRTVCAGGCARCKGPLPTDCCHEQCAAGCTGPKHSDCLACLHFNHSGICELHCPALVTYNTDTFESMPNPEGRYTFGASCVTACPYNYLSTDVGSCTLVCPLHNQEVTAEDGTQRCEKCSKPCARVCYGLGMEHLREVRAVTSANIQEFAGCKKIFGSLAFLPESFDGDPASNTAPLQPEQLQVFETLEEITGYLYISAWPDSLPDLSVFQNLQVIRGRILHNGAYSLTLQGLGISWLGLRSLRELGSGLALIHHNTHLCFVHTVPWDQLFRNPHQALLHTANRPEDECVGEGLACHQLCARGHCWGPGPTQCVNCSQFLRGQECVEECRVLQGLPREYVNARHCLPCHPECQPQNGSVTCFGPEADQCVACAHYKDPPFCVARCPSGVKPDLSYMPIWKFPDEEGACQPCPINCTHSCVDLDDKGCPAEQRASPLTSIISAVVGILLVVVLGVVFGILIKRRQQKIRKYTMRRLLQETELVEPLTPSGAMPNQAQMRILKETELRKVKVLGSGAFGTVYKGIWIPDGENVKIPVAIKVLRENTSPKANKEILDEAYVMAGVGSPYVSRLLGICLTSTVQLVTQLMPYGCLLDHVRENRGRLGSQDLLNWCMQIAKGMSYLEDVRLVHRDLAARNVLVKSPNHVKITDFGLARLLDIDETEYHADGGKVPIKWMALESILRRRFTHQSDVWSYGVTVWELMTFGAKPYDGIPAREIPDLLEKGERLPQPPICTIDVYMIMVKCWMIDSECRPRFRELVSEFSRMARDPQRFVVIQNEDLGPASPLDSTFYRSLLEDDDMGDLVDAEEYLVPQQGFFCPDPAPGAGGMVHHRHRSSSTRNM

SEQ ID NO: 1522 - protein, 1093 aa, Artificial Sequence
  Synthetic polypeptide
TVSSIRAETVGISTAHTGPGTHPGLSEHLLNVCQGTSNKLTQLGTFEDHFLSLQRMFNNCEVVLGNLEITYVQRNYDLSFLKTIQEVAGYVLIALNTVERIPLENLQIIRGNMYYENSYALAVLSNYDANKTGLKELPMRNLQGQKCDPSCPNGSCWGAGEENCQKLTKIICAQQCSGRCRGKSPSDCCHNQCAAGCTGPRESDCLVCRKFRDEATCKDTCPPLMLYNPTTYQMDVNPEGKYSFGATCVKKCPRNYVVTDHGSCVRACGADSYEMEEDGVRKCKKCEGPCRKVCNGIGIGEFKDSLSINATNIKHFKNCTSISGDLHILPVAFRGDSFTHTPPLDPQELDILKTVKEITGFLLIQAWPENRTDLHAFENLEIIRGRTKQHGQFSLAVVSLNITSLGLRSLKEISDGDVIISGNKNLCYANTINWKKLFGTSGQKTKIISNRGENSCKATGQVCHALCSPEGCWGPEPRDCVSCRNVSRGRECVDKCNLLEGEPREFVENSECIQCHPECLPQAMNITCTGRGPDNCIQCAHYIDGPHCVKTCPAGVMGENNTLVWKYADAGHVCHLCHPNCTYGCTGPGLEGCPTNGPKIPSIATGMVGALLLLLVVALGIGLFMRRRHIVRKRTLRRLLQERELVEPLTPSGEAPNQALLRILKETEFKKIKVLGSGAFGTVYKGLWIPEGEKVKIPVAIKELREATSPKANKEILDEAYVMASVDNPHVCRLLGICLTSTVQLITQLMPFGCLLDYVREHKDNIGSQYLLNWCVQIAKGMNYLEDRRLVHRDLAARNVLVKTPQHVKITDFGLAKLLGAEEKEYHAEGGKVPIKWMALESILHRIYTHQSDVWSYGVTVWELMTFGSKPYDGIPASEISSILEKGERLPQPPICTIDVYMIMVKCWMIDADSRPKFRELIIEFSKMARDPQRYLVIQGDERMHLPSPTDSNFYRALMDEEDMDDVVDADEYLIPQQGFFSSPSTSRTPLLSSLSATSNNSTVACIDRNGLQSCPIKEDSFLQRYSSDPTGALTEDSIDDTFLPVPGEWLVWKQSCSSTSSTHSAAASLQCPSQVLPPASPEGETVADLQTQ

SEQ ID NO: 1523 - protein, 1080 aa, Artificial Sequence
  Synthetic polypeptide
VPVLPVAHKLYEARANPCQPQLSSLQDGGCSPSLWSMLCRSTESACQAHMCTGTDMKLRLPASPETHLDMLRHLYQGCQVVQGNLELTYLPTNASLSFLQDIQEVQGYVLIAHNQVRQVPLQRLRIVRGTQLFEDNYALAVLDNGDPLNNTTPVTGASPGGLRELQLRSLTEILKGGVLIQRNPQLCYQDTILWKDIFHKNNQLALTLIDTNRSRACHPCSPMCKGSRCWGESSEDCQSLTRTVCAGGCARCKGPLPTDCCHEQCAAGCTGPKHSDCLACLHFNHSGICELHCPALVTYNTDTFESMPNPEGRYTFGASCVTACPYNYLSTDVGSCTLVCPLHNQEVTAEDGTQRCEKCSKPCARVCYGLGMEHLREVRAVTSANIQEFAGCKKIFGSLAFLPESFDGDPASNTAPLQPEQLQVFETLEEITGYLYISAWPDSLPDLSVFQNLQVIRGRILHNGAYSLTLQGLGISWLGLRSLRELGSGLALIHHNTHLCFVHTVPWDQLFRNPHQALLHTANRPEDECVGEGLACHQLCARGHCWGPGPTQCVNCSQFLRGQECVEECRVLQGLPREYVNARHCLPCHPECQPQNGSVTCFGPEADQCVACAHYKDPPFCVARCPSGVKPDLSYMPIWKFPDEEGACQPCPINCTHSCVDLDDKGCPAEQRASPLTSIISAVVGILLVVVLGVVFGILIKRRQQKIRKYTMRRLLQETELVEPLTPSGAMPNQAQMRILKETELRKVKVLGSGAFGTVYKGIWIPDGENVKIPVAIKVLRENTSPKANKEILDEAYVMAGVGSPYVSRLLGICLTSTVQLVTQLMPYGCLLDHVRENRGRLGSQDLLNWCMQIAKGMSYLEDVRLVHRDLAARNVLVKSPNHVKITDFGLARLLDIDETEYHADGGKVPIKWMALESILRRRFTHQSDVWSYGVTVWELMTFGAKPYDGIPAREIPDLLEKGERLPQPPICTIDVYMIMVKCWMIDSECRPRFRELVSEFSRMARDPQRFVVIQNEDLGPASPLDSTFYRSLLEDDDMGDLVDAEEYLVPQQGFFCPDPAPGAGGMVHHRHRSSSTRNM

SEQ ID NO: 1524 - protein, 1076 aa, Artificial Sequence
  Synthetic polypeptide
SRLPWPPKVPRLQPLPGCHPVWEVRSVSAWPPIVWDVRSPSAWLPSLESEERLCPAPCSCRIPLLDCSRRKLPAPSWRALSGLLPPDTAILDFSHNRLSNWNISLESQTLQEVKMNYNELTEIPYFGEPTSNITLLSLVHNIIPEINAQALQFYPALESLDLSSNIISEIKTSSFPRMQLKYLNLSNNRITTLEAGCFDNLSSSLLVVKLNRNRMSMIPPKIFKLPHLQFLELKRNRIKIVEGLTFQGLDSLRSLKMQRNGISKLKDGAFFGLNNMEELELEHNNLTRVNKGWLYGLRMLQQLYVSQNAIERISPDAWEFCQRLSELDLSYNQLTRLDESAFVGLSLLERLNLGDNRVTHIADGVFRFLSNLQTLDLRNNEISWAIEDASEAFAGLTSLTKLILQGNQIKSITKKAFIGLESLEHLDLNNNAIMSIQENAFSQTHLKELILNTSSLLCDCHLKWLLQWLVDNNFQHSVNVSCAHPEWLAGQSILNVDLKDFVCDDFLKPQIRTHPETIIALRGMNVTLTCTAVSSSDSPMSTVWRKDSEILYDVDTENFVRYWQQAGEALEYTSILHLFNVNFTDEGKYQCIVTNHFGSNYSQKAKLTVNEMPSFLKTPMDLTIRTGAMARLECAAEGHPAPQISWQKDGGTDFPAARERRMHVMPEDDVFFIANVKIEDMGIYSCMAQNTAGGLSANASLTVLETPSFIRPLEDKTVTRGETAVLQCIAGGSPAPRLNWTKDDGPLLVTERHFFAAANQLLIIVDAGLEDAGKYTCIMSNTLGTERGHIYLNVISSPNCDSSQSSIGHEDDGWTTVGIVIIVVVCCVVGTSLIWVIVIYHMRRKNEDYSITNTEELNLPADIPSYLSSQGTLSEPQEGYSNSEAGSHQQLMPPANGYIHKGTDGGTGTRVICSDCYDNANIYSRTREYCPYTYIAEEDVLDQTLSSLMVQMPKETYLVHPPQDTTALESLIPSANREPSAFPTNHERISEKKLPSTQMSGETLQRPVWNINRELGLPHPPFSQQPVHESPQLHQNEGLAGREPDCSASSMSCHRLQDHAFDFSRTRNIQDGSEGT

SEQ ID NO: 1525 - protein, 1067 aa, Artificial Sequence
  Synthetic polypeptide
RCPAVDGAALLSKIREEERRILEKAGYFQSITVGVAPIVVVIASVVTFSVHMTLGFDLTAAQAFTVVTVFNSMTFALKVTPFSVKSLSEASVAVDRFKSLFLMEEVHMIKNKPASPHIKIEMKNATLAWDSSHSSIQNSPKLTPKMKKDKRASRGKKEKVRQLQRTEHQAVLAEQKGHLLLDSDERPSPEEEEGKHIHLGHLRLQRTLHSIDLEIQEGKLVGICGSVGSGKTSLISAILGQMTLLEGSIAISGTFAYVAQQAWILNATLRDNILFGKEYDEERYNSVLNSCCLRPDLAILPSSDLTEIGERGANLSGGQRQRISLARALYSDRSIYILDDPLSALDAHVGNHIFNSAIRKHLKSKTVLFVTHQLQYLVDCDEVIFMKEGCITERGTHEELMNLNGDYATIFNNLLLGETPPVEINSKKETSGSQKKSQDKGPKTGSVKKEKAVKPEEGQLVQLEEKGQGSVPWSVYGVYIQAAGGPLAFLVIMALFMLNVGSTAFSTWWLSYWIKQGSGNTTVTRGNETSVSDSMKDNPHMQYYASIYALSMAVMLILKAIRGVVFVKGTLRASSRLHDELFRRILRSPMKFFDTTPTGRILNRFSKDMDEVDVRLPFQAEMFIQNVILVFFCVGMIAGVFPWFLVAVGPLVILFSVLHIVSRVLIRELKRLDNITQSPFLSHITSSIQGLATIHAYNKGQEFLHRYQELLDDNQAPFFLFTCAMRWLAVRLDLISIALITTTGLMIVLMHGQIPPAYAGLAISYAVQLTGLFQFTVRLASETEARFTSVERINHYIKTLSLEAPARIKNKAPSPDWPQEGEVTFENAEMRYRENLPLVLKKVSFTIKPKEKIGIVGRTGSGKSSLGMALFRLVELSGGCIKIDGVRISDIGLADLRSKLSIIPQEPVLFSGTVRSNLDPFNQYTEDQIWDALERTHMKECIAQLPLKLESEVMENGDNFSVGERQLLCIARALLRHCKILILDEATAAMDTETDLLIQETIREAFADCTMLTIAHRLHTVLGSDRIMVLAQGQVVEFDTPSVLLSNDSSRFYAMFAAAENKVAVKG

SEQ ID NO: 1526 - protein, 1067 aa, Artificial Sequence
  Synthetic polypeptide
QDQPHLFSFLFPLLSLLNVKMMRMKTFVMIHFHLMNVCTGTDMKLRLPASPETHLDMLRHLYQGCQVVQGNLELTYLPTNASLSFLQDIQEVQGYVLIAHNQVRQVPLQRLRIVRGTQLFEDNYALAVLDNGDPLNNTTPVTGASPGGLRELQLRSLTEILKGGVLIQRNPQLCYQDTILWKDIFHKNNQLALTLIDTNRSRACHPCSPMCKGSRCWGESSEDCQSLTRTVCAGGCARCKGPLPTDCCHEQCAAGCTGPKHSDCLACLHFNHSGICELHCPALVTYNTDTFESMPNPEGRYTFGASCVTACPYNYLSTDVGSCTLVCPLHNQEVTAEDGTQRCEKCSKPCARVCYGLGMEHLREVRAVTSANIQEFAGCKKIFGSLAFLPESFDGDPASNTAPLQPEQLQVFETLEEITGYLYISAWPDSLPDLSVFQNLQVIRGRILHNGAYSLTLQGLGISWLGLRSLRELGSGLALIHHNTHLCFVHTVPWDQLFRNPHQALLHTANRPEDECVGEGLACHQLCARGHCWGPGPTQCVNCSQFLRGQECVEECRVLQGLPREYVNARHCLPCHPECQPQNGSVTCFGPEADQCVACAHYKDPPFCVARCPSGVKPDLSYMPIWKFPDEEGACQPCPINCTHSCVDLDDKGCPAEQRASPLTSIISAVVGILLVVVLGVVFGILIKRRQQKIRKYTMRRLLQETELVEPLTPSGAMPNQAQMRILKETELRKVKVLGSGAFGTVYKGIWIPDGENVKIPVAIKVLRENTSPKANKEILDEAYVMAGVGSPYVSRLLGICLTSTVQLVTQLMPYGCLLDHVRENRGRLGSQDLLNWCMQIAKGMSYLEDVRLVHRDLAARNVLVKSPNHVKITDFGLARLLDIDETEYHADGGKVPIKWMALESILRRRFTHQSDVWSYGVTVWELMTFGAKPYDGIPAREIPDLLEKGERLPQPPICTIDVYMIMVKCWMIDSECRPRFRELVSEFSRMARDPQRFVVIQNEDLGPASPLDSTFYRSLLEDDDMGDLVDAEEYLVPQQGFFCPDPAPGAGGMVHHRHRSSSTRNM

SEQ ID NO: 1527 - protein, 1065 aa, Artificial Sequence
  Synthetic polypeptide
ELQHSLGRSTASLLKQARPRTHQKEEIPNTSEHQQEQTPDTPSLRNVTLSVRIRSFILEGFHVDHTAELRGIRWTSSLRRETSDYHRTLTPTLEALLHFLLRPLQTLSLGLEEELLQRGIRARLREHGISLAAYGTIVSAELTGRHKGPLAERDFKSGRCPGNSFSCGNSQCVTKVNPECDDQEDCSDGSDEAHCECGLQPAWRMAGRIVGGMEASPGEFPWQASLRENKEHFCGAAIINARWLVSAAHCFNEFQDPTKWVAYVGATYLSGSEASTVRAQVVQIVKHPLYNADTADFDVAVLELTSPLPFGRHIQPVCLPAATHIFPPSKKCLISGWGYLKEDFLVKPEVLQKATVELLDQALCASLYGHSLTDRMVCAGYLDGKVDSCQGDSGGPLVCEEPSGRFFLAGIVSWGIGCAEARRPGVYARVTRLRDWILEATTKASMPLAPTMAPAPAAPSTAWPTSPESPVVSTPTKSMQALSTVPLDWVTVPKLQECGARPAMEKPTRVVGGFGAASGEVPWQVSLKEGSRHFCGATVVGDRWLLSAAHCFNHTKVEQVRAHLGTASLLGLGGSPVKIGLRRVVLHPLYNPGILDFDLAVLELASPLAFNKYIQPVCLPLAIQKFPVGRKCMISGWGNTQEGNATKPELLQKASVGIIDQKTCSVLYNFSLTDRMICAGFLEGKVDSCQGDSGGPLACEEAPGVFYLAGIVSWGIGCAQVKKPGVYTRITRLKGWILEIMSSQPLPMSPPSTTRMLATTSPRTTAGLTVPGATPSRPTPGAASRVTGQPANSTLSAVSTTARGQTPFPDAPEATTHTQLPDCGLAPAALTRIVGGSAAGRGEWPWQVSLWLRRREHRCGAVLVAERWLLSAAHCFDVYGDPKQWAAFLGTPFLSGAEGQLERVARIYKHPFYNLYTLDYDVALLELAGPVRRSRLVRPICLPEPAPRPPDGTRCVITGWGSVREGGSMARQLQKAAVRLLSEQTCRRFYPVQISSRMLCAGFPQGGVDSCSGDAGGPLACREPSGRWVLTGVTSWGYGCGRPHFPGVYTRVAAVRGWIGQHIQE

SEQ ID NO: 1528 - protein, 1057 aa, Artificial Sequence
  Synthetic polypeptide
PQFLSPAHTTLPSLKAFTWLCRCLQCSSPVLSGLAPGEKISAQMSLPRKGLPRPPTSCLPTPAPTLASPPSPLPASVLHSSHHHLIFLCMHRFAFLAPGFALPPRWKLLNSLSVDPDAECKYGLYFRDGRRKVDYILVYHHKRPSGNRTLVRRVQHSDTPSGARSVKQDHPLPGKGASLDAGSGEPPMDYHEDDKRFRREEYEGNLLEAGLELERDEDTKIHGVGFVKIHAPWNVLCREAEFLKLKMPTKKMYHINETRGLLKKINSVLQKITDPIQPKVAEHRPQTMKRLSYPFSREKQHLFDLSDKDSFFDSKTRSTIVYEILKRTTCTKAKYSMGITSLLANGVYAAAYPLHDGDYNGENVEFNDRKLLYEEWARYGVFYKYQPIDLVRKYFGEKIGLYFAWLGVYTQMLIPASIVGIIVFLYGCATMDENIPSMEMCDQRHNITMCPLCDKTCSYWKMSSACATARASHLFDNPATVFFSVFMALWAATFMEHWKRKQMRLNYRWDLTGFEEEEEAVKDHPRAEYEARVLEKSLKKESRNKEKRRHIPEESTNKWKQRVKTAMAGVKLTDKVKLTWRDRFPAYLTNLVSIIFMIAVTFAIVLGVIIYRISMAAALAMNSSPSVRSNIRVTVTATAVIINLVVIILLDEVYGCIARWLTKIEVPKTEKSFEERLIFKAFLLKFVNSYTPIFYVAFFKGRFVGRPGDYVYIFRSFRMEECAPGGCLMELCIQLSIIMLGKQLIQNNLFEIGIPKMKKLIRYLKLKQQSPPDHEECVKRKQRYEVDYNLEPFAGLTPEYMEMIIQFGFVTLFVASFPLAPLFALLNNIIEIRLDAKKFVTELRRPVAVRAKDIGIWYNILRGIGKLAVIINAFVISFTSDFIPRLVYLYMYSKNGTMHGFVNHTLSSFNVSDFQNGTAPNDPLDLGYEVQICRYKDYREPPWSENKYDISKDFWAVLAARLAFVIVFQNLVMFMSDFVDWVIPDIPKDISQQIHKEKVLMVELFMREEQDKQQLLETWMEKERQKDEPPCNHHNTKACPDSLGSPAPSHAYHGGVL

SEQ ID NO: 1529 - protein, 1057 aa, Artificial Sequence
  Synthetic polypeptide
PQFLSPAHTTLPSLKAFTWLCRCLQCSSPVLSGLAPGEKISAQMSLPRKGLPRPPTSCLPTPAPTLASPPSPLPASVLHSSHHHLIFLCMHRFAFLAPGFALPPRWKLLNSLSVDPDAECKYGLYFRDGRRKVDYILVYHHKRPSGNRTLVRRVQHSDTPSGARSVKQDHPLPGKGASLDAGSGEPPMDYHEDDKRFRREEYEGNLLEAGLELERDEDTKIHGVGFVKIHAPWNVLCREAEFLKLKMPTKKMYHINETRGLLKKINSVLQKITDPIQPKVAEHRPQTMKRLSYPFSREKQHLFDLSDKDSFFDSKTRSTIVYEILKRTTCTKAKYSMGITSLLANGVYAAAYPLHDGDYNGENVEFNDRKLLYEEWARYGVFYKYQPIDLVRKYFGEKIGLYFAWLGVYTQMLIPASIVGIIVFLYGCATMDENIPSMEMCDQRHNITMCPLCDKTCSYWKMSSACATARASHLFDNPATVFFSVFMALWAATFMEHWKRKQMRLNYRWDLTGFEEEEKALLDHPRAEYEARVLEKSLKKESRNKEKRRHIPEESTNKWKQRVKTAMAGVKLTDKVKLTWRDRFPAYLTNLVSIIFMIAVTFAIVLGVIIYRISMAAALAMNSSPSVRSNIRVTVTATAVIINLVVIILLDEVYGCIARWLTKIEVPKTEKSFEERLIFKAFLLKFVNSYTPIFYVAFFKGRFVGRPGDYVYIFRSFRMEECAPGGCLMELCIQLSIIMLGKQLIQNNLFEIGIPKMKKLIRYLKLKQQSPPDHEECVKRKQRYEVDYNLEPFAGLTPEYMEMIIQFGFVTLFVASFPLAPLFALLNNIIEIRLDAKKFVTELRRPVAVRAKDIGIWYNILRGIGKLAVIINAFVISFTSDFIPRLVYLYMYSKNGTMHGFVNHTLSSFNVSDFQNGTAPNDPLDLGYEVQICRYKDYREPPWSENKYDISKDFWAVLAARLAFVIVFQNLVMFMSDFVDWVIPDIPKDISQQIHKEKVLMVELFMREEQDKQQLLETWMEKERQKDEPPCNHHNTKACPDSLGSPAPSHAYHGGVL

SEQ ID NO: 1530 - protein, 1056 aa, Artificial Sequence
  Synthetic polypeptide
MVTFLDYYPTAEPVSMTLFLLCQMINDVDSVLLRVTAGVTGATDQVRNSYQLCNNGTLRVMYANGMGISFHSEPHVLAGTITPTIGRCNISLPMENGLNSIEWRLRKEQIKGKVTIFGRKLRVHGRNLLSIDYDRNIRTEKIYDDHRKFTLRIIYDQVGRPFLWLPSSGLAAVNVSYFFNGRLAGLQRGAMSERTDIDKQGRIVSRMFADGKVWSYSYLDKSMVLLLQSQRQYIFEYDSSDRLLAVTMPSVARHSMSTHTSIGYIRNIYNPPESNASVIFDYSDDGRILKTSFLGTGRQVFYKYGKLSKLSEIVYDSTAVTFGYDETTGVLKMVNLQSGGFSCTIRYRKIGPLVDKQIYRFSEEGMVNARFDYTYHDNSFRIASIKPVISETPLPVDLYRYDEISGKVEHFGKFGVIYYDINQIITTAVMTLSKHFDTHGRIKEVQYEMFRSLMYWMTVQYDSMGRVIKRELKLGPYANTTKYTYDYDGDGQLQSVAVNDRPTWRYSYDLNGNLHLLNPGNSVRLMPLRYDLRDRITRLGDVQYKIDDDGYLCQRGSDIFEYNSKGLLTRAYNKASGWSVQYRYDGVGRRASYKTNLGHHLQYFYSDLHNPTRITHVYNHSNSEITSLYYDLQGHLFAMESSSGEEYYVASDNTGTPLAVFSINGLMIKQLQYTAYGEIYYDSNPDFQMVIGFHGGLYDPLTKLVHFTQRDYDVLAGRWTSPDYTMWKNVGKEPAPFNLYMFKSNNPLSSELDLKNYVTDVKSWLVMFGFQLSNIIPGFPRAKMYFVPPPYELSESQASENGQLITGVQQTTERHNQAFMALEGQVITKKLHASIREKAGHWFATTTPIIGKGIMFAIKEGRVTTGVSSIASEDSRKVASVLNNAYYLDKMHYSIEGKDTHYFVKIGSADGDLVTLGTTIGRKVLESGVNVTVSQPTLLVNGRTRRFTNIEFQYSTLLLSIRYGLTPDTLDEEKARVLDQARQRALGTAWAKEQQKARDGREGSRLWTEGEKQQLLSTGRVQGYEGYYVLPVEQYPELADSSSNIQFLRQNEMGKR

SEQ ID NO: 1531 - protein, 1056 aa, Artificial Sequence; identical to SEQ ID NO: 1530
  Synthetic polypeptide

SEQ ID NO: 1532 - protein, 1056 aa, Artificial Sequence; identical to SEQ ID NO: 1530
  Synthetic polypeptide

SEQ ID NO: 1533 - protein, 1056 aa, Artificial Sequence; identical to SEQ ID NO: 1530
  Synthetic polypeptide

SEQ ID NO: 1534 - protein, 1056 aa, Artificial Sequence; identical to SEQ ID NO: 1530
  Synthetic polypeptide

SEQ ID NO: 1535 - protein, 1053 aa, Artificial Sequence
  Synthetic polypeptide
PMRGRTFAVLFTTLPPAQNLAYVCTGTDMKLRLPASPETHLDMLRHLYQGCQVVQGNLELTYLPTNASLSFLQDIQEVQGYVLIAHNQVRQVPLQRLRIVRGTQLFEDNYALAVLDNGDPLNNTTPVTGASPGGLRELQLRSLTEILKGGVLIQRNPQLCYQDTILWKDIFHKNNQLALTLIDTNRSRACHPCSPMCKGSRCWGESSEDCQSLTRTVCAGGCARCKGPLPTDCCHEQCAAGCTGPKHSDCLACLHFNHSGICELHCPALVTYNTDTFESMPNPEGRYTFGASCVTACPYNYLSTDVGSCTLVCPLHNQEVTAEDGTQRCEKCSKPCARVCYGLGMEHLREVRAVTSANIQEFAGCKKIFGSLAFLPESFDGDPASNTAPLQPEQLQVFETLEEITGYLYISAWPDSLPDLSVFQNLQVIRGRILHNGAYSLTLQGLGISWLGLRSLRELGSGLALIHHNTHLCFVHTVPWDQLFRNPHQALLHTANRPEDECVGEGLACHQLCARGHCWGPGPTQCVNCSQFLRGQECVEECRVLQGLPREYVNARHCLPCHPECQPQNGSVTCFGPEADQCVACAHYKDPPFCVARCPSGVKPDLSYMPIWKFPDEEGACQPCPINCTHSCVDLDDKGCPAEQRASPLTSIISAVVGILLVVVLGVVFGILIKRRQQKIRKYTMRRLLQETELVEPLTPSGAMPNQAQMRILKETELRKVKVLGSGAFGTVYKGIWIPDGENVKIPVAIKVLRENTSPKANKEILDEAYVMAGVGSPYVSRLLGICLTSTVQLVTQLMPYGCLLDHVRENRGRLGSQDLLNWCMQIAKGMSYLEDVRLVHRDLAARNVLVKSPNHVKITDFGLARLLDIDETEYHADGGKVPIKWMALESILRRRFTHQSDVWSYGVTVWELMTFGAKPYDGIPAREIPDLLEKGERLPQPPICTIDVYMIMVKCWMIDSECRPRFRELVSEFSRMARDPQRFVVIQNEDLGPASPLDSTFYRSLLEDDDMGDLVDAEEYLVPQQGFFCPDPAPGAGGMVHHRHRSSSTRNM

SEQ ID NO: 1536 - protein, 1053 aa, Artificial Sequence
  Synthetic polypeptide
DQVPWLTPVIPALWEAETGGSQVCTGTDMKLRLPASPETHLDMLRHLYQGCQVVQGNLELTYLPTNASLSFLQDIQEVQGYVLIAHNQVRQVPLQRLRIVRGTQLFEDNYALAVLDNGDPLNNTTPVTGASPGGLRELQLRSLTEILKGGVLIQRNPQLCYQDTILWKDIFHKNNQLALTLIDTNRSRACHPCSPMCKGSRCWGESSEDCQSLTRTVCAGGCARCKGPLPTDCCHEQCAAGCTGPKHSDCLACLHFNHSGICELHCPALVTYNTDTFESMPNPEGRYTFGASCVTACPYNYLSTDVGSCTLVCPLHNQEVTAEDGTQRCEKCSKPCARVCYGLGMEHLREVRAVTSANIQEFAGCKKIFGSLAFLPESFDGDPASNTAPLQPEQLQVFETLEEITGYLYISAWPDSLPDLSVFQNLQVIRGRILHNGAYSLTLQGLGISWLGLRSLRELGSGLALIHHNTHLCFVHTVPWDQLFRNPHQALLHTANRPEDECVGEGLACHQLCARGHCWGPGPTQCVNCSQFLRGQECVEECRVLQGLPREYVNARHCLPCHPECQPQNGSVTCFGPEADQCVACAHYKDPPFCVARCPSGVKPDLSYMPIWKFPDEEGACQPCPINCTHSCVDLDDKGCPAEQRASPLTSIISAVVGILLVVVLGVVFGILIKRRQQKIRKYTMRRLLQETELVEPLTPSGAMPNQAQMRILKETELRKVKVLGSGAFGTVYKGIWIPDGENVKIPVAIKVLRENTSPKANKEILDEAYVMAGVGSPYVSRLLGICLTSTVQLVTQLMPYGCLLDHVRENRGRLGSQDLLNWCMQIAKGMSYLEDVRLVHRDLAARNVLVKSPNHVKITDFGLARLLDIDETEYHADGGKVPIKWMALESILRRRFTHQSDVWSYGVTVWELMTFGAKPYDGIPAREIPDLLEKGERLPQPPICTIDVYMIMVKCWMIDSECRPRFRELVSEFSRMARDPQRFVVIQNEDLGPASPLDSTFYRSLLEDDDMGDLVDAEEYLVPQQGFFCPDPAPGAGGMVHHRHRSSSTRNM

SEQ ID NO: 1537 - protein, 1045 aa, Artificial Sequence
  Synthetic polypeptide
LGSGDLPWEINPLSSCSLLCEKHPPTTSGPQTDQPKKHLTNFKSGLNVTVNATFMYSDGLIHNSGDCRSSTCEGLDLLRKISNAQRMGCVLIGPSCTYSTFQMYLDTELSYPMISAGSFGLSCDYKETLTRLMSPARKLMYFLVNFWKTNDLPFKTYSWSTSYVYKNGTETEDCFWYLNALEASVSYFSHELGFKVVLRQDKEFQDILMDHNRKSNVIIMCGGPEFLYKLKGDRAVAEDIVIILVDLFNDQYFEDNVTAPDYMKNVLVLTLSPGNSLLNSSFSRNLSPTKRDFALAYLNGILLFGHMLKIFLENGENITTPKFAHAFRNLTFEGYDGPVTLDDWGDVDSTMVLLYTSVDTKKYKVLLTYDTHVNKTYPVDMSPTFTWKNSKLPNDITGRGPQILMIAVFTLTGAVVLLLLVALLMLRKYRKDYELRQKKWSHIPPENIFPLETNETNHVSLKIDDDKRRDTIQRLRQCKYDKKRVILKDLKHNDGNFTEKQKIELNKLLQIDYYNLTKFYGTVKLDTMIFGVIEYCERGSLREVLNDTISYPDGTFMDWEFKISVLYDIAKGMSYLHSSKTEVHGRLKSTNCVVDSRMVVKITDFGCNSILPPKKDLWTAPEHLRQANISQKGDVYSYGIIAQEIILRKETFYTLSCRDRNEKIFRVENSNGMKPFRPDLFLETAEEKELEVYLLVKNCWEEDPEKRPDFKKIETTLAKIFGLFHDQKNESYMDTLIRRLQLYSRNLEHLVEERTQLYKAERDRADRLNFMLLPRLVVKSLKEKGFVEPELYEEVTIYFSDIVGFTTICKYSTPMEVVDMLNDIYKSFDHIVDHHDVYKVETIGDAYMVASGLPKRNGNRHAIDIAKMALEILSFMGTFELEHLPGLPIWIRIGVHSGPCAAGVVGIKMPRYCLFGDTVNTASRMESTGLPLRIHVSGSTIAILKRTECQFLYEVRGETYLKGRGNETTYWLTGMKDQKFNLPTPPTVENQQRLQAEFSDMIANSLQKRQAAGIRSQKPRRVASYKKGTLEYLQLNTTDKESTYF

SEQ ID NO: 1538 - protein, 1043 aa, Artificial Sequence
  Synthetic polypeptide
TMRTFGHRPQNSMPDIIIWMIRGEKRLAYARIPAHQVLYSTSGENASGKYCGKTQTIFLKYPQEKNNGPKVPVELRVNIWLGLSAVEKKFNSFAEGTFTVFAEMYENQALMFGKWGTSGLVGRHKFSDVTGKIKLKREFFLPPKGWEWEGEWIVDPERSLLTEADAGHTEFTDEVYQNESRYPGGDWKPAEDTYTDANGDKAASPSELTCPPGWEWEDDAWSYDINRAVDEKGWEYGITIPPDHKPKSWVAAEKMYHTHRRRRLVRKRKKDLTQTASSTARAMEELQDQEGWEYASLIGWKFHWKQRSSDTFRRRRWRRKMAPSETHGAAAIFKLEGALGADTTEDGDEKSLEKQKHSATTVFGANTPIVSCNFDRVYIYHLRCYVYQARNLLALDKDSFSDPYAHICFLHRSKTTEIIHSTLNPTWDQTIIFDEVEIYGEPQTVLQNPPKVIMELFDNDQVGKDEFLGRSIFSPVVKLNSEMDITPKLLWHPVMNGDKACGDVLVTAELILRGKDGSNLPILPPQRAPNLYMVPQGIRPVVQLTAIEILAWGLRNMKNFQMASITSPSLVVECGGERVESVVIKNLKKTPNFPSSVLFMKVFLPKEELYMPPLVIKVIDHRQFGRKPVVGQCTIERLDRFRCDPYAGKEDIVPQLKASLLSAPPCRDIVIEMEDTKPLLASKCLSSMSTALSKMASPATVHLTEKEEEIVDWWSKFYASSGEHEKCGQYIQKGYSKLKIYNCELENVAEFEGLTDFSDTFKLYRGKSDENEDPSVVGEFKGSFRIYPLPDDPSVPAPPRQFRELPDSVPQECTVRIYIVRGLELQPQDNNGLCDPYIKITLGKKVIEDRDHYIPNTLNPVFGRMYELSCYLPQEKDLKISVYDYDTFTRDEKVGETIIDLENRFLSRFGSHCGIPEEYCVSGVNTWRDQLRPTQLLQNVARFKGFPQPILSEDGSRIRYGGRDYSLDEFEANKILHQHLGAPEERLALHILRTQGLVPEHVETRTLHSTFQPNISQILPACDHLEHQGRYLGREKHHRRGNE

SEQ ID NO: 1539 - protein, 1043 aa, Artificial Sequence
  Synthetic polypeptide
PLQAVPSSETLMDSTTATAELGWMVHPPSGWEEVSGYDENMNTIRTYQVCNVFESSQNNWLRTKFIRRRGAHRIHVEMKFSVRDCSSIPSVPGSCKETFNLYYYEADFDSATKTFPNWMENPWVKVDTIAADESFSQVDLGGRVMKINTEVRSFGPVSRSGFYLAFQDYGGCMSLIAVRVFYRKCPRIIQNGAIFQETLSGAESTSLVAARGSCIANAEEVDVPIKLYCNGDGEWLVPIGRCMCKAGFEAVENGTVCRGCPSGTFKANQGDEACTHCPINSRTTSEGATNCVCRNGYYRADLDPLDMPCTTIPSAPQAVISSVNETSLMLEWTPPRDSGGREDLVYNIICKSCGSGRGACTRCGDNVQYAPRQLGLTEPRIYISDLLAHTQYTFEIQAVNGVTDQSPFSPQFASVNITTNQAAPSAVSIMHQVSRTVDSITLSWSQPDQPNGVILDYELQYYEKELSEYNATAIKSPTNTVTVQGLKAGAIYVFQVRARTVAGYGRYSGKMYFQTMTEAEYQTSIQEKLPLIIGSSAAGLVFLIAVVVIAIVCNRRGFERADSEYTDKLQHYTSGHMTPGMKIYIDPFTYEDPNEAVREFAKEIDISCVKIEQVIGAGEFGEVCSGHLKLPGKREIFVAIKTLKSGYTEKQRRDFLSEASIMGQFDHPNVIHLEGVVTKSTPVMIITEFMENGSLDSFLRQNDGQFTVIQLVGMLRGIAAGMKYLADMNYVHRDLAARNILVNSNLVCKVSDFGLSRFLEDDTSDPTYTSALGGKIPIRWTAPEAIQYRKFTSASDVWSYGIVMWEVMSYGERPYWDMTNQDVINAIEQDYRLPPPMDCPSALHQLMLDCWQKDRNHRPKFGQIVNTLDKMIRNPNSLKAMAPLSSGINLPLLDRTIPDYTSFNTVDEWLEAIKMGQYKESFANAGFTSFDVVSQMMMEDILRVGVTLAGHQKKILNSIQVMRAQMNQIQSVEGQPLARRPRATGRTKRCQPRDVTKKTCNSNDGKKKGMGKKKTDPGRGREIQGIFFKEDSHKESNDCSCGG

SEQ ID NO: 1540 - protein, 1024 aa, Artificial Sequence
  Synthetic polypeptide
RCPAVDGAALLSKIREEERRILEKAGYFQSITVGVAPIVVVIASVVTFSVHMTLGFDLTAAQAFTVVTVFNSMTFALKVTPFSVKSLSEASVAVDRFKSLFLMEEVHMIKNKPASPHIKIEMKNATLAWDSSHSSIQNSPKLTPKMKKDKRASRGKKEKVRQLQRTEHQAVLAEQKGHLLLDSDERPSPEEEEGKHIHLGHLRLQRTLHSIDLEIQEGKLVGICGSVGSGKTSLISAILGQMTLLEGSIAISGTFAYVAQQAWILNATLRDNILFGKEYDEERYNSVLNSCCLRPDLAILPSSDLTEIGERGANLSGGQRQRISLARALYSDRSIYILDDPLSALDAHVGNHIFNSAIRKHLKSKTVLFVTHQLQYLVDCDEVIFMKEGCITERGTHEELMNLNGDYATIFNNLLLGETPPVEINSKKETSGSQKKSQDKGPKTGSVKKEKAVKPEEGQLVQLEEKGQGSVPWSVYGVYIQAAGGPLAFLVIMALFMLNVGSTAFSTWWLSYWIKQGSGNTTVTRGNETSVSDSMKDNPHMQYYASIYALSMAVMLILKAIRGVVFVKGTLRASSRLHDELFRRILRSPMKFFDTTPTGRILNRFSKDMDEVDVRLPFQAEMFIQNVILVFFCVGMIAGVFPWFLVAVGPLVILFSVLHIVSRYQELLDDNQAPFFLFTCAMRWLAVRLDLISIALITTTGLMIVLMHGQIPPAYAGLAISYAVQLTGLFQFTVRLASETEARFTSVERINHYIKTLSLEAPARIKNKAPSPDWPQEGEVTFENAEMRYRENLPLVLKKVSFTIKPKEKIGIVGRTGSGKSSLGMALFRLVELSGGCIKIDGVRISDIGLADLRSKLSIIPQEPVLFSGTVRSNLDPFNQYTEDQIWDALERTHMKECIAQLPLKLESEVMENGDNFSVGERQLLCIARALLRHCKILILDEATAAMDTETDLLIQETIREAFADCTMLTIAHRLHTVLGSDRIMVLAQGQVVEFDTPSVLLSNDSSRFYAMFAAAENKVAVKG

SEQ ID NO: 1541 - protein, 1019 aa, Artificial Sequence
  Synthetic polypeptide
AVIALLHPSLRDRYNALLSNMSRIYSTAKVCLPNKTATCWSLDPDLTNILASSRSYAMLLFAWEGWHNAAGIPLKPLYEDFTALSNEAYKQDGFTDTGAYWRSWYNSPTFEDDLEHLYQQLEPLYLNLHAFVRRALHRRYGDRYINLRGPIPAHLLGDMWAQSWENIYDMVVPFPDKPNLDVTSTMLQQGWNATHMFRVAEEFFTSLELSPMPPEFWEGSMLEKPADGREVVCHASAWDFYNRKDFRIKQCTRVTMDQLSTVHHEMGHIQYYLQYKDLPVSLRRGANPGFHEAIGDVLALSVSTPEHLHKIGLLDRVTNDTESDINYLLKMALEKIAFLPFGYLVDQWRWGVFSGRTPPSRYNFDWWYLRTKYQGICPPVTRNETHFDAGAKFHVPNVTPYIRYFVSFVLQFQFHEALCKEAGYEGPLHQCDIYRSTKAGAKLRKVLQAGSSRPWQEVLKDMVGLDALDAQPLLKYFQPVTQWLQEQNQQNGEVLGWPEYQWHPPLPDNYPEGIDLVTDEAEASKFVEEYDRTSQVVWNEYAEANWNYNTNITTETSKILLQKNMQIANHTLKYGTQARKFDVNQLQNTTIKRIIKKVQDLERAALPAQELEEYNKILLDMETTYSVATVCHPNGSCLQLEPDLTNVMATSRKYEDLLWAWEGWRDKAGRAILQFYPKYVELINQAARLNGYVDAGDSWRSMYETPSLEQDLERLFQELQPLYLNLHAYVRRALHRHYGAQHINLEGPIPAHLLGNMWAQTWSNIYDLVVPFPSAPSMDTTEAMLKQGWTPRRMFKEADDFFTSLGLLPVPPEFWNKSMLEKPTDGREVVCHASAWDFYNGKDFRIKQCTTVNLEDLVVAHHEMGHIQYFMQYKDLPVALREGANPGFHEAIGDVLALSVSTPKHLHSLNLLSSEGGSDEHDINFLMKMALDKIAFIPFSYLVDQWRWRVFDGSITKENYNQEWWSLRLKYQGLCPPVPRTQGDFDPGAKFHIPSSVPYIRYFVSFIIQFHPFSQHTAA

SEQ ID NO: 1542 - protein, 1004 aa, Artificial Sequence
  Synthetic polypeptide
LWILALDLSSTPVSSDFGTSYTKLTLQPGVTTVIDNFYICPTNKRKVILVSSSLSDRDQSLFLSADEGATFQKQPIPFFVETLIFHPKEEDKVLAYTKESKLYVSSDLGKKWTLLQERVTKDHVFWSVSGVDADPDLVHVEAQDLGGDFRYVTCAIHNCSEKMLTAPFAGPIDHGSLTVQDDYIFFKATSANQTKYYVSYRRNEFVLMKLPKYALPKDLQIISTDESQVFVAVQEWYQMDTYNLYQSDPRGVRYALVLQDVRSSRQAEESVLIDILEVRGVKGVFLANQKIDGKVMTLITYNKGRDWDYLRPPSMDMNGKPTNCKPPDCHLHLHLRWADNPYVSGTVHTKDTAPGLIMGAGNLGSQLVEYKEEMYITSDCGHTWRQVFEEEHHILYLDHGGVIVAIKDTSIPLKILKFSVDEGLTWSTHNFTSTSVFVDGLLSEPGDETLVMTVFGHISFRSDWELVKVDFRPSFSRQCGEEDYSSWELSNLQGDRCIMGQQRSFRKRKSTSWCIKGRSFTSALTSRVCECRDSDFLCDYGFERSSSSESSTNKCSANFWFNPLSPPDDCALGQTYTSSLGYRKVVSNVCEGGVDMQQSQVQLQCPLTPPRGLQVSIQGEAVAVRPGEDVLFVVRQEQGDVLTTKYQVDLGDGFKAMYVNLTLTGEPIRHRYESPGIYRVSVRAENTAGHDEAVLFVQVNSPLQALYLEVVPVIGLNQEVNLTAVLLPLNPNLTVFYWWIGHSLQPLLSLDNSVTTRFSDTGDVRVTVQAACGNSVLQDSRVLRVLDQFQVMPLQFSKELDAYNPNTPEWREDVGLVVTRLLSKETSVPQELLVTVVKPGLPTLADLYVLLPPPRPTRKRSLSSDKRLAAIQQVLNAQKISFLLRGGVRVLVALRDTGTGAEQLGGGGGYWAVVVLFVIGLFAAGAFILYKFKSRKRPGRTVYAQMHNEKEQEMTSPVSHSEDVQGAVQGEEFIDDDLDSQTLGNHSGVVLSINSREMHSYLVS

SEQ ID NO: 1543 - protein, 989 aa, Artificial Sequence
  Synthetic polypeptide
LWILALDLSSTPVSSDFGTSYTKLTLQPGVTTVIDNFYICPTNKRKVILVSSSLSDRDQSLFLSADEGATFQKQPIPFFVETLIFHPKEEDKVLAYTKESKLYVSSDLGKKWTLLQERVTKDHVFWSVSGVDADPDLVHVEAQDLGGDFRYVTCAIHNCSEKMLTAPFAGPIDHGSLTVQDDYIFFKATSANQTKYYVSYRRNEFVLMKLPKYALPKDLQIISTDESQVFVAVQEWYQMDTYNLYQSDPRGVRYALVLQDVRSSRQAEESVLIDILEVRGVKGVFLANQKIDGKVMTLITYNKGRDWDYLRPPSMDMNGKPTNCKPPDCHLHLHLRWADNPYVSGTVHTKDTAPGLIMGAGNLGSQLVEYKEEMYITSDCGHTWRQVFEEEHHILYLDHGGVIVAIKDTSIPLKILKFSVDEGLTWSTHNFTSTSVFVDGLLSEPGDETLVMTVFGHISFRSDWELVKVDFRPSFSRQCGEEDYSSWELSNLQGDRCIMGQQRSFRKRKSTSWCIKGRSFTSALTSRVCECRDSDFLCDYGFERSSSSESSTNKCSANFWFNPLSPPDDCALGQTYTSSLGYRKVVSNVCEGGVDMQQSQVQLQCPLTPPRGLQVSIQGEAVAVRPGEDVLFVVRQEQGDVLTTKYQVDLGDGFKAMYVNLTLTGEPIRHRYESPGIYRVSVRAENTAGHDEAVLFVQVNSPLQALYLEVVPVIGLNQEVNLTAVLLPLNPNLTVFYWWIGHSLQPLLSLDNSVTTRFSDTGDVRVTVQAACGNSVLQDSRVLRVLDQFQVMPLQFSKELDAYNPNTPEWREDVGLVVTRLLSKETSVPQELLVTVVKPGLPTLADLYVLLPPPRPTRKRSLSSDKRLAAIQQVLNAQKISFLLRGGVRVLVALRDTGTGAEQLGGGGGYWAVVVLFVIGLFAAGAFILYKFKRKRPGRTVYAQMHNEKEQEMTSPVSHSEDVQGAVQGNHSGVVLSINSREMHSYLVS

SEQ ID NO: 1544 - protein, 987 aa, Artificial Sequence
  Synthetic polypeptide
TWETEVVDIQEVQGYVLIAHNQVRQVPLQRLRIVRGTQLFEDNYALAVLDNGDPLNNTTPVTGASPGGLRELQLRSLTEILKGGVLIQRNPQLCYQDTILWKDIFHKNNQLALTLIDTNRSRACHPCSPMCKGSRCWGESSEDCQSLTRTVCAGGCARCKGPLPTDCCHEQCAAGCTGPKHSDCLACLHFNHSGICELHCPALVTYNTDTFESMPNPEGRYTFGASCVTACPYNYLSTDVGSCTLVCPLHNQEVTAEDGTQRCEKCSKPCARVCYGLGMEHLREVRAVTSANIQEFAGCKKIFGSLAFLPESFDGDPASNTAPLQPEQLQVFETLEEITGYLYISAWPDSLPDLSVFQNLQVIRGRILHNGAYSLTLQGLGISWLGLRSLRELGSGLALIHHNTHLCFVHTVPWDQLFRNPHQALLHTANRPEDECVGEGLACHQLCARGHCWGPGPTQCVNCSQFLRGQECVEECRVLQGLPREYVNARHCLPCHPECQPQNGSVTCFGPEADQCVACAHYKDPPFCVARCPSGVKPDLSYMPIWKFPDEEGACQPCPINCTHSCVDLDDKGCPAEQRASPLTSIISAVVGILLVVVLGVVFGILIKRRQQKIRKYTMRRLLQETELVEPLTPSGAMPNQAQMRILKETELRKVKVLGSGAFGTVYKGIWIPDGENVKIPVAIKVLRENTSPKANKEILDEAYVMAGVGSPYVSRLLGICLTSTVQLVTQLMPYGCLLDHVRENRGRLGSQDLLNWCMQIAKGMSYLEDVRLVHRDLAARNVLVKSPNHVKITDFGLARLLDIDETEYHADGGKVPIKWMALESILRRRFTHQSDVWSYGVTVWELMTFGAKPYDGIPAREIPDLLEKGERLPQPPICTIDVYMIMVKCWMIDSECRPRFRELVSEFSRMARDPQRFVVIQNEDLGPASPLDSTFYRSLLEDDDMGDLVDAEEYLVPQQGFFCPDPAPGAGGMVHHRHRSSSTRNM

SEQ ID NO: 1545 - protein, 985 aa, Artificial Sequence
  Synthetic polypeptide
QKKGLDIQEVQGYVLIAHNQVRQVPLQRLRIVRGTQLFEDNYALAVLDNGDPLNNTTPVTGASPGGLRELQLRSLTEILKGGVLIQRNPQLCYQDTILWKDIFHKNNQLALTLIDTNRSRACHPCSPMCKGSRCWGESSEDCQSLTRTVCAGGCARCKGPLPTDCCHEQCAAGCTGPKHSDCLACLHFNHSGICELHCPALVTYNTDTFESMPNPEGRYTFGASCVTACPYNYLSTDVGSCTLVCPLHNQEVTAEDGTQRCEKCSKPCARVCYGLGMEHLREVRAVTSANIQEFAGCKKIFGSLAFLPESFDGDPASNTAPLQPEQLQVFETLEEITGYLYISAWPDSLPDLSVFQNLQVIRGRILHNGAYSLTLQGLGISWLGLRSLRELGSGLALIHHNTHLCFVHTVPWDQLFRNPHQALLHTANRPEDECVGEGLACHQLCARGHCWGPGPTQCVNCSQFLRGQECVEECRVLQGLPREYVNARHCLPCHPECQPQNGSVTCFGPEADQCVACAHYKDPPFCVARCPSGVKPDLSYMPIWKFPDEEGACQPCPINCTHSCVDLDDKGCPAEQRASPLTSIISAVVGILLVVVLGVVFGILIKRRQQKIRKYTMRRLLQETELVEPLTPSGAMPNQAQMRILKETELRKVKVLGSGAFGTVYKGIWIPDGENVKIPVAIKVLRENTSPKANKEILDEAYVMAGVGSPYVSRLLGICLTSTVQLVTQLMPYGCLLDHVRENRGRLGSQDLLNWCMQIAKGMSYLEDVRLVHRDLAARNVLVKSPNHVKITDFGLARLLDIDETEYHADGGKVPIKWMALESILRRRFTHQSDVWSYGVTVWELMTFGAKPYDGIPAREIPDLLEKGERLPQPPICTIDVYMIMVKCWMIDSECRPRFRELVSEFSRMARDPQRFVVIQNEDLGPASPLDSTFYRSLLEDDDMGDLVDAEEYLVPQQGFFCPDPAPGAGGMVHHRHRSSSTRNM

SEQ ID NO: 1546 - protein, 984 aa, Artificial Sequence
  Synthetic polypeptide
KYKKISQAWWCMPVIPAIREAESEYHYEYTACDSTGSRWRVAVPHTPGLCTSLPDPIKGTECSFSCNAGEFLDMKDQSCKPCAEGRYSLGTGIRFDEWDELPHGFASLSANMELDDSAAESTGNCTSSKWVPRGDYIASNTDECTATLMYAVNLKQSGTVNFEYYYPDSSIIFEFFVQNDQCQPNADDSRWMKTTEKGWEFHSVELNRGNNVLYWRTTAFSVWTKVPKPVLVRNIAITGVAYTSECFPCKPGTYADKQGSSFCKLCPANSYSNKGETSCHQCDPDKYSEKGSSSCNVRPACTDKDYFYTHTACDANGETQLMYKWAKPKICSEDLEGAVKLPASGVKTHCPPCNPGFFKTNNSTCQPCPYGSYSNGSDCTRCPAGTEPAVGFEYKWWNTLPTNMETTVLSGINFEYKGMTGWEVAGDHIYTAAGASDNDFMILTLVVPGFRPPQSVMADTENKEVARITFVFETLCSVNCELYFMVGVNSRTNTPVETWKGSKGKQSYTYIIEENTTTSFTWAFQRTTFHEASRKYTNDVAKIYSINVTNVMNGVASYCRPCALEASDVGSSCTSCPAGYYIDRDSGTCHSCPTNTILKAHQPYGVQACVPCGPGTKNNKIHSLCYNDCTFSRNTPTRTFNYNFSALANTVTLAGGPSFTSKGLKYFHHFTLSLCGNQGRKMSVCTDNVTDLRIPEGESGFSKSITAYVCQAVIIPPEVTGYKAGVSSQPVSLADRLIGVTTDMTLDGITSPAELFHLESLGIPDVIFFYRSNDVTQSCSSGRSTTIRVRCSPQKTVPGSLLLPGTCSDGTCDGCNFHFLWESAAACPLCSVADYHAIVSSCVAGIQKTTYVWREPKLCSGGISLPEQRVTICKTIDFWLKVGISAGTCTAILLTVLTCYFWKKNQKLEYKYSKLVMNATLKDCDLPAADSCAIMEGEDVEDDLIFTSKKSLFGKIKSFTSKRTPDGFDSVPLKTSSGGLDMDL

SEQ ID NO: 1547 - protein, 981 aa, Artificial Sequence
  Synthetic polypeptide
VLMRSDDFISVWKFLLHSSLSCQLVKKVPVSPSTMISLCAQYSADKREDEKMCDHLIRAAKYRDHVTATQLIQKIINILTDKHGAWGNSAVSRPLEFWRLDYWEDDLRRRRRFVRNPLGSTHPEATLKTAVEHVCIFKLRENSKATDEDILAKGKQSIRSQALGNQNSENEILLEGDDDTLSSVDEKDLENLAGPVSLSTPAQLVAPSVVVKGTLSVTSSELYFEVDEEDPNFKKIDPKILAYTEGLHGKWLFTEIRSIFSRRYLLQNTALEIFMANRVAVMFNFPDPATVKKVVNYLPRVGVGTSFGLPQTRRISLASPRQLFKASNMTQRWQHREISNFEYLMFLNTIAGRSYNDLNQYPVFPWVITNYESEELDLTLPTNFRDLSKPIGALNPKRAAFFAERYESWEDDQVPKFHYGTHYSTASFVLAWLLRIEPFTTYFLNLQGGKFDHADRTFSSISRAWRNSQRDTSDIKELIPEFYYLPEMFVNFNNYNLGVMDDGTVVSDVELPPWAKTSEEFVHINRLALESEFVSCQLHQWIDLIFGYKQQGPEAVRALNVFYYLTYEGAVNLNSITDPVLREAVEAQIRSFGQTPSQLLIEPHPPRGSAMQVSPLMFTDKAQQDVIMVLKFPSNSPVTHVAANTQPGLATPAVITVTANRLFAVNKWHNLPAHQGAVQDQPYQLPVEIDPLIASNTGMHRRQITDLLDQSIQVHSQCFVITSDNRYILVCGFWDKSFRVYSTDTGRLIQVVFGHWDVVTCLARSESYIGGNCYILSGSRDATLLLWYWNGKCSGIGDNPGSETAAPRAILTGHDYEVTCAAVCAELGLVLSGSQEGPCLIHSMNGDLLRTLEGPENCLKPKLIQASREGHCVIFYENGLFCTFSVNGKLQATMETDDNIRAIQLSRDGQYLLTGGDRGVVVVRQVSDLKQLFAYPGCDAGIRAMALSYDQRCIISGMASGSIVLFYNDFNRWHHEYQTRY

SEQ ID NO: 1548 - protein, 980 aa, Artificial Sequence
  Synthetic polypeptide
GQEFKTSLANMSLFLMEEVHMIKNKPASPHIKIEMKNATLAWDSSHSSIQNSPKLTPKMKKDKRASRGKKEKVRQLQRTEHQAVLAEQKGHLLLDSDERPSPEEEEGKHIHLGHLRLQRTLHSIDLEIQEGKLVGICGSVGSGKTSLISAILGQMTLLEGSIAISGTFAYVAQQAWILNATLRDNILFGKEYDEERYNSVLNSCCLRPDLAILPSSDLTEIGERGANLSGGQRQRISLARALYSDRSIYILDDPLSALDAHVGNHIFNSAIRKHLKSKTVLFVTHQLQYLVDCDEVIFMKEGCITERGTHEELMNLNGDYATIFNNLLLGETPPVEINSKKETSGSQKKSQDKGPKTGSVKKEKAVKPEEGQLVQLEEKGQGSVPWSVYGVYIQAAGGPLAFLVIMALFMLNVGSTAFSTWWLSYWIKQGSGNTTVTRGNETSVSDSMKDNPHMQYYASIYALSMAVMLILKAIRGVVFVKGTLRASSRLHDELFRRILRSPMKFFDTTPTGRILNRFSKDMDEVDVRLPFQAEMFIQNVILVFFCVGMIAGVFPWFLVAVGPLVILFSVLHIVSRVLIRELKRLDNITQSPFLSHITSSIQGLATIHAYNKGQEFLHRYQELLDDNQAPFFLFTCAMRWLAVRLDLISIALITTTGLMIVLMHGQIPPAYAGLAISYAVQLTGLFQFTVRLASETEARFTSVERINHYIKTLSLEAPARIKNKAPSPDWPQEGEVTFENAEMRYRENLPLVLKKVSFTIKPKEKIGIVGRTGSGKSSLGMALFRLVELSGGCIKIDGVRISDIGLADLRSKLSIIPQEPVLFSGTVRSNLDPFNQYTEDQIWDALERTHMKECIAQLPLKLESEVMENGDNFSVGERQLLCIARALLRHCKILILDEATAAMDTETDLLIQETIREAFADCTMLTIAHRLHTVLGSDRIMVLAQGQVVEFDTPSVLLSNDSSRFYAMFAAAENKVAVKG

SEQ ID NO: 1549 - protein, 975 aa, Artificial Sequence
  Synthetic polypeptide
PLQAVPSSETLMDSTTATAELGWMVHPPSGWEEVSGYDENMNTIRTYQVCNVFESSQNNWLRTKFIRRRGAHRIHVEMKFSVRDCSSIPSVPGSCKETFNLYYYEADFDSATKTFPNWMENPWVKVDTIAADESFSQVDLGGRVMKINTEVRSFGPVSRSGFYLAFQDYGGCMSLIAVRVFYRKCPRIIQNGAIFQETLSGAESTSLVAARGSCIANAEEVDVPIKLYCNGDGEWLVPIGRCMCKAGFEAVENGTVCRGCPSGTFKANQGDEACTHCPINSRTTSEGATNCVCRNGYYRADLDPLDMPCTTIPSAPQAVISSVNETSLMLEWTPPRDSGGREDLVYNIICKSCGSGRGACTRCGDNVQYAPRQLGLTEPRIYISDLLAHTQYTFEIQAVNGVTDQSPFSPQFASVNITTNQAAPSAVSIMHQVSRTVDSITLSWSQPDQPNGVILDYELQYYEKELSEYNATAIKSPTNTVTVQGLKAGAIYVFQVRARTVAGYGRYSGKMYFQTMTEAEYQTSIQEKLPLIIGSSAAGLVFLIAVVVIAIVCNRRRGFERADSEYTDKLQHYTSGHMTPGMKIYIDPFTYEDPNEAVREFAKEIDISCVKIEQVIGAGEFGEVCSGHLKLPGKREIFVAIKTLKSGYTEKQRRDFLSEASIMGQFDHPNVIHLEGVVTKSTPVMIITEFMENGSLDSFLRQNDGQFTVIQLVGMLRGIAAGMKYLADMNYVHRDLAARNILVNSNLVCKVSDFGLSRFLEDDTSDPTYTSALGGKIPIRWTAPEAIQYRKFTSASDVWSYGIVMWEVMSYGERPYWDMTNQDVINAIEQDYRLPPPMDCPSALHQLMLDCWQKDRNHRPKFGQIVNTLDKMIRNPNSLKAMAPLSSGINLPLLDRTIPDYTSFNTVDEWLEAIKMGQYKESFANAGFTSFDVVSQMMMEDILRVGVTLAGHQKKILNSIQVMRAQMNQIQSVEV

SEQ ID NO: 1550 - protein, 974 aa, Artificial Sequence
  Synthetic polypeptide
KMETIPTTKLLVRIKRGRAGPPVIVVPPKNSTVNASQDVSLACHAEAYPANLTYSWFQDNINVFHISRLQPRVRILVDGSLRLLATQPDDAGCYTCVPSNGLLHPPSASAYLTVLYPAQVTAMPPETPLPIGMPGVIRCPVRANPPLLFVSWTKDGKALQLDKFPGWSQGTEGSLIIALGNEDALGEYSCTPYNSLGTAGPSPVTRVLLKAPPAFIERPKEEYFQEVGRELLIPCSAQGDPPPVVSWTKVGRGLQGQAQVDSNSSLILRPLTKEAHGHWECSASNAVARVATSTNVYVLGTSPHVVTNVSVVALPKGANVSWEPGFDGGYLQRFSVWYTPLAKRPDRMHHDWVSLAVPVGAAHLLVPGLQPHTQYQFSVLAQNKLGSGPFSEIVLSAPEGLPTTPAAPGLPPTEIPPPLSPPRGLVAVRTPRGVLLHWDPPELVPKRLDGYVLEGRQGSQGWEVLDPAVAGTETELLVPGLIKDVLYEFRLVAFAGSFVSDPSNTANVSTSGLEVYPSRTQLPGLLPQPVLAGVVGGVCFLGVAVLVSILAGCLLNRRRAARRRRKRLRQDPPLIFSPTGKSAAPSALGSGSPDSVAKLKLQGSPVPSLRQSLLWGDPAGTPSPHPDPPSSRGPLPLEPICRGPDGRFVMGPTVAAPQERSGREQAEPRTPAQRLARSFDCSSSSPSGAPQPLCIEDISPVAPPPAAPPSPLPGPGPLLQYLSLPFFREMNVDGDWPPLEEPSPAAPPDYMDTRRCPTSSFLRSPETPPVSPRESLPGAVVGAGATAEPPYTALADWTLRERLLPGLLPAAPRGSLTSQSSGRGSASFLRPPSTAPSAGGSYLSPAPGDTSSWASGPERWPRREHVVTVSKRRNTSVDENYEWDSEFPGDMELLETLHLGLASSRLRPEAEPELGVKTPEEGCLLNTAHVTGPEARCAALREEFLAFRRRRDATRARLPAYRQPVPHPEQATLL

SEQ ID NO: 1551 - protein, 974 aa, Artificial Sequence
  Synthetic polypeptide
PLQAVPSSETLMDSTTATAELGWMVHPPSGWEEVSGYDENMNTIRTYQVCNVFESSQNNWLRTKFIRRRGAHRIHVEMKFSVRDCSSIPSVPGSCKETFNLYYYEADFDSATKTFPNWMENPWVKVDTIAADESFSQVDLGGRVMKINTEVRSFGPVSRSGFYLAFQDYGGCMSLIAVRVFYRKCPRIIQNGAIFQETLSGAESTSLVAARGSCIANAEEVDVPIKLYCNGDGEWLVPIGRCMCKAGFEAVENGTVCRGCPSGTFKANQGDEACTHCPINSRTTSEGATNCVCRNGYYRADLDPLDMPCTTIPSAPQAVISSVNETSLMLEWTPPRDSGGREDLVYNIICKSCGSGRGACTRCGDNVQYAPRQLGLTEPRIYISDLLAHTQYTFEIQAVNGVTDQSPFSPQFASVNITTNQAAPSAVSIMHQVSRTVDSITLSWSQPDQPNGVILDYELQYYEKELSEYNATAIKSPTNTVTVQGLKAGAIYVFQVRARTVAGYGRYSGKMYFQTMTEAEYQTSIQEKLPLIIGSSAAGLVFLIAVVVIAIVCNRRGFERADSEYTDKLQHYTSGHMTPGMKIYIDPFTYEDPNEAVREFAKEIDISCVKIEQVIGAGEFGEVCSGHLKLPGKREIFVAIKTLKSGYTEKQRRDFLSEASIMGQFDHPNVIHLEGVVTKSTPVMIITEFMENGSLDSFLRQNDGQFTVIQLVGMLRGIAAGMKYLADMNYVHRDLAARNILVNSNLVCKVSDFGLSRFLEDDTSDPTYTSALGGKIPIRWTAPEAIQYRKFTSASDVWSYGIVMWEVMSYGERPYWDMTNQDVINAIEQDYRLPPPMDCPSALHQLMLDCWQKDRNHRPKFGQIVNTLDKMIRNPNSLKAMAPLSSGINLPLLDRTIPDYTSFNTVDEWLEAIKMGQYKESFANAGFTSFDVVSQMMMEDILRVGVTLAGHQKKILNSIQVMRAQMNQIQSVEV

SEQ ID NO: 1552 - protein, 972 aa, Artificial Sequence
  Synthetic polypeptide
AVKEELTPILHRLFPRIQQVAGSPSPTPAGQQVLDIDSCLDSSVLDSSFLTFSGLHAEQAFVGQMKSDLFLDDSKSLVCWPSGEGTLSWPDLLSDPSIVGSNLRQLARGQAGHGLGPEEDGFSLASPYSPAKSFSASDEDLIQQVLAEGVSSPAPTQDTHMETDLLSSLSSTPGEKTETLALQRLGELGPPSPGLNWEQPQAARLSRTGLVEGLRKRLLPAWCASLAHGLSLLLVAVAVAVSGWVGASFPPGVSVAWLLSSSASFLASFLGWEPLKVLLEALYFSLVAKRLHPDEDDTLVESPAVTPVSARVPRVRPPHGFALFLAKEEARKVKRLHGMLRSLLVYMLFLLVTLLASYGDASCHGHAYRLQSAIKQELHSRAFLAITRSEELWPWMAHVLLPYVHGNQSSPELGPPRLRQVRLQEALYPDPPGPRVHTCSAAGGFSTSDYDVGWESPHNGSGTWAYSAPDLLGAWSWGSCAVYDSGGYVQELGLSLEESRDRLRFLQLHNWLDNRSRAVFLELTRYSPAVGLHAAVTLRLEFPAAGRALAALSVRPFALRRLSAGLSLPLLTSVCLLLFAVHFAVAEARTWHREGRWRVLRLGAWARWLLVALTAATALVRLAQLGAADRQWTRFVRGRPRRFTSFDQVAQLSSAARGLAASLLFLLLVKAAQQLRFVRQWSVFGKTLCRALPELLGVTLGLVVLGVAYAQLAILLVSSCVDSLWSVAQALLVLCPGTGLSTLCPAESWHLSPLLCVGLWALRLWGALRLGAVILRWRYHALRGELYRPAWEPQDYEMVELFLRRLRLWMGLSKVKEFRHKVRFEGMEPLPSRSSRGSKVSPDVPPPSAGSDASHPSTSSSQLDGLSVSLGRLGTRCEPEPSRLQAVFEALLTQFDRLNQATEDVYQLEQQLHSLQGRRSSRAPAGSSRGPSPGLRPALPSRLARASRGVDLATGPSRTPLRAKNKVHPSST

SEQ ID NO: 1553 - protein, 971 aa, Artificial Sequence
  Synthetic polypeptide
AVKEELTPILHRLFPRIQQVAGSPSPTPAGQQVLDIDSCLDSSVLDSSFLTFSGLHAEAFVGQMKSDLFLDDSKSLVCWPSGEGTLSWPDLLSDPSIVGSNLRQLARGQAGHGLGPEEDGFSLASPYSPAKSFSASDEDLIQQVLAEGVSSPAPTQDTHMETDLLSSLSSTPGEKTETLALQRLGELGPPSPGLNWEQPQAARLSRTGLVEGLRKRLLPAWCASLAHGLSLLLVAVAVAVSGWVGASFPPGVSVAWLLSSSASFLASFLGWEPLKVLLEALYFSLVAKRLHPDEDDTLVESPAVTPVSARVPRVRPPHGFALFLAKEEARKVKRLHGMLRSLLVYMLFLLVTLLASYGDASCHGHAYRLQSAIKQELHSRAFLAITRSEELWPWMAHVLLPYVHGNQSSPELGPPRLRQVRLQEALYPDPPGPRVHTCSAAGGFSTSDYDVGWESPHNGSGTWAYSAPDLLGAWSWGSCAVYDSGGYVQELGLSLEESRDRLRFLQLHNWLDNRSRAVFLELTRYSPAVGLHAAVTLRLEFPAAGRALAALSVRPFALRRLSAGLSLPLLTSVCLLLFAVHFAVAEARTWHREGRWRVLRLGAWARWLLVALTAATALVRLAQLGAADRQWTRFVRGRPRRFTSFDQVAQLSSAARGLAASLLFLLLVKAAQQLRFVRQWSVFGKTLCRALPELLGVTLGLVVLGVAYAQLAILLVSSCVDSLWSVAQALLVLCPGTGLSTLCPAESWHLSPLLCVGLWALRLWGALRLGAVILRWRYHALRGELYRPAWEPQDYEMVELFLRRLRLWMGLSKVKEFRHKVRFEGMEPLPSRSSRGSKVSPDVPPPSAGSDASHPSTSSSQLDGLSVSLGRLGTRCEPEPSRLQAVFEALLTQFDRLNQATEDVYQLEQQLHSLQGRRSSRAPAGSSRGPSPGLRPALPSRLARASRGVDLATGPSRTPLRAKNKVHPSST

SEQ ID NO: 1554 - protein, 970 aa, Artificial Sequence
  Synthetic polypeptide
VLMRSDDFISVWKFLLHSSLSCQLVKKVPVSPSTMISLCAQYSADKREDEKMCDHLIRAAKYRDHVTATQLIQKIINILTDKHGAWGNSAVSRPLEFWRLDYWEDDLRRRRRFVRNPLGSTHPEATLKTAVEHATDEDILAKGKQSIRSQALGNQNSENEILLEGDDDTLSSVDEKDLENLAGPVSLSTPAQLVAPSVVVKGTLSVTSSELYFEVDEEDPNFKKIDPKILAYTEGLHGKWLFTEIRSIFSRRYLLQNTALEIFMANRVAVMFNFPDPATVKKVVNYLPRVGVGTSFGLPQTRRISLASPRQLFKASNMTQRWQHREISNFEYLMFLNTIAGRSYNDLNQYPVFPWVITNYESEELDLTLPTNFRDLSKPIGALNPKRAAFFAERYESWEDDQVPKFHYGTHYSTASFVLAWLLRIEPFTTYFLNLQGGKFDHADRTFSSISRAWRNSQRDTSDIKELIPEFYYLPEMFVNFNNYNLGVMDDGTVVSDVELPPWAKTSEEFVHINRLALESEFVSCQLHQWIDLIFGYKQQGPEAVRALNVFYYLTYEGAVNLNSITDPVLREAVEAQIRSFGQTPSQLLIEPHPPRGSAMQVSPLMFTDKAQQDVIMVLKFPSNSPVTHVAANTQPGLATPAVITVTANRLFAVNKWHNLPAHQGAVQDQPYQLPVEIDPLIASNTGMHRRQITDLLDQSIQVHSQCFVITSDNRYILVCGFWDKSFRVYSTDTGRLIQVVFGHWDVVTCLARSESYIGGNCYILSGSRDATLLLWYWNGKCSGIGDNPGSETAAPRAILTGHDYEVTCAAVCAELGLVLSGSQEGPCLIHSMNGDLLRTLEGPENCLKPKLIQASREGHCVIFYENGLFCTFSVNGKLQATMETDDNIRAIQLSRDGQYLLTGGDRGVVVVRQVSDLKQLFAYPGCDAGIRAMALSYDQRCIISGMASGSIVLFYNDFNRWHHEYQTRY

SEQ ID NO: 1555 - protein, 970 aa, Artificial Sequence; identical to SEQ ID NO: 1554
  Synthetic polypeptide

SEQ ID NO: 1556 - protein, 969 aa, Artificial Sequence
  Synthetic polypeptide
VLMRSDDFISVWKFLLHSSLSCQLVKKVPVSPSTMISLCAQYSADKREDEKMCDHLIRAAKYRDHVTATQLIQKIINILTDKHGAWGNSAVSRPLEFWRLDYWEDDLRRRRRFVRNPLGSTHPEATLKTAVEHATDEDILAKGKQSIRSQALGNQNSENEILLEGDDDTLSSVDEKDLENLAGPVSLSTPAQLVAPSVVVKGTLSVTSSELYFEVDEEDPNFKKIDPKILAYTEGLHGKWLFTEIRSIFSRRYLLQNTALEIFMANRVAVMFNFPDPATVKKVVNYLPRVGVGTSFGLPQTRRISLASPRQLFKASNMTQRWQHREISNFEYLMFLNTIAGRSYNDLNQYPVFPWVITNYESEELDLTLPTNFRDLSKPIGALNPKRAAFFAERYESWEDDQVPKFHYGTHYSTASFVLAWLLRIEPFTTYFLNLQGGKFDHADRTFSSISRAWRNSQRDTSDIKELIPEFYYLPEMFVNFNNYNLGVMDDGTVVSDVELPPWAKTSEEFVHINRLALESEFVSCQLHQWIDLIFGYKQQGPEAVRALNVFYYLTYEGAVNLNSITDPVLREAVEAQIRSFGQTPSQLLIEPHPPRGSAMQVSPLMFTDKAQQDVIMVLKFPSNSPVTHVAANTQPGLATPAVITVTANRLFAVNKWHNLPAHQGAVQDQPYQLPVEIDPLIASNTGMHRRQITDLLDQSIQVHSQCFVITSDNRYILVCGFWDKSFRVYSTDTGRLIQVVFGHWDVVTCLARSESYIGGNCYILSGSRDATLLLWYWNGKCSGIGDNPGETAAPRAILTGHDYEVTCAAVCAELGLVLSGSQEGPCLIHSMNGDLLRTLEGPENCLKPKLIQASREGHCVIFYENGLFCTFSVNGKLQATMETDDNIRAIQLSRDGQYLLTGGDRGVVVVRQVSDLKQLFAYPGCDAGIRAMALSYDQRCIISGMASGSIVLFYNDFNRWHHEYQTRY

SEQ ID NO: 1557 - protein, 969 aa, Artificial Sequence
  Synthetic polypeptide
IIIYKMKILARTPRPIIFLQPPWTTVFQGERVTLTCKGFRFYSPQKTKWYHRYLGKEILRETPDNILEVQESGEYRCQAQGSPLSSPVHLDFSSASLILQAPLSVFEGDSVVLRCRAKAEVTLNNTIYKNDNVLAFLNKRTDFHIPHACLKDNGAYRCTGYKESCCPVSSNTVKIQVQEPFTRPVLRASSFQPISGNPVTLTCETQLSLERSDVPLRFRFFRDDQTLGLGWSLSPNFQITAMWSKDSGFYWCKAATMPYSVISDSPRSWIQVQIPASHPVLTLSPEKALNFEGTKVTLHCETQEDSLRTLYRFYHEGVPLRHKSVRCERGASISFSLTTENSGNYYCTADNGLGAKPSKAVSLSVTVPVSHPVLNLSSPEDLIFEGAKVTLHCEAQRGSLPILYQFHHEGAALERRSANSAGGVAISFSLTAEHSGNYYCTADNGFGPQRSKAVSLSVTVPVSHPVLTLSSAEALTFEGATVTLHCEVQRGSPQILYQFYHEDMPLWSSSTPSVGRVSFSFSLTEGHSGNYYCTADNGFGPQRSEVVSLFVTVPVSRPILTLRVPRAQAVVGDLLELHCEAPRGSPPILYWFYHEDVTLGSSSAPSGGEASFNLSLTAEHSGNYSCEANNGLVAQHSDTISLSVIVPVSRPILTFRAPRAQAVVGDLLELHCEALRGSSPILYWFYHEDVTLGKISAPSGGGASFNLSLTTEHSGIYSCEADNGLEAQRSEMVTLKVAVPVSRPVLTLRAPGTHAAVGDLLELHCEALRGSPLILYRFFHEDVTLGNRSSPSGGASLNLSLTAEHSGNYSCEADNGLGAQRSETVTLYITGLTANRSGPFATGVAGGLLSIAGLAAGALLLYCWLSRKAGRKPASDPARSPSDSDSQEPTYHNVPAWEELQPVYTNANPRGENVVYSEVRIIQEKKKHAVASDPRHLRNKGSPIIYSEVKVASTPVSGSLFLASSAPHR

SEQ ID NO: 1558 - protein, 969 aa, Artificial Sequence; identical to SEQ ID NO: 1557
  Synthetic polypeptide

SEQ ID NO: 1559 - protein, 967 aa, Artificial Sequence
  Synthetic polypeptide
GADAGILLVVILVSSSLSDRDQSLFLSADEGATFQKQPIPFFVETLIFHPKEEDKVLAYTKESKLYVSSDLGKKWTLLQERVTKDHVFWSVSGVDADPDLVHVEAQDLGGDFRYVTCAIHNCSEKMLTAPFAGPIDHGSLTVQDDYIFFKATSANQTKYYVSYRRNEFVLMKLPKYALPKDLQIISTDESQVFVAVQEWYQMDTYNLYQSDPRGVRYALVLQDVRSSRQAEESVLIDILEVRGVKGVFLANQKIDGKVMTLITYNKGRDWDYLRPPSMDMNGKPTNCKPPDCHLHLHLRWADNPYVSGTVHTKDTAPGLIMGAGNLGSQLVEYKEEMYITSDCGHTWRQVFEEEHHILYLDHGGVIVAIKDTSIPLKILKFSVDEGLTWSTHNFTSTSVFVDGLLSEPGDETLVMTVFGHISFRSDWELVKVDFRPSFSRQCGEEDYSSWELSNLQGDRCIMGQQRSFRKRKSTSWCIKGRSFTSALTSRVCECRDSDFLCDYGFERSSSSESSTNKCSANFWFNPLSPPDDCALGQTYTSSLGYRKVVSNVCEGGVDMQQSQVQLQCPLTPPRGLQVSIQGEAVAVRPGEDVLFVVRQEQGDVLTTKYQVDLGDGFKAMYVNLTLTGEPIRHRYESPGIYRVSVRAENTAGHDEAVLFVQVNSPLQALYLEVVPVIGLNQEVNLTAVLLPLNPNLTVFYWWIGHSLQPLLSLDNSVTTRFSDTGDVRVTVQAACGNSVLQDSRVLRVLDQFQVMPLQFSKELDAYNPNTPEWREDVGLVVTRLLSKETSVPQELLVTVVKPGLPTLADLYVLLPPPRPTRKRSLSSDKRLAAIQQVLNAQKISFLLRGGVRVLVALRDTGTGAEQLGGGGGYWAVVVLFVIGLFAAGAFILYKFKSRKRPGRTVYAQMHNEKEQEMTSPVSHSEDVQGAVQGEEFIDDDLDSQTLGNHSGVVLSINSREMHSYLVS

SEQ ID NO: 1560 - protein, 961 aa, Artificial Sequence
  Synthetic polypeptide
VEGRNRMFPTQKNVLNVQGNRDYAKDDPLEFKSHQWFGASVRSKQDKILACAPLYHWRTEMKQEREPVGTCFLQDGTKTVEYAPCRSQDIDADGQGFCQGGFSIDFTKADRVLLGGPGSFYWQGQLISDQVAEIVSKYDPNVYSIKYNNQLATRTAQAIFDDSYLGYSVAVGDFNGDGIDDFVSGVPRAARTLGMVYIYDGKNMSSLYNFTGEQMAAYFGFSVAATDINGDDYADVFIGAPLFMDRGSDGKLQEVGQVSVSLQRASGDFQTTKLNGFEVFARFGSAIAPLGDLDQDGFNDIAIAAPYGGEDKKGIVYIFNGRSTGLNAVPSQILEGQWAARSMPPSFGYSMKGATDIDKNGYPDLIVGAFGVDRAILYRARPVITVNAGLEVYPSILNQDNKTCSLPGTALKVSCFNVRFCLKADGKGVLPRKLNFQVELLLDKLKQKGAIRRALFLYSRSPSHSKNMTISRGGLMQCEELIAYLRDESEFRDKLTPITIFMEYRLDYRTAADTTGLQPILNQFTPANISRQAHILLDCGEDNVCKPKLEVSVDSDQKKIYIGDDNPLTLIVKAQNQGEGAYEAELIVSIPLQADFIGVVRNNEALARLSCAFKTENQTRQVVCDLGNPMKAGTQLLAGLRFSVHQQSEMDTSVKFDLQIQSSNLFDKVSPVVSHKVDLAVLAAVEIRGVSSPDHVFLPIPNWEHKENPETEEDVGPVVQHIYELRNNGPSSFSKAMLHLQWPYKYNNNTLLYILHYDIDGPMNCTSDMEINPLRIKISSLQTTEKNDTVAGQGERDHLITKRDLALSEGDIHTLGCGVAQCLKIVCQVGRLDRGKSAILYVKSLLWTETFMNKENQNHSYSLKSSASFNVIEFPYKNLPIEDITNSTLVTTNVTWGIQPAPMPVPVWVIILAVLAGLLLLAVLVFVMYRMGFFKRVRPPQEEQEREQLQPHENGEGNSET

SEQ ID NO: 1561 - protein, 961 aa, Artificial Sequence; identical to SEQ ID NO: 1560
  Synthetic polypeptide

SEQ ID NO: 1562 - protein, 959 aa, Artificial Sequence
  Synthetic polypeptide
RQGLLLCSQLLNSLSVDPDAECKYGLYFRDGRRKVDYILVYHHKRPSGNRTLVRRVQHSDTPSGARSVKQDHPLPGKGASLDAGSGEPPMDYHEDDKRFRREEYEGNLLEAGLELERDEDTKIHGVGFVKIHAPWNVLCREAEFLKLKMPTKKMYHINETRGLLKKINSVLQKITDPIQPKVAEHRPQTMKRLSYPFSREKQHLFDLSDKDSFFDSKTRSTIVYEILKRTTCTKAKYSMGITSLLANGVYAAAYPLHDGDYNGENVEFNDRKLLYEEWARYGVFYKYQPIDLVRKYFGEKIGLYFAWLGVYTQMLIPASIVGIIVFLYGCATMDENIPSMEMCDQRHNITMCPLCDKTCSYWKMSSACATARASHLFDNPATVFFSVFMALWAATFMEHWKRKQMRLNYRWDLTGFEEEEEAVKDHPRAEYEARVLEKSLKKESRNKEKRRHIPEESTNKWKQRVKTAMAGVKLTDKVKLTWRDRFPAYLTNLVSIIFMIAVTFAIVLGVIIYRISMAAALAMNSSPSVRSNIRVTVTATAVIINLVVIILLDEVYGCIARWLTKIEVPKTEKSFEERLIFKAFLLKFVNSYTPIFYVAFFKGRFVGRPGDYVYIFRSFRMEECAPGGCLMELCIQLSIIMLGKQLIQNNLFEIGIPKMKKLIRYLKLKQQSPPDHEECVKRKQRYEVDYNLEPFAGLTPEYMEMIIQFGFVTLFVASFPLAPLFALLNNIIEIRLDAKKFVTELRRPVAVRAKDIGIWYNILRGIGKLAVIINAFVISFTSDFIPRLVYLYMYSKNGTMHGFVNHTLSSFNVSDFQNGTAPNDPLDLGYEVQICRYKDYREPPWSENKYDISKDFWAVLAARLAFVIVFQNLVMFMSDFVDWVIPDIPKDISQQIHKEKVLMVELFMREEQDKQQLLETWMEKERQKDEPPCNHHNTKACPDSLGSPAPSHAYHGGVL

SEQ ID NO: 1563 - protein, 959 aa, Artificial Sequence
  Synthetic polypeptide
RQGLLLCSQLLNSLSVDPDAECKYGLYFRDGRRKVDYILVYHHKRPSGNRTLVRRVQHSDTPSGARSVKQDHPLPGKGASLDAGSGEPPMDYHEDDKRFRREEYEGNLLEAGLELERDEDTKIHGVGFVKIHAPWNVLCREAEFLKLKMPTKKMYHINETRGLLKKINSVLQKITDPIQPKVAEHRPQTMKRLSYPFSREKQHLFDLSDKDSFFDSKTRSTIVYEILKRTTCTKAKYSMGITSLLANGVYAAAYPLHDGDYNGENVEFNDRKLLYEEWARYGVFYKYQPIDLVRKYFGEKIGLYFAWLGVYTQMLIPASIVGIIVFLYGCATMDENIPSMEMCDQRHNITMCPLCDKTCSYWKMSSACATARASHLFDNPATVFFSVFMALWAATFMEHWKRKQMRLNYRWDLTGFEEEEKALLDHPRAEYEARVLEKSLKKESRNKEKRRHIPEESTNKWKQRVKTAMAGVKLTDKVKLTWRDRFPAYLTNLVSIIFMIAVTFAIVLGVIIYRISMAAALAMNSSPSVRSNIRVTVTATAVIINLVVIILLDEVYGCIARWLTKIEVPKTEKSFEERLIFKAFLLKFVNSYTPIFYVAFFKGRFVGRPGDYVYIFRSFRMEECAPGGCLMELCIQLSIIMLGKQLIQNNLFEIGIPKMKKLIRYLKLKQQSPPDHEECVKRKQRYEVDYNLEPFAGLTPEYMEMIIQFGFVTLFVASFPLAPLFALLNNIIEIRLDAKKFVTELRRPVAVRAKDIGIWYNILRGIGKLAVIINAFVISFTSDFIPRLVYLYMYSKNGTMHGFVNHTLSSFNVSDFQNGTAPNDPLDLGYEVQICRYKDYREPPWSENKYDISKDFWAVLAARLAFVIVFQNLVMFMSDFVDWVIPDIPKDISQQIHKEKVLMVELFMREEQDKQQLLETWMEKERQKDEPPCNHHNTKACPDSLGSPAPSHAYHGGVL

SEQ ID NO: 1564 - protein, 958 aa, Artificial Sequence
  Synthetic polypeptide
KMETIPTTKLLVRIKRGRAGPPVIVVPPKNSTVNASQDVSLACHAEAYPANLTYSWFQDNINVFHISRLQPRVRILVDGSLRLLATQPDDAGCYTCVPSNGLLHPPSASAYLTVLCMPGVIRCPVRANPPLLFVSWTKDGKALQLDKFPGWSQGTEGSLIIALGNEDALGEYSCTPYNSLGTAGPSPVTRVLLKAPPAFIERPKEEYFQEVGRELLIPCSAQGDPPPVVSWTKVGRGLQGQAQVDSNSSLILRPLTKEAHGHWECSASNAVARVATSTNVYVLGTSPHVVTNVSVVALPKGANVSWEPGFDGGYLQRFSVWYTPLAKRPDRMHHDWVSLAVPVGAAHLLVPGLQPHTQYQFSVLAQNKLGSGPFSEIVLSAPEGLPTTPAAPGLPPTEIPPPLSPPRGLVAVRTPRGVLLHWDPPELVPKRLDGYVLEGRQGSQGWEVLDPAVAGTETELLVPGLIKDVLYEFRLVAFAGSFVSDPSNTANVSTSGLEVYPSRTQLPGLLPQPVLAGVVGGVCFLGVAVLVSILAGCLLNRRRAARRRRKRLRQDPPLIFSPTGKSAAPSALGSGSPDSVAKLKLQGSPVPSLRQSLLWGDPAGTPSPHPDPPSSRGPLPLEPICRGPDGRFVMGPTVAAPQERSGREQAEPRTPAQRLARSFDCSSSSPSGAPQPLCIEDISPVAPPPAAPPSPLPGPGPLLQYLSLPFFREMNVDGDWPPLEEPSPAAPPDYMDTRRCPTSSFLRSPETPPVSPRESLPGAVVGAGATAEPPYTALADWTLRERLLPGLLPAAPRGSLTSQSSGRGSASFLRPPSTAPSAGGSYLSPAPGDTSSWASGPERWPRREHVVTVSKRRNTSVDENYEWDSEFPGDMELLETLHLGLASSRLRPEAEPELGVKTPEEGCLLNTAHVTGPEARCAALREEFLAFRRRRDATRARLPAYRQPVPHPEQATLL

SEQ ID NO: 1565 - protein, 952 aa, Artificial Sequence
  Synthetic polypeptide
GADAGILLVVILVSSSLSDRDQSLFLSADEGATFQKQPIPFFVETLIFHPKEEDKVLAYTKESKLYVSSDLGKKWTLLQERVTKDHVFWSVSGVDADPDLVHVEAQDLGGDFRYVTCAIHNCSEKMLTAPFAGPIDHGSLTVQDDYIFFKATSANQTKYYVSYRRNEFVLMKLPKYALPKDLQIISTDESQVFVAVQEWYQMDTYNLYQSDPRGVRYALVLQDVRSSRQAEESVLIDILEVRGVKGVFLANQKIDGKVMTLITYNKGRDWDYLRPPSMDMNGKPTNCKPPDCHLHLHLRWADNPYVSGTVHTKDTAPGLIMGAGNLGSQLVEYKEEMYITSDCGHTWRQVFEEEHHILYLDHGGVIVAIKDTSIPLKILKFSVDEGLTWSTHNFTSTSVFVDGLLSEPGDETLVMTVFGHISFRSDWELVKVDFRPSFSRQCGEEDYSSWELSNLQGDRCIMGQQRSFRKRKSTSWCIKGRSFTSALTSRVCECRDSDFLCDYGFERSSSSESSTNKCSANFWFNPLSPPDDCALGQTYTSSLGYRKVVSNVCEGGVDMQQSQVQLQCPLTPPRGLQVSIQGEAVAVRPGEDVLFVVRQEQGDVLTTKYQVDLGDGFKAMYVNLTLTGEPIRHRYESPGIYRVSVRAENTAGHDEAVLFVQVNSPLQALYLEVVPVIGLNQEVNLTAVLLPLNPNLTVFYWWIGHSLQPLLSLDNSVTTRFSDTGDVRVTVQAACGNSVLQDSRVLRVLDQFQVMPLQFSKELDAYNPNTPEWREDVGLVVTRLLSKETSVPQELLVTVVKPGLPTLADLYVLLPPPRPTRKRSLSSDKRLAAIQQVLNAQKISFLLRGGVRVLVALRDTGTGAEQLGGGGGYWAVVVLFVIGLFAAGAFILYKFKRKRPGRTVYAQMHNEKEQEMTSPVSHSEDVQGAVQGNHSGVVLSINSREMHSYLVS

SEQ ID NO: 1566 - protein, 946 aa, Artificial Sequence
  Synthetic polypeptide
CNLISTKNTKISQASVSLKRLRIFLSHEELEPDSIERRPVKDGGGTNSITVRNATFTWARSDPPTLNGITFSIPEGALVAVVGQVGCGKSSLLSALLAEMDKVEGHVAIKGSVAYVPQQAWIQNDSLRENILFGCQLEEPYYRSVIQACALLPDLEILPSGDRTEIGEKGVNLSGGQKQRVSLARAVYSNADIYLFDDPLSAVDAHVGKHIFENVIGPKGMLKNKTRILVTHSMSYLPQVDVIIVMSGGKISEMGSYQELLARDGAFAEFLRTYASTEQEQDAEENGSTVMDEEEAGVTGVSGPGKEAKQMENGMLVTDSAGKQLQRQLSSSSSYSGDISRHHNSTAELQKAEAKKEETWKLMEADKAQTGQVKLSVYWDYMKAIGLFISFLSIFLFMCNHVSALASNYWLSLWTDDPIVNGTQEHTKVRLSVYGALGISQGIAVFGYSMAVSIGGILASRCLHVDLLHSILRSPMSFFERTPSGNLVNRFSKELDTVDSMIPEVIKMFMGSLFNVIGACIVILLATPIAAIIIPPLGLIYFFVQRFYVASSRQLKRLESVSRSPVYSHFNETLLGVSVIRAFEEQERFIHQSDLKVDENQKAYYPSIVANRWLAVRLECVGNCIVLFAALFAVISRHSLSAGLVGLSVSYSLQVTTYLNWLVRMSSEMETNIVAVERLKEYSETEKEAPWQIQETAPPSSWPQVGRVEFRNYCLRYREDLDFVLRHINVTINGGEKVGIVGRTGAGKSSLTLGLFRINESAEGEIIIDGINIAKIGLHDLRFKITIIPQDPVLFSGSLRMNLDPFSQYSDEEVWTSLELAHLKDFVSALPDKLDHECAEGGENLSVGQRQLVCLARALLRKTKILVLDEATAAVDLETDDLIQSTIRTQFEDCTVLTIAHRLNTIMDYTRVIVLDKGEIQEYGAPSDLLQQRGLFYSMAKDAGLV

SEQ ID NO: 1567 - protein, 946 aa, Artificial Sequence; identical to SEQ ID NO: 1566
  Synthetic polypeptide

SEQ ID NO: 1568 - protein, 940 aa, Artificial Sequence
  Synthetic polypeptide
CFSAFWLRSSVFFSVIHSSYCIGAAVPHFETFAIARGAAFHIFQVIDKKPSIDNFSTAGYKPESIEGTVEFKNVSFNYPSRPSIKILKGLNLRIKSGETVALVGLNGSGKSTVVQLLQRLYDPDDGFIMVDENDIRALNVRHYRDHIGVVSQEPVLFGTTISNNIKYGRDDVTDEEMERAAREANAYDFIMEFPNKFNTLVGEKGAQMSGGQKQRIAIARALVRNPKILILDEATSALDSESKSAVQAALEKASKGRTTIVVAHRLSTIRSADLIVTLKDGMLAEKGAHAELMAKRGLYYSLVMSQDIKKADEQMESMTYSTERKTNSLPLHSVKSIKSDFIDKAEESTQSKEISLPEVSLLKILKLNKPEWPFVVLGTLASVLNGTVHPVFSIIFAKIITMFGNNDKTTLKHDAEIYSMIFVILGVICFVSYFMQGLFYGRAGEILTMRLRHLAFKAMLYQDIAWFDEKENSTGGLTTILAIDIAQIQGATGSRIGVLTQNATNMGLSVIISFIYGWEMTFLILSIAPVLAVTGMIETAAMTGFANKDKQELKHAGKIATEALENIRTIVSLTREKAFEQMYEEMLQTQHRNTSKKAQIIGSCYAFSHAFIYFAYAAGFRFGAYLIQAGRMTPEGMFIVFTAIAYGAMAIGETLVLAPEYSKAKSGAAHLFALLEKKPNIDSRSQEGKKPDTCEGNLEFREVSFFYPCRPDVFILRGLSLSIERGKTVAFVGSSGCGKSTSVQLLQRLYDPVQGQVLFDGVDAKELNVQWLRSQIAIVPQEPVLFNCSIAENIAYGDNSRVVPLDEIKEAANAANIHSFIEGLPEKYNTQVGLKGAQLSGGQKQRLAIARALLQKPKILLLDEATSALDNDSEKVVQHALDKARTGRTCLVVTHRLSAIQNADLIVVLHNGKIKEQGTHQELLRNRDIYFKLVNAQSVQ

SEQ ID NO: 1569 - protein, 940 aa, Artificial Sequence
  Synthetic polypeptide
PLQAVPSSETLMDSTTATAELGWMVHPPSGWEEVSGYDENMNTIRTYQVCNVFESSQNNWLRTKFIRRRGAHRIHVEMKFSVRDCSSIPSVPGSCKETFNLYYYEADFDSATKTFPNWMENPWVKVDTIAADESFSQVDLGGRVMKINTEVRSFGPVSRSGFYLAFQDYGGCMSLIAVRVFYRKCPRIIQNGAIFQETLSGAESTSLVAARGSCIANAEEVDVPIKLYCNGDGEWLVPIGRCMCKAGFEAVENGTVCRGCPSGTFKANQGDEACTHCPINSRTTSEGATNCVCRNGYYRADLDPLDMPCTTIPSAPQAVISSVNETSLMLEWTPPRDSGGREDLVYNIICKSCGSGRGACTRCGDNVQYAPRQLGLTEPRIYISDLLAHTQYTFEIQAVNGVTDQSPFSPQFASVNITTNQAAPSAVSIMHQVSRTVDSITLSWSQPDQPNGVILDYELQYYEKQELSEYNATAIKSPTNTVTVQGLKAGAIYVFQVRARTVAGYGRYSGKMYFQTMTEAEYQTSIQEKLPLIIGSSAAGLVFLIAVVVIAIVCNRRGFERADSEYTDKLQHYTSGHMTPGMKIYIDPFTYEDPNEAVREFAKEIDISCVKIEQVIGAGEFGEVCSGHLKLPGKREIFVAIKTLKSGYTEKQRRDFLSEASIMGQFDHPNVIHLEGVVTKSTPVMIITEFMENGSLDSFLRQNDGQFTVIQLVGMLRGIAAGMKYLADMNYVHRDLAARNILVNSNLVCKVSDFGLSRFLEDDTSDPTYTSALGGKIPIRWTAPEAIQYRKFTSASDVWSYGIVMWEVMSYGERPYWDMTNQDVINAIEQDYRLPPPMDCPSALHQLMLDCWQKDRNHRPKFGQIVNTLDKMIRNPNSLKAMAPLSSGINLPLLDRTIPDYTSFNTVDEWLEAIKMGQYKESFANAGFTSFDVVSQMMME

SEQ ID NO: 1570 - protein, 939 aa, Artificial Sequence
  Synthetic polypeptide
GVGGANKHKPWIEAEYQGIVMENDNTVLLNPPLFALDKDAPLRYAGEICGFRLHGSGVPFEAVILDKATGEGLIRAKEPVDCEAQKEHTFTIQAYDCGEGPDGANTKKSHKATVHVRVNDVNEFAPVFVERLYRAAVTEGKLYDRILRVEAIDGDCSPQYSQICYYEILTPNTPFLIDNDGNIENTEKLQYSGERLYKFTVTAYDCGKKRAADDAEVEIQVKPTCKPSWQGWNKRIEYAPGAGSLALFPGIRLETCDEPLWNIQATIELQTSHVAKGCDRDNYSERALRKLCGAATGEVDLLPMPGPNANWTAGLSVHYSQDSSLIYWFNGTQAVQVPLGGPSGLGSGPQDSLSDHFTLSFWMKHGVTPNKGKKEEETIVCNTVQNEDGFSHYSLTVHGCRIAFLYWPLLESARPVKFLWKLEQVCDDEWHHYALNLEFPTVTLYTDGISFDPALIHDNGLIHPPRREPALMIGACWTEEKNKEKEKGDNSTDTTQGDPLSIHHYFHGYLAGFSVRSGRLESREVIECLYACREGLDYRDFESLGKGMKVHVNPSQSLLTLEGDDVETFNHALQHVAYMNTLRFATPGVRPLRLTTAVKCFSEESCVSIPEVEGYVVVLQPDAPQILLSGTAHFARPAVDFEGTNGVPLFPDLQITCSISHQVEAKKDESWQGTVTDTRMSDEIVHNLDGCEISLVGDDLDPERESLLLDTTSLQQRGLELTNTSAYLTIAGVESITVYEEILRQARYRLRHGAALYTRKFRLSCSEMNGRYSSNEFIVEVNVLHSMNRVAHPSHVLSSQQFLHRGHQPPPEMAGHSLASSHRNSMIPSAATLIIVVCVGFLVLMVVLGLVRIHSLHRRVSGAGGPPGASSDPKDPDLFWDDSALTIIVNPMESYQNRQSCVTGAVGGQQEDEDSSDSEVADSPSSDERRIIETPPHRY

SEQ ID NO: 1571 - protein, 939 aa, Artificial Sequence; identical to SEQ ID NO: 1570
  Synthetic polypeptide

SEQ ID NO: 1572 - protein, 938 aa, Artificial Sequence
  Synthetic polypeptide
VCPKKNLAEKSSDEFPIPTGTDSGSEVLPDSFPSAPAEPLPYFLQEPQDAYIVKNKPVELRCRAFPATQIYFKCNGEWVSQNDHVTQEGLDEATGLRVREVQIEVSRQQVEELFGLEDYWCQCVAWSSAGTTKSRRAYVRIAYLRKNFDQEPLGKEVPLDHEVLLQCRPPEGVPVAEVEWLKNEDVIDPTQDTNFLLTIDHNLIIRQARLSDTANYTCVAKNIVAKRRSTTATVIVYVNGGWSSWAEWSPCSNRCGRGWQKRTRTCTNPAPLNGGAFCEGQAFQKTACTTICPVDGAWTEWSKWSACSTECAHWRSRECMAPPPQNGGRDCSGTLLDSKNCTDGLCMQNKKTLSDPNSHLLEASGDAALYAGLVVAIFVVVAILMAVGVVVYRRNCRDFDTDITDSSAALTGGFHPVNFKTARPSNPQLLHPSVPPDLTASAGIYRGPVYALQDSTDKIPMTNSPLLDPLPSLKVKVYSSSTTGSGPGLADGADLLGVLPPGTYPSDFARDTHFLHLRSASLGSQQLLGLPRDPGSSVSGTFGCLGGRLSIPGTGVSLLVPNGAIPQGKFYEMYLLINKAESTLPLSEGTQTVLSPSVTCGPTGLLLCRPVILTMPHCAEVSARDWIFQLKTQAHQGHWEEVVTLDEETLNTPCYCQLEPRACHILLDQLGTYVFTGESYSRSAVKRLQLAVFAPALCTSLEYSLRVYCLEDTPVALKEVLELERTLGGYLVEEPKPLMFKDSYHNLRLSLHDLPHAHWRSKLLAKYQEIPFYHIWSGSQKALHCTFTLERHSLASTELTCKICVRQVEGEGQIFQLHTTLAETPAGSLDTLCSAPGSTVTTQLGPYAFKIPLSIRQKICNSLDAPNSRGNDWRMLAQKLSMDRYLNYFATKASPTGVILDLWEALQQDDGDLNSLASALEEMGKSEMLVAVATDGDC

SEQ ID NO: 1573 - protein, 938 aa, Artificial Sequence
  Synthetic polypeptide
WLRNFNTGEGGLGQPFGWKRMAGPGGCDSDHWGPHCSNRCQCQNGALCNPITGACVCAAGFRGWRCEELCAPGTHGKGCQLPCQCRHGASCDPRAGECLCAPGYTGVYCEELCPPGSHGAHCELRCPCQNGGTCHHITGECACPPGWTGAVCAQPCPPGTFGQNCSQDCPCHHGGQCDHVTGQCHCTAGYMGDRCQEECPFGSFGFQCSQHCDCHNGGQCSPTTGACECEPGYKGPRCQERLCPEGLHGPGCTLPCPCDADNTISCHPVTGACTCQPGWSGHHCNESCPVGYYGDGCQLPCTCQNGADCHSITGGCTCAPGFMGEVCAVSCAAGTYGPNCSSICSCNNGGTCSPVDGSCTCKEGWQGLDCTLPCPSGTWGLNCNESCTCANGAACSPIDGSCSCTPGWLGDTCELPCPDGTFGLNCSEHCDCSHADGCDPVTGHCCCLAGWTGIRCDSTCPPGRWGPNCSVSCSCENGGSCSPEDGSCECAPGFRGPLCQRICPPGFYGHGCAQPCPLCVHSSRPCHHISGICECLPGFSGALCNQVCAGGYFGQDCAQLCSCANNGTCSPIDGSCQCFPGWIGKDCSQACPPGFWGPACFHACSCHNGASCSAEDGACHCTPGWTGLFCTQRCPAAFFGKDCGRVCQCQNGASCDHISGKCTCRTGFTGQHCEQRCAPGTFGYGCQQLCECMNNSTCDHVTGTCYCSPGFKGIRCDQAALMMEELNPYTKISPALGAERHSVGAVTGIMLLLFLIVVLLGLFAWHRRRQKEKGRDLAPRVSYTPAMRMTSTDYSLSGACGMDRRQNTYIMDKGFKDYMKESVCSSSTCSLNSSENPYATIKDPPILTCKLPESSYVEMKSPVHMGSPYTDVPSLSTSNKNIYEVEPTVSVVQEGCGHNSSYIQNAYDLPRNSHIPGHYDLLPVRQSPANGPSQDKQS

SEQ ID NO: 1574 - protein, 938 aa, Artificial Sequence; identical to SEQ ID NO: 1573
  Synthetic polypeptide

SEQ ID NO: 1575 - protein, 938 aa, Artificial Sequence; identical to SEQ ID NO: 1573
  Synthetic polypeptide

SEQ ID NO: 1576 - protein, 938 aa, Artificial Sequence; identical to SEQ ID NO: 1573
  Synthetic polypeptide

SEQ ID NO: 1577 - protein, 937 aa, Artificial Sequence
  Synthetic polypeptide
GQEFKTSLANMSLFLMEEVHMIKNKPASPHIKIEMKNATLAWDSSHSSIQNSPKLTPKMKKDKRASRGKKEKVRQLQRTEHQAVLAEQKGHLLLDSDERPSPEEEEGKHIHLGHLRLQRTLHSIDLEIQEGKLVGICGSVGSGKTSLISAILGQMTLLEGSIAISGTFAYVAQQAWILNATLRDNILFGKEYDEERYNSVLNSCCLRPDLAILPSSDLTEIGERGANLSGGQRQRISLARALYSDRSIYILDDPLSALDAHVGNHIFNSAIRKHLKSKTVLFVTHQLQYLVDCDEVIFMKEGCITERGTHEELMNLNGDYATIFNNLLLGETPPVEINSKKETSGSQKKSQDKGPKTGSVKKEKAVKPEEGQLVQLEEKGQGSVPWSVYGVYIQAAGGPLAFLVIMALFMLNVGSTAFSTWWLSYWIKQGSGNTTVTRGNETSVSDSMKDNPHMQYYASIYALSMAVMLILKAIRGVVFVKGTLRASSRLHDELFRRILRSPMKFFDTTPTGRILNRFSKDMDEVDVRLPFQAEMFIQNVILVFFCVGMIAGVFPWFLVAVGPLVILFSVLHIVSRYQELLDDNQAPFFLFTCAMRWLAVRLDLISIALITTTGLMIVLMHGQIPPAYAGLAISYAVQLTGLFQFTVRLASETEARFTSVERINHYIKTLSLEAPARIKNKAPSPDWPQEGEVTFENAEMRYRENLPLVLKKVSFTIKPKEKIGIVGRTGSGKSSLGMALFRLVELSGGCIKIDGVRISDIGLADLRSKLSIIPQEPVLFSGTVRSNLDPFNQYTEDQIWDALERTHMKECIAQLPLKLESEVMENGDNFSVGERQLLCIARALLRHCKILILDEATAAMDTETDLLIQETIREAFADCTMLTIAHRLHTVLGSDRIMVLAQGQVVEFDTPSVLLSNDSSRFYAMFAAAENKVAVKG

SEQ ID NO: 1578 - protein, 936 aa, Artificial Sequence
  Synthetic polypeptide
CNLISTKNTKISQASVSLKRLRIFLSHEELEPDSIERRPVKDGGGTNSITVRNATFTWARSDPPTLNGITFSIPEGALVAVVGQVGCGKSSLLSALLAEMDKVEGHVAIKGSVAYVPQQAWIQNDSLRENILFGCQLEEPYYRSVIQACALLPDLEILPSGDRTEIGEKGVNLSGGQKQRVSLARAVYSNADIYLFDDPLSAVDAHVGKHIFENVIGPKGMLKNKTRILVTHSMSYLPQVDVIIVMSGGKISEMGSYQELLARDGAFAEFLRTYASTEQEQDAEENGVTGVSGPGKEAKQMENGMLVTDSAGKQLQRQLSSSSSYSGDISRHHNSTAELQKAEAKKEETWKLMEADKAQTGQVKLSVYWDYMKAIGLFISFLSIFLFMCNHVSALASNYWLSLWTDDPIVNGTQEHTKVRLSVYGALGISQGIAVFGYSMAVSIGGILASRCLHVDLLHSILRSPMSFFERTPSGNLVNRFSKELDTVDSMIPEVIKMFMGSLFNVIGACIVILLATPIAAIIIPPLGLIYFFVQRFYVASSRQLKRLESVSRSPVYSHFNETLLGVSVIRAFEEQERFIHQSDLKVDENQKAYYPSIVANRWLAVRLECVGNCIVLFAALFAVISRHSLSAGLVGLSVSYSLQVTTYLNWLVRMSSEMETNIVAVERLKEYSETEKEAPWQIQETAPPSSWPQVGRVEFRNYCLRYREDLDFVLRHINVTINGGEKVGIVGRTGAGKSSLTLGLFRINESAEGEIIIDGINIAKIGLHDLRFKITIIPQDPVLFSGSLRMNLDPFSQYSDEEVWTSLELAHLKDFVSALPDKLDHECAEGGENLSVGQRQLVCLARALLRKTKILVLDEATAAVDLETDDLIQSTIRTQFEDCTVLTIAHRLNTIMDYTRVIVLDKGEIQEYGAPSDLLQQRGLFYSMAKDAGLV

SEQ ID NO: 1579 - protein, 931 aa, Artificial Sequence
  Synthetic polypeptide
AVGRARTRRAGLALAVTSGCDSDHWGPHCSNRCQCQNGALCNPITGACVCAAGFRGWRCEELCAPGTHGKGCQLPCQCRHGASCDPRAGECLCAPGYTGVYCEELCPPGSHGAHCELRCPCQNGGTCHHITGECACPPGWTGAVCAQPCPPGTFGQNCSQDCPCHHGGQCDHVTGQCHCTAGYMGDRCQEECPFGSFGFQCSQHCDCHNGGQCSPTTGACECEPGYKGPRCQERLCPEGLHGPGCTLPCPCDADNTISCHPVTGACTCQPGWSGHHCNESCPVGYYGDGCQLPCTCQNGADCHSITGGCTCAPGFMGEVCAVSCAAGTYGPNCSSICSCNNGGTCSPVDGSCTCKEGWQGLDCTLPCPSGTWGLNCNESCTCANGAACSPIDGSCSCTPGWLGDTCELPCPDGTFGLNCSEHCDCSHADGCDPVTGHCCCLAGWTGIRCDSTCPPGRWGPNCSVSCSCENGGSCSPEDGSCECAPGFRGPLCQRICPPGFYGHGCAQPCPLCVHSSRPCHHISGICECLPGFSGALCNQVCAGGYFGQDCAQLCSCANNGTCSPIDGSCQCFPGWIGKDCSQACPPGFWGPACFHACSCHNGASCSAEDGACHCTPGWTGLFCTQRCPAAFFGKDCGRVCQCQNGASCDHISGKCTCRTGFTGQHCEQRCAPGTFGYGCQQLCECMNNSTCDHVTGTCYCSPGFKGIRCDQAALMMEELNPYTKISPALGAERHSVGAVTGIMLLLFLIVVLLGLFAWHRRRQKEKGRDLAPRVSYTPAMRMTSTDYSLSGACGMDRRQNTYIMDKGFKDYMKESVCSSSTCSLNSSENPYATIKDPPILTCKLPESSYVEMKSPVHMGSPYTDVPSLSTSNKNIYEVEPTVSVVQEGCGHNSSYIQNAYDLPRNSHIPGHYDLLPVRQSPANGPSQDKQS

SEQ ID NO: 1580 - protein, 931 aa, Artificial Sequence; identical to SEQ ID NO: 1579
  Synthetic polypeptide

SEQ ID NO: 1581 - protein, 931 aa, Artificial Sequence; identical to SEQ ID NO: 1579
  Synthetic polypeptide

SEQ ID NO: 1582 - protein, 931 aa, Artificial Sequence; identical to SEQ ID NO: 1579
  Synthetic polypeptide

SEQ ID NO: 1583 - protein, 927 aa, Artificial Sequence
  Synthetic polypeptide
VCPKKNLAEKSSDEFPIPTGTDSGSEVLPDSFPSAPAEPLPYFLQEPQDAYIVKNKPVELRCRAFPATQIYFKCNGEWVSQNDHVTQEGLDEATGLRVREVQIEVSRQQVEELFGLEDYWCQCVAWSSAGTTKSRRAYVRIAYLRKNFDQEPLGKEVPLDHEVLLQCRPPEGVPVAEVEWLKNEDVIDPTQDTNFLLTIDHNLIIRQARLSDTANYTCVAKNIVAKRRSTTATVIVYVNGGWSSWAEWSPCSNRCGRGWQKRTRTCTNPAPLNGGAFCEGQAFQKTACTTICPVDGAWTEWSKWSACSTECAHWRSRECMAPPPQNGGRDCSGTLLDSKNCTDGLCMQMLEASGDAALYAGLVVAIFVVVAILMAVGVVVYRRNCRDFDTDITDSSAALTGGFHPVNFKTARPSNPQLLHPSVPPDLTASAGIYRGPVYALQDSTDKIPMTNSPLLDPLPSLKVKVYSSSTTGSGPGLADGADLLGVLPPGTYPSDFARDTHFLHLRSASLGSQQLLGLPRDPGSSVSGTFGCLGGRLSIPGTGVSLLVPNGAIPQGKFYEMYLLINKAESTLPLSEGTQTVLSPSVTCGPTGLLLCRPVILTMPHCAEVSARDWIFQLKTQAHQGHWEEVVTLDEETLNTPCYCQLEPRACHILLDQLGTYVFTGESYSRSAVKRLQLAVFAPALCTSLEYSLRVYCLEDTPVALKEVLELERTLGGYLVEEPKPLMFKDSYHNLRLSLHDLPHAHWRSKLLAKYQEIPFYHIWSGSQKALHCTFTLERHSLASTELTCKICVRQVEGEGQIFQLHTTLAETPAGSLDTLCSAPGSTVTTQLGPYAFKIPLSIRQKICNSLDAPNSRGNDWRMLAQKLSMDRYLNYFATKASPTGVILDLWEALQQDDGDLNSLASALEEMGKSEMLVAVATDGDC

SEQ ID NO: 1584 - protein, 926 aa, Artificial Sequence
  Synthetic polypeptide
PRFKMVRLRPPSWQPAAAEGKGRSGEDFFQKIMEETNTQIAWPSKLKIGAKSKKDPHIKVSGKKEDVKEAKEMIMSVLDTKSNRVTLKMDVSHTEHSHVIGKGGNNIKKVMEETGCHIHFPDSNRNNQAEKSNQVSIAGQPAGVESARVRIRELLPLVLMFELPIAGILQPVPDPNSPSIQHISQTYNISVSFKQRSRMYGATVIVRGSQNNTSAVKEGTAMLLEHLAGSLASAIPVSTQLDIAAQHHLFMMGRNGSNIKHIMQRTGAQIHFPDPSNPQKKSTVYLQGTIESVCLARQYLMGCLPLVLMFDMKEEIEVDPQFIAQLMEQLDVFISIKPKPKQPSKSVIVKSVERNALNMYEARKCLLGLESSGVTIATSPSPASCPAGLACPSLDILASAGLGLTGLGLLGPTTLSLNTSTTPNSLLNALNSSVSPLQSPSSGTPSPTLWAPPLANTSSATGFSAIPHLMIPSTAQATLTNILLSGVPTYGHTAPSPPPGLTPVDVHINSMQTEGKKISAALNGHAQSPDIKYGAISTSSLGEKVLSANHGDPSIQTSGSEQTSPKSSPTEGCNDAFVEVGMPRSPSHSGNAGDLKQMMCPSKVSCAKRQTVELLQGTKNSHLHSTDRLLSDPELSATESPLADKKAPGSERAAERAAAAQQNSERAHLAPRSSYVNMQAFDYEQKKLLATKAMLKKPVVTEVRTPTNTWSGLGFSKSMPAETIKELRRANHVSYKPTMTTTYEGSSMSLSRSNSREHLGGGSESDNWRDRNGIGPGSHSEFAASIGSPKRKQNKSTEHYLSSSNYMDCISSLTGSNGCNLNSSFKGSDLPELFSKLGLGKYTDVFQQQEIDLQTFLTLTDQDLKELGITTFGARRKMLLAISELNKNRRKLFESPNARTSFLEGGASGRLPRQYHSDIASVSGRW

SEQ ID NO: 1585 - protein, 925 aa, Artificial Sequence
  Synthetic polypeptide
VEGRNRMFPTQKNVLNVQGNRDYAKDDPLEFKSHQWFGASVRSKQDKILACAPLYHWRTEMKQEREPVGTCFLQDGTKTVEYAPCRSRQLISDQVAEIVSKYDPNVYSIKYNNQLATRTAQAIFDDSYLGYSVAVGDFNGDGIDDFVSGVPRAARTLGMVYIYDGKNMSSLYNFTGEQMAAYFGFSVAATDINGDDYADVFIGAPLFMDRGSDGKLQEVGQVSVSLQRASGDFQTTKLNGFEVFARFGSAIAPLGDLDQDGFNDIAIAAPYGGEDKKGIVYIFNGRSTGLNAVPSQILEGQWAARSMPPSFGYSMKGATDIDKNGYPDLIVGAFGVDRAILYRARPVITVNAGLEVYPSILNQDNKTCSLPGTALKVSCFNVRFCLKADGKGVLPRKLNFQVELLLDKLKQKGAIRRALFLYSRSPSHSKNMTISRGGLMQCEELIAYLRDESEFRDKLTPITIFMEYRLDYRTAADTTGLQPILNQFTPANISRQAHILLDCGEDNVCKPKLEVSVDSDQKKIYIGDDNPLTLIVKAQNQGEGAYEAELIVSIPLQADFIGVVRNNEALARLSCAFKTENQTRQVVCDLGNPMKAGTQLLAGLRFSVHQQSEMDTSVKFDLQIQSSNLFDKVSPVVSHKVDLAVLAAVEIRGVSSPDHVFLPIPNWEHKENPETEEDVGPVVQHIYELRNNGPSSFSKAMLHLQWPYKYNNNTLLYILHYDIDGPMNCTSDMEINPLRIKISSLQTTEKNDTVAGQGERDHLITKRDLALSEGDIHTLGCGVAQCLKIVCQVGRLDRGKSAILYVKSLLWTETFMNKENQNHSYSLKSSASFNVIEFPYKNLPIEDITNSTLVTTNVTWGIQPAPMPVPVWVIILAVLAGLLLLAVLVFVMYRMGFFKRVRPPQEEQEREQLQPHENGEGNSET

SEQ ID NO: 1586 - protein, 924 aa, Artificial Sequence
  Synthetic polypeptide
CTLETQKAGKQERAAAEGKGRSGEDFFQKIMEETNTQIAWPSKLKIGAKSKKDPHIKVSGKKEDVKEAKEMIMSVLDTKSNRVTLKMDVSHTEHSHVIGKGGNNIKKVMEETGCHIHFPDSNRNNQAEKSNQVSIAGQPAGVESARVRIRELLPLVLMFELPIAGILQPVPDPNSPSIQHISQTYNISVSFKQRSRMYGATVIVRGSQNNTSAVKEGTAMLLEHLAGSLASAIPVSTQLDIAAQHHLFMMGRNGSNIKHIMQRTGAQIHFPDPSNPQKKSTVYLQGTIESVCLARQYLMGCLPLVLMFDMKEEIEVDPQFIAQLMEQLDVFISIKPKPKQPSKSVIVKSVERNALNMYEARKCLLGLESSGVTIATSPSPASCPAGLACPSLDILASAGLGLTGLGLLGPTTLSLNTSTTPNSLLNALNSSVSPLQSPSSGTPSPTLWAPPLANTSSATGFSAIPHLMIPSTAQATLTNILLSGVPTYGHTAPSPPPGLTPVDVHINSMQTEGKKISAALNGHAQSPDIKYGAISTSSLGEKVLSANHGDPSIQTSGSEQTSPKSSPTEGCNDAFVEVGMPRSPSHSGNAGDLKQMMCPSKVSCAKRQTVELLQGTKNSHLHSTDRLLSDPELSATESPLADKKAPGSERAAERAAAAQQNSERAHLAPRSSYVNMQAFDYEQKKLLATKAMLKKPVVTEVRTPTNTWSGLGFSKSMPAETIKELRRANHVSYKPTMTTTYEGSSMSLSRSNSREHLGGGSESDNWRDRNGIGPGSHSEFAASIGSPKRKQNKSTEHYLSSSNYMDCISSLTGSNGCNLNSSFKGSDLPELFSKLGLGKYTDVFQQQEIDLQTFLTLTDQDLKELGITTFGARRKMLLAISELNKNRRKLFESPNARTSFLEGGASGRLPRQYHSDIASVSGRW

SEQ ID NO: 1587 - protein, 908 aa, Artificial Sequence
  Synthetic polypeptide
CIFILLMSNGDAVYLAHVSPLLSVFTQWNASCTWTRNCGRALSLCLQQCPTHGSHPVYEKYCADHFADGRCDQGCNTEECGWDGLDCASEVPALLARGVLVLTVLLPPEELLRSSADFLQRLSAILRTSLRFRLDAHGQAMVFPYHRPSPGSEPRARRELAPEVIGSVVMLEIDNRLCLQSPENDHCFPDAQSAADYLGALSAVERLDFPYPLRDVRGEPLEPPEPSVPLLPLLVAGAVLLLVILVLGVMVARRKREHSTLWFPEGFSLHKDVASGHKGRREPVGQDALGMKNMAKGESLMGEVATDWMDTECPEAKRLKVEEPGMGAEEAVDCRQWTQHHLVAADIRVAPAMALTPPQGDADADGMDVNVRGPDGFTPLMLASFCGGALEPMPTEEDEADDTSASIISDLICQGAQLGARTDRTGETALHLAARYARADAAKRLLDAGADTNAQDHSGRTPLHTAVTADAQGVFQILIRNRSTDLDARMADGSTALILAARLAVEGMVEELIASHADVNAVDELGKSALHWAAAVNNVEATLALLKNGANKDMQDSKEETPLFLAAREGSYEAAKLLLDHFANREITDHLDRLPRDVAQERLHQDIVRLLDQPSGPRSPPGPHGLGPLLCPPGAFLPGLKAAQSGSKKSRRPPGKAGLGPQGPRGRGKKLTLACPGPLADSSVTLSPVDSLDSPRPFGGPPASPGGFPLEGPYAAATATAVSLAQLGGPGRAGLGRQPPGGCVLSLGLLNPVAVPLDWARLPPPAPPGPSFLLPLAPGPQLLNPGTPVSPQERPPPYLAVPGHGEEYPAAGAHSSPPKARFLRVPSEHPYLTPSPESPEHWASPSPPSLSDWSESTPSPATATGAMATTTGALPAQPLPLSVPSSLAQAQTQLGPQPEVTPKRQVLA

SEQ ID NO: 1588 - protein, 901 aa, Artificial Sequence
  Synthetic polypeptide
GQEFETSLRNMRCCPHPLRPEGSGAMGPEALSSLLLLLLVASGDADMKGHFDPAKCRYALGMQDRTIPDSDISASSSWSDSTAARHSRLESSDGDGAWCPAGSVFPKEEEYLQVDLQRLHLVALVGTQGRHAGGLGKEFSRSYRLRYSRDGRRWMGWKDRWGQEVISGNEDPEGVVLKDLGPPMVARLVRFYPRADRVMSVCLRVELYGCLWRDGLLSYTAPVGQTMYLSEAVYLNDSTYDGHTVGGLQYGGLGQLADGVVGLDDFRKSQELRVWPGYDYVGWSNHSFSSGYVEMEFEFDRLRAFQAMQVHCNNMHTLGARLPGGVECRFRRGPAMAWEGEPMRHNLGGNLGDPRARAVSVPLGGRVARFLQCRFLFAGPWLLFSEISFISDVVNNSSPALGGTFPPAPWWPPGPPPTNFSSLELEPRGQQPVAKAEGSPTAILIGCLVAIILLLLLIIALMLWRLHWRRLLSKAERRVLEEELTVHLSVPGDTILINNRPGPREPPPYQEPRPRGNPPHSAPCVPNGSAYSGDYMEPEKPGAPLLPPPPQNSVPHYAEADIVTLQGVTGGNTYAVPALPPGAVGDGPPRVDFPRSRLRFKEKLGEGQFGEVHLCEVDSPQDLVSLDFPLNVRKGHPLLVAVKILRPDATKNARNDFLKEVKIMSRLKDPNIIRLLGVCVQDDPLCMITDYMENGDLNQFLSAHQLEDKAAEGAPGDGQAAQGPTISYPMLLHVAAQIASGMRYLATLNFVHRDLATRNCLVGENFTIKIADFGMSRNLYAGDYYRVQGRAVLPIRWMAWECILMGKFTTASDVWAFGVTLWEVLMLCRAQPFGQLTDEQVIENAGEFFRDQGRQVYLSRPPACPQGLYELMLRCWSRESEQRPPFSQLHRFLAEDALNTV

SEQ ID NO: 1589 - protein, 898 aa, Artificial Sequence
  Synthetic polypeptide
QRERKTERGTEGQGGQKRGPGETDRQGEAEGRGTQAEESPFVGNPGNITGARGLTGTLRCQLQVQGEPPEVHWLRDGQILELADSTQTQVPLGEDEQDDWIVVSQLRITSLQLSDTGQYQCLVFLGHQTFVSQPGYVGLEGLPYFLEEPEDRTVAANTPFNLSCQAQGPPEPVDLLWLQDAVPLATAPGHGPQRSLHVPGLNKTSSFSCEAHNAKGVTTSRTATITVLPQQPRNLHLVSRQPTELEVAWTPGLSGIYPLTHCTLQAVLSNDGMGIQAGEPDPPEEPLTSQASVPPHQLRLGSLHPHTPYHIRVACTSSQGPSSWTHWLPVETPEGVPLGPPENISATRNGSQAFVHWQEPRAPLQGTLLGYRLAYQGQDTPEVLMDIGLRQEVTLELQGDGSVSNLTVCVAAYTAAGDGPWSLPVPLEAWRPGQAQPVHQLVKEPSTPAFSWPWWYVLLGAVVAAACVLILALFLVHRRKKETRYGEVFEPTVERGELVVRYRVRKSYSRRTTEATLNSLGISEELKEKLRDVMVDRHKVALGKTLGEGEFGAVMEGQLNQDDSILKVAVKTMKIAICTRSELEDFLSEAVCMKEFDHPNVMRLIGVCFQGSERESFPAPVVILPFMKHGDLHSFLLYSRLGDQPVYLPTQMLVKFMADIASGMEYLSTKRFIHRDLAARNCMLNENMSVCVADFGLSKKIYNGDYYRQGRIAKMPVKWIAIESLADRVYTSKSDVWSFGVTMWEIATRGQTPYPGVENSEIYDYLRQGNRLKQPADCLDGLYALMSRCWELNPQDRPSFTELREDLENTLKALPPAQEPDEILYVNMDEGGGYPEPPGAAGGADPPTQPDPKDSCSCLTAAEVHPAGRYVLCPSTTPSPAQPADRGSPAAPGQEDGA

SEQ ID NO: 1590 - protein, 897 aa, Artificial Sequence
  Synthetic polypeptide
KYKKISQAWWCMPVIPAIREAESEYHYEYTACDSTGSRWRVAVPHTPGLCTSLPDPIKGTECSFSCNAGEFLDMKDQSCKPCAEGRYSLGTGIRFDEWDELPHGFASLSANMELDDSAAESTGNCTSSKWVPRGDYIASNTDECTATLMYAVNLKQSGTVNFEYYYPDSSIIFEFFVQNDQCQPNADDSRWMKTTEKGWEFHSVELNRGNNVLYWRTTAFSVWTKVPKPVLTQLMYKWAKPKICSEDLEGAVKLPASGVKTHCPPCNPGFFKTNNSTCQPCPYGSYSNGSDCTRCPAGTEPAVGFEYKWWNTLPTNMETTVLSGINFEYKGMTGWEVAGDHIYTAAGASDNDFMILTLVVPGFRPPQSVMADTENKEVARITFVFETLCSVNCELYFMVGVNSRTNTPVETWKGSKGKQSYTYIIEENTTTSFTWAFQRTTFHEASRKYTNDVAKIYSINVTNVMNGVASYCRPCALEASDVGSSCTSCPAGYYIDRDSGTCHSCPTNTILKAHQPYGVQACVPCGPGTKNNKIHSLCYNDCTFSRNTPTRTFNYNFSALANTVTLAGGPSFTSKGLKYFHHFTLSLCGNQGRKMSVCTDNVTDLRIPEGESGFSKSITAYVCQAVIIPPEVTGYKAGVSSQPVSLADRLIGVTTDMTLDGITSPAELFHLESLGIPDVIFFYRSNDVTQSCSSGRSTTIRVRCSPQKTVPGSLLLPGTCSDGTCDGCNFHFLWESAAACPLCSVADYHAIVSSCVAGIQKTTYVWREPKLCSGGISLPEQRVTICKTIDFWLKVGISAGTCTAILLTVLTCYFWKKNQKLEYKYSKLVMNATLKDCDLPAADSCAIMEGEDVEDDLIFTSKKSLFGKIKSFTSKRTPDGFDSVPLKTSSGGLDMDL

SEQ ID NO: 1591 - protein, 889 aa, Artificial Sequence
  Synthetic polypeptide
QRERKTERGTEGQGGQKRGPGETDRQGEAEGRGTQAEESPFVGNPGNITGARGLTGTLRCQLQVQGEPPEVHWLRDGQILELADSTQTQVPLGEDEQDDWIVVSQLRITSLQLSDTGQYQCLVFLGHQTFVSQPGYVGLEGLPYFLEEPEDRTVAANTPFNLSCQAQGPPEPVDLLWLQDAVPLATAPGHGPQRSLHVPGLNKTSSFSCEAHNAKGVTTSRTATITVLPQQPRNLHLVSRQPTELEVAWTPGLSGIYPLTHCTLQAVLSNDGMGIQAGEPDPPEEPLTSQASVPPHQLRLGSLHPHTPYHIRVACTSSQGPSSWTHWLPVETPEGVPLGPPENISATRNGSQAFVHWQEPRAPLQGTLLGYRLAYQGQDTPEVLMDIGLRQEVTLELQGDGSVSNLTVCVAAYTAAGDGPWSLPVPLEAWRPVKEPSTPAFSWPWWYVLLGAVVAAACVLILALFLVHRRKKETRYGEVFEPTVERGELVVRYRVRKSYSRRTTEATLNSLGISEELKEKLRDVMVDRHKVALGKTLGEGEFGAVMEGQLNQDDSILKVAVKTMKIAICTRSELEDFLSEAVCMKEFDHPNVMRLIGVCFQGSERESFPAPVVILPFMKHGDLHSFLLYSRLGDQPVYLPTQMLVKFMADIASGMEYLSTKRFIHRDLAARNCMLNENMSVCVADFGLSKKIYNGDYYRQGRIAKMPVKWIAIESLADRVYTSKSDVWSFGVTMWEIATRGQTPYPGVENSEIYDYLRQGNRLKQPADCLDGLYALMSRCWELNPQDRPSFTELREDLENTLKALPPAQEPDEILYVNMDEGGGYPEPPGAAGGADPPTQPDPKDSCSCLTAAEVHPAGRYVLCPSTTPSPAQPADRGSPAAPGQEDGA

SEQ ID NO: 1592 - protein, 886 aa, Artificial Sequence
  Synthetic polypeptide
SQHFGRPSITFSIPEGALVAVVGQVGCGKSSLLSALLAEMDKVEGHVAIKGSVAYVPQQAWIQNDSLRENILFGCQLEEPYYRSVIQACALLPDLEILPSGDRTEIGEKGVNLSGGQKQRVSLARAVYSNADIYLFDDPLSAVDAHVGKHIFENVIGPKGMLKNKTRILVTHSMSYLPQVDVIIVMSGGKISEMGSYQELLARDGAFAEFLRTYASTEQEQDAEENGSTVMDEEEAGVTGVSGPGKEAKQMENGMLVTDSAGKQLQRQLSSSSSYSGDISRHHNSTAELQKAEAKKEETWKLMEADKAQTGQVKLSVYWDYMKAIGLFISFLSIFLFMCNHVSALASNYWLSLWTDDPIVNGTQEHTKVRLSVYGALGISQGIAVFGYSMAVSIGGILASRCLHVDLLHSILRSPMSFFERTPSGNLVNRFSKELDTVDSMIPEVIKMFMGSLFNVIGACIVILLATPIAAIIIPPLGLIYFFVQRFYVASSRQLKRLESVSRSPVYSHFNETLLGVSVIRAFEEQERFIHQSDLKVDENQKAYYPSIVANRWLAVRLECVGNCIVLFAALFAVISRHSLSAGLVGLSVSYSLQVTTYLNWLVRMSSEMETNIVAVERLKEYSETEKEAPWQIQETAPPSSWPQVGRVEFRNYCLRYREDLDFVLRHINVTINGGEKVGIVGRTGAGKSSLTLGLFRINESAEGEIIIDGINIAKIGLHDLRFKITIIPQDPVLFSGSLRMNLDPFSQYSDEEVWTSLELAHLKDFVSALPDKLDHECAEGGENLSVGQRQLVCLARALLRKTKILVLDEATAAVDLETDDLIQSTIRTQFEDCTVLTIAHRLNTIMDYTRVIVLDKGEIQEYGAPSDLLQQRGLFYSMAKDAGLV

SEQ ID NO: 1593 - protein, 886 aa, Artificial Sequence; identical to SEQ ID NO: 1592
  Synthetic polypeptide

SEQ ID NO: 1594 - protein, 880 aa, Artificial Sequence
  Synthetic polypeptide
CNLISTKNTKISQASVSLKRLRIFLSHEELEPDSIERRPVKDGGGTNSITVRNATFTWARSDPPTLNGITFSIPEGALVAVVGQVGCGKSSLLSALLAEMDKVEGHVAIKGSVAYVPQQAWIQNDSLRENILFGCQLEEPYYRSVIQACALLPDLEILPSGDRTEIGEKTRILVTHSMSYLPQVDVIIVMSGGKISEMGSYQELLARDGAFAEFLRTYASTEQEQDAEENGVTGVSGPGKEAKQMENGMLVTDSAGKQLQRQLSSSSSYSGDISRHHNSTAELQKAEAKKEETWKLMEADKAQTGQVKLSVYWDYMKAIGLFISFLSIFLFMCNHVSALASNYWLSLWTDDPIVNGTQEHTKVRLSVYGALGISQGIAVFGYSMAVSIGGILASRCLHVDLLHSILRSPMSFFERTPSGNLVNRFSKELDTVDSMIPEVIKMFMGSLFNVIGACIVILLATPIAAIIIPPLGLIYFFVQRFYVASSRQLKRLESVSRSPVYSHFNETLLGVSVIRAFEEQERFIHQSDLKVDENQKAYYPSIVANRWLAVRLECVGNCIVLFAALFAVISRHSLSAGLVGLSVSYSLQVTTYLNWLVRMSSEMETNIVAVERLKEYSETEKEAPWQIQETAPPSSWPQVGRVEFRNYCLRYREDLDFVLRHINVTINGGEKVGIVGRTGAGKSSLTLGLFRINESAEGEIIIDGINIAKIGLHDLRFKITIIPQDPVLFSGSLRMNLDPFSQYSDEEVWTSLELAHLKDFVSALPDKLDHECAEGGENLSVGQRQLVCLARALLRKTKILVLDEATAAVDLETDDLIQSTIRTQFEDCTVLTIAHRLNTIMDYTRVIVLDKGEIQEYGAPSDLLQQRGLFYSMAKDAGLV

SEQ ID NO: 1595 - protein, 877 aa, Artificial Sequence
  Synthetic polypeptide
CNLISTKNTKISQASVSLKRLRIFLSHEELEPDSIERRPVKDGGGTNSITVRNATFTWARSDPPTLNGITFSIPEGALVAVVGQVGCGKSSLLSALLAEMDKVEGHVAIKGVNLSGGQKQRVSLARAVYSNADIYLFDDPLSAVDAHVGKHIFENVIGPKGMLKNKTRILVTHSMSYLPQVDVIIVMSGGKISEMGSYQELLARDGAFAEFLRTYASTEQEQDAEENGVTGVSGPGKEAKQMENGMLVTDSAGKQLQRQLSSSSSYSGDISRHHNSTAELQKAEAKKEETWKLMEADKAQTGQVKLSVYWDYMKAIGLFISFLSIFLFMCNHVSALASNYWLSLWTDDPIVNGTQEHTKVRLSVYGALGISQGIAVFGYSMAVSIGGILASRCLHVDLLHSILRSPMSFFERTPSGNLVNRFSKELDTVDSMIPEVIKMFMGSLFNVIGACIVILLATPIAAIIIPPLGLIYFFVQRFYVASSRQLKRLESVSRSPVYSHFNETLLGVSVIRAFEEQERFIHQSDLKVDENQKAYYPSIVANRWLAVRLECVGNCIVLFAALFAVISRHSLSAGLVGLSVSYSLQVTTYLNWLVRMSSEMETNIVAVERLKEYSETEKEAPWQIQETAPPSSWPQVGRVEFRNYCLRYREDLDFVLRHINVTINGGEKVGIVGRTGAGKSSLTLGLFRINESAEGEIIIDGINIAKIGLHDLRFKITIIPQDPVLFSGSLRMNLDPFSQYSDEEVWTSLELAHLKDFVSALPDKLDHECAEGGENLSVGQRQLVCLARALLRKTKILVLDEATAAVDLETDDLIQSTIRTQFEDCTVLTIAHRLNTIMDYTRVIVLDKGEIQEYGAPSDLLQQRGLFYSMAKDAGLV

SEQ ID NO: 1596 - protein, 876 aa, Artificial Sequence
  Synthetic polypeptide
SQHFGRPSITFSIPEGALVAVVGQVGCGKSSLLSALLAEMDKVEGHVAIKGSVAYVPQQAWIQNDSLRENILFGCQLEEPYYRSVIQACALLPDLEILPSGDRTEIGEKGVNLSGGQKQRVSLARAVYSNADIYLFDDPLSAVDAHVGKHIFENVIGPKGMLKNKTRILVTHSMSYLPQVDVIIVMSGGKISEMGSYQELLARDGAFAEFLRTYASTEQEQDAEENGVTGVSGPGKEAKQMENGMLVTDSAGKQLQRQLSSSSSYSGDISRHHNSTAELQKAEAKKEETWKLMEADKAQTGQVKLSVYWDYMKAIGLFISFLSIFLFMCNHVSALASNYWLSLWTDDPIVNGTQEHTKVRLSVYGALGISQGIAVFGYSMAVSIGGILASRCLHVDLLHSILRSPMSFFERTPSGNLVNRFSKELDTVDSMIPEVIKMFMGSLFNVIGACIVILLATPIAAIIIPPLGLIYFFVQRFYVASSRQLKRLESVSRSPVYSHFNETLLGVSVIRAFEEQERFIHQSDLKVDENQKAYYPSIVANRWLAVRLECVGNCIVLFAALFAVISRHSLSAGLVGLSVSYSLQVTTYLNWLVRMSSEMETNIVAVERLKEYSETEKEAPWQIQETAPPSSWPQVGRVEFRNYCLRYREDLDFVLRHINVTINGGEKVGIVGRTGAGKSSLTLGLFRINESAEGEIIIDGINIAKIGLHDLRFKITIIPQDPVLFSGSLRMNLDPFSQYSDEEVWTSLELAHLKDFVSALPDKLDHECAEGGENLSVGQRQLVCLARALLRKTKILVLDEATAAVDLETDDLIQSTIRTQFEDCTVLTIAHRLNTIMDYTRVIVLDKGEIQEYGAPSDLLQQRGLFYSMAKDAGLV

SEQ ID NO: 1597 - protein, 874 aa, Artificial Sequence
  Synthetic polypeptide
KKGPGIREVSSWLCQEPEPCHPGFDAESYTFTVPRRHLERGRVLGRVNFEDCTGRQRTAYFSLDTRFKVGTDGVITVKRPLRFHNPQIHFLVYAWDSTYRKFSTKVTLNTVGHHHRPPPHQASVSGIQAELLTFPNSSPGLRRQKRDWVIPPISCPENEKGPFPKNLVQIKSNKDKEGKVFYSITGQGADTPPVGVFIIERETGWLKVTEPLDRERIATYTLFSHAVSSNGNAVEDPMEILITVTDQNDNKPEFTQEVFKGSVMEGALPGTSVMEVTATDADDDVNTYNAAIAYTILSQDPELPDKNMFTINRNTGVISVVTTGLDRESFPTYTLVVQAADLQGEGLSTTATAVITVTDTNDNPPIFNPTTYKGQVPENEANVVITTLKVTDADAPNTPAWEAVYTILNDDGGQFVVTTNPVNNDGILKTAKGLDFEAKQQYILHVAVTNVVPFEVSLTTSTATVTVDVLDVNEAPIFVPPEKRVEVSEDFGVGQEITSYTAQEPDTFMEQKITYRIWRDTANWLEINPDTGAISTRAELDREDFEHVKNSTYTALIIATDNGSPVATGTGTLLLILSDVNDNAPIPEPRTIFFCERNPKPQVINIIDADLPPNTSPFTAELTHGASANWTIQYNDPTQESIILKPKMALEVGDYKINLKLMDNQNKDQVTTLEVSVCDCEGAAGVCRKAQPVEAGLQIPAILGILGGILALLILILLLLLFLRRRAVVKEPLLPPEDDTRDNVYYYDEEGGGEEDQDFDLSQLHRGLDARPEVTRNDVAPTLMSVPRYLPRPANPDEIGNFIDENLKAADTDPTAPPYDSLLVFDYEGSGSEAASLSSLNSSESDKDQDYDYLNEWGNRFKKLADMYGGGEDD

SEQ ID NO: 1598 - protein, 872 aa, Artificial Sequence
  Synthetic polypeptide
GSAVAVLNFLPENSPTMSQNGYFEDSSYYKCDTDDTFEAREEILGDEAFDTANSSIVSGESIRFFVNVNLEMQATNTENEATSGGCVLLHTSRKYLKLKNFKEEIRAHRDLDGFLAQASIVLNETATSLDNVLRTMLRRFARDPDNNEPNCNLDLLMAMLFTDAGAPMRGKVHLLSDTIQGVTATVTGVRYQQSWLCIICTMKALQKRHVCISRLVRPQNWGENSCEVRFVILVLAPPKMKSTKTAMEVARTFATMFSDIAFRQKLLETRTEEEFKEALVHQRQLLTMVSHGPVAPRTKERSTVSLPAHRHPEPPKCKDFVPFGKGIREDIARRFPLYPLDFTDGIIGKNKAVGKYITTTLFLYFACLLPTIAFGSLNDENTDGAIDVQKTIAGQSIGGLLYALFSGQPLVILLTTAPLALYIQVIRVICDDYDLDFNSFYAWTGLWNSFFLALYAFFNLSLVMSLFKRSTEEIIALFISITFVLDAVKGTVKIFWKYYYGHYLDDYHTKRTSSLVSLSGLGASLNASLHTALNASFLASPTELPSATHSGQATAVLSLLIMLGTLWLGYTLYQFKKSPYLHPCVREILSDCALPIAVLAFSLISSHGFREIEMSKFRYNPSESPFAMAQIQSLSLRAVSGAMGLGFLLSMLFFIEQNLVAALVNAPENRLVKGTAYHWDLLLLAIINTGLSLFGLPWIHAAYPHSPLHVRALALVEERVENGHIYDTIVNVKETRLTSLGASVLVGLSLLLLPVPLQWIPKPVLYGLFLYIALTSLDGNQLVQRVALLLKEQTAYPPTHYIRRVPQRKIHYFTGLQVLQLLLLCAFGMSSLPYMKMIFPLIMIAMIPIRYILLPRIIEAKYLDVMDAEHRP

SEQ ID NO: 1599 - protein, 872 aa, Artificial Sequence; identical to SEQ ID NO: 1598
  Synthetic polypeptide

SEQ ID NO: 1600 - protein, 872 aa, Artificial Sequence; identical to SEQ ID NO: 1598
  Synthetic polypeptide

SEQ ID NO: 1601 - protein, 872 aa, Artificial Sequence
  Synthetic polypeptide
DVICFSLLSTMIVRLPQPRGTERLLLSLLPAHIAMEMKAEIIQRLQGPKAGQMENTNNFHNLYVKRHTNVSILYADIVGFTRLASDCSPGELVHMLNELFGKFDQIAKENECMRIKILGDCYYCVSGLPISLPNHAKNCVKMGLDMCEAIKKVRDATGVDINMRVGVHSGNVLCGVIGLQKWQYDVWSHDVTLANHMEAGGVPGRVHISSVTLEHLNGAYKVEEGDGDIRDPYLKQHLVKTYFVINPKGERRSPQHLFRPRHTLDGAKMRASVRMTRYLESWGAAKPFAHLHHRDSMTTENGKISTTDVPMGQHNFQNRTLRTKSQKKRFEEELNERMIQAIDGINAQKQWLKSEDIQRISLLFYNKVLEKEYRATALPAFKYYVTCACLIFFCIFIVQILVLPKTSVLGISFGAAFLLLAFILFVCFAGQLLQCSKKASPLLMWLLKSSGIIANRPWPRISLTIITTAIILMMAVFNMFFLSDSEETIPPTANTTNTSFSASNNQVAILRAQNLFFLPYFIYSCILGLISCSVFLRVNYELKMLIMMVALVGYNTILLHTHAHVLGDYSQVLFERPGIWKDLKTMGSVSLSIFFITLLVLGRQNEYYCRLDFLWKNKFKKEREEIETMENLNRVLLENVLPAHVAEHFLARSLKNEELYHQSYDCVCVMFASIPDFKEFYTESDVNKEGLECLRLLNEIIADFDDLLSKPKFSGVEKIKTIGSTYMAATGLSAVPSQEHSQEPERQYMHIGTMVEFAFALVGKLDAINKHSFNDFKLRVGINHGPVIAGVIGAQKPQYDIWGNTVNVASRMDSTGVLDKIQVTEETSLVLQTLGYTCTCRGIINVKGKGDLKTYFVNTEMSRSLSQSNVAS

SEQ ID NO: 1602 - protein, 872 aa, Artificial Sequence; identical to SEQ ID NO: 1601
  Synthetic polypeptide

SEQ ID NO: 1603 - protein, 872 aa, Artificial Sequence
  Synthetic polypeptide
KYKKISQAWWCMPVIPAIREAESEYHYEYTACDSTGSRWRVAVPHTPGLCTSLPDPIKGTECSFSCNAGEFLDMKDQSCKPCAEGRYSLGTGIRFDEWDELPHGFASLSANMELDDSAAESTGNCTSSKWVPRGDYIASNTDECTATLMYAVNLKQSGTVNFEYYYPDSSIIFEFFVQNDQCQPNADDSRWMKTTEKGWEFHSVELNRGNNVLYWRTTAFSVWTKVPKPVLVRNIAITEKGSSSCNVRPACTDKDYFYTHTACDANGETQLMYKWAKPKICSEDLEGAVKLPASGVKTHCPPCNPGFFKTNNSTCQPCPYGSYSNGSDCTRCPAGTEPAVGFEYKWWNTLPTNMETTVLSGINFEYKGMTGWEVAGDHIYTAAGASDNDFMILTLVVPGFRPPQSVMADTENKEVARITFVFETLCSVNCELYFMVGVNSRTNTPVETWKGSKGKQSYTYIIEENTTTSFTWAFQRTTFHEASRKYTNDVAKIYSINVTNVMNGVASYCRPCALEASDVGSSCTSCPAGYYIDRDSGTCHSCPTNTILKAHQPYGVQACVPCGPGTKNNKIHSLCYNDCTFSRNTPTRTFNYNFSALANTVTLAGGPSFTSKGLKYFHHFTLSLCGNQGRKMSVCTDNVTDLRIPEGESGFSKSITAYVCQAVIIPPEVTGYKAGVSSQPVSLADRLIGVTTDMTLDGITSPAELFHLESLGIPDVIFFYRSNDVTQSCSSGRSTTIRVRCSPQKTVPGSLLLPGTCSDGTCDGCNFHFLWESAAACPLCSVADYHAIVSSCVAGIQKTTYVWREPKLCSGGISLPEQRVTICKTIDFWLKVGISAGTCTAILLTVLTCYFWKKNQKLEYKYSKLVMNATLK

SEQ ID NO: 1604 - protein, 871 aa, Artificial Sequence
  Synthetic polypeptide
CNLISTKNTKISQASVSLKRLRIFLSHEELEPDSIERRPVKDGGGTNSITVRNATFTWARSDPPTLNGITFSIPEGALVAVVGQVGCGKSSLLSALLAEMDKVEGHVAIKGSVAYVPQQAWIQNDSLRENILFGCQLEEPYYRSVIQACALLPDLEILPSGDRTEIGEKGVNLSGGQKQRVSLARAVYSNADIYLFDDPLSAVDAHVGKHIFENVIGPKGMLKNKTRILVTHSMSYLPQVDVIIVMSGGKISEMGSYQELLARDGAFAEFLRTYASTEQEQDAEENGVTGVSGPGKEAKQMENGMLVTDSAGKQLQRQLSSSSSYSGDISRHHNSTAELQKAEAKKEETWKLMEADKAQTGQVKLSVYWDYMKAIGLFISFLSIFLFMCNHVSALASNYWLSLWTDDPIVNGTQEHTKVRLSVYGALGISQGIAVFGYSMAVSIGGILASRCLHVDLLHSILRSPMSFFERTPSGNLVNRFSKELDTVDSMIPEVIKMFMGSLFNVIGACIVILLATPIAAIIIPPLGLIYFFVQRFYVASSRQLKRLESVSRSPVYSHFNETLLGVSVIRAFEEQERFIHQSDLKVDENQKAYYPSIVANRWLAVRLECVGNCIVLFAALFAVISRHSLSAGLVGLSVSYSLQVTTYLNWLVRMSSEMETNIVAVERLKEYSETEKEAPWQIQETAPPSSWPQVGRVEFRNYCLRYREDLDFVLRHINVTINGGEKVGIVGRTGAGKSSLTLGLFRINESAEGEIIIDGINIAKIGLHDLRFKITIIPQDPVLFSGSLRMNLDPFSQYSDEEVWTSLELAHLKDFVSALPDKLDHECAEGGENLRVIVLDKGEIQEYGAPSDLLQQRGLFYSMAKDAGLV

SEQ ID NO: 1605 - protein, 865 aa, Artificial Sequence
  Synthetic polypeptide
ERREGEESAREGGLFPRGADQEYSAFRVGMVQFSTSEFRLTPHIDNLEVANSFAVTNAFCSQFSRGVYAIFGFYDKKSVNTITSFCGTLHVSFITPSFPTDGTHPFVIQMRPDLKGALLSLIEYYQWDKFAYLYDSDRGLSTLQAVLDSAAEKKWQVTAINVGNINNDKKDEMYRSLFQDLELKKERRVILDCERDKVNDIVDQVITIGKHVKGYHYIIANLGFTDGDLLKIQFGGANVSGFQIVDYDDSLVSKFIERWSTLEEKEYPGAHTTTIKYTSALTYDAVQVMTEAFRNLRKQRIEISRRGNAGDCLANPAVPWGQGVEIERALKQVQVEGLSGNIKFDQNGKRINYTINIMELKTNGPRKIGYWSEVDKMVVTLTELPSGNDTSGLENKTVVVTTILESPYVMMKKNHEMLEGNERYEGYCVDLAAEIAKHCGFKYKLTIVGDGKYGARDADTKIWNGMVGELVYGKADIAIAPLTITLVREEVIDFSKPFMSLGISIMIKKPQKSKPGVFSFLDPLAYEIWMCIVFAYIGVSVVLFLVSRFSPYEWHTEEFEDGRETQSSESTNEFGIFNSLWFSLGAFMQQGCDISPRSLSGRIVGGVWWFFTLIIISSYTANLAAFLTVERMVSPIESAEDLSKQTEIAYGTLDSGSTKEFFRRSKIAVFDKMWTYMRSAEPSVFVRTTAEGVARVRKSKGKYAYLLESTMNEYIEQRKPCDTMKVGGNLDSKGYGIATPKGSSLRTPVNLAVLKLSEQGVLDKLKNKWWYDKGECGAKDSGSKEKTSALSLSNVAGVFYILVGGLGLAMLVALIEFCYKSRAEAKRMKVAKNAQNINPSSSQNSQNFATYKEGYNVYGIESVKI

SEQ ID NO: 1606 - protein, 865 aa, Artificial Sequence
  Synthetic polypeptide
ERREGEESAREGGLFPRGADQEYSAFRVGMVQFSTSEFRLTPHIDNLEVANSFAVTNAFCSQFSRGVYAIFGFYDKKSVNTITSFCGTLHVSFITPSFPTDGTHPFVIQMRPDLKGALLSLIEYYQWDKFAYLYDSDRGLSTLQAVLDSAAEKKWQVTAINVGNINNDKKDEMYRSLFQDLELKKERRVILDCERDKVNDIVDQVITIGKHVKGYHYIIANLGFTDGDLLKIQFGGANVSGFQIVDYDDSLVSKFIERWSTLEEKEYPGAHTTTIKYTSALTYDAVQVMTEAFRNLRKQRIEISRRGNAGDCLANPAVPWGQGVEIERALKQVQVEGLSGNIKFDQNGKRINYTINIMELKTNGPRKIGYWSEVDKMVVTLTELPSGNDTSGLENKTVVVTTILESPYVMMKKNHEMLEGNERYEGYCVDLAAEIAKHCGFKYKLTIVGDGKYGARDADTKIWNGMVGELVYGKADIAIAPLTITLVREEVIDFSKPFMSLGISIMIKKPQKSKPGVFSFLDPLAYEIWMCIVFAYIGVSVVLFLVSRFSPYEWHTEEFEDGRETQSSESTNEFGIFNSLWFSLGAFMQQGCDISPRSLSGRIVGGVWWFFTLIIISSYTANLAAFLTVERMVSPIESAEDLSKQTEIAYGTLDSGSTKEFFRRSKIAVFDKMWTYMRSAEPSVFVRTTAEGVARVRKSKGKYAYLLESTMNEYIEQRKPCDTMKVGGNLDSKGYGIATPKGSSLRNAVNLAVLKLNEQGLLDKLKNKWWYDKGECGSGGGDSKEKTSALSLSNVAGVFYILVGGLGLAMLVALIEFCYKSRAEAKRMKVAKNAQNINPSSSQNSQNFATYKEGYNVYGIESVKI

SEQ ID NO: 1607 - protein, 854 aa, Artificial Sequence
  Synthetic polypeptide
AWTTWVSLKRRIELTVEYPWRCGALSPTSNCRTGMWSWKCLLFWAVLVTATLCTARPSPTLPEQAQPWGAPVEVESFLVHPGDLLQLRCRLRDDVQSINWLRDGVQLAESNRTRITGEEVEVQDSVPADSGLYACVTSSPSGSDTTYFSVNVSDALPSSEDDDDDDDSSSEEKETDNTKPNPVAPYWTSPEKMEKKLHAVPAAKTVKFKCPSSGTPNPTLRWLKNGKEFKPDHRIGGYKVRYATWSIIMDSVVPSDKGNYTCIVENEYGSINHTYQLDVVERSPHRPILQAGLPANKTVALGSNVEFMCKVYSDPQPHIQWLKHIEVNGSKIGPDNLPYVQILKTAGVNTTDKEMEVLHLRNVSFEDAGEYTCLAGNSIGLSHHSAWLTVLEALEERPAVMTSPLYLEIIIYCTGAFLISCMVGSVIVYKMKSGTKKSDFHSQMAVHKLAKSIPLRRQVTVSADSSASMNSGVLLVRPSRLSSSGTPMLAGVSEYELPEDPRWELPRDRLVLGKPLGEGCFGQVVLAEAIGLDKDKPNRVTKVAVKMLKSDATEKDLSDLISEMEMMKMIGKHKNIINLLGACTQDGPLYVIVEYASKGNLREYLQARRPPGLEYCYNPSHNPEEQLSSKDLVSCAYQVARGMEYLASKKCIHRDLAARNVLVTEDNVMKIADFGLARDIHHIDYYKKTTNGRLPVKWMAPEALFDRIYTHQSDVWSFGVLLWEIFTLGGSPYPGVPVEELFKLLKEGHRMDKPSNCTNELYMMMRDCWHAVPSQRPTFKQLVEDLDRIVALTSNQEYLDLSMPLDQYSPSFPDTRSSTCSSGEDSVFSHEPLPEEPCLPRHPAQLANGGLKRR

SEQ ID NO: 1608 - protein, 853 aa, Artificial Sequence
  Synthetic polypeptide
QGGTGTILLKLFQSIEKEGILPNSFYEASIILIPKPGRDTTKKENFRPISLMNIDAKILNKILANRIQQHIKKLIHHDQVGFIPGMQGWFNIHKSINVIQHINRAKDKNHMIISIDAEKAFDKIQQPFMLKTLNKLGIDGTYFKIIRAIYDKPTANIILNGQKLEAFPLKTGTRQGCPLSPLLFNIVLEVLARAIRQEKEIKGIQLGKEEVKLSLFADDMIVYLENPIVSAQNLLKLISNFSKVSGYKINVQKSQAFLYTNNRQTESQIMSELPFTIASKRIKYLGIQLTRDVKDLFKENYKPLLKEIKEDTNKWKNIPYSWIGRINIVKMAILPKSTLACARASALCLNFNSTLILLPVCRNLLSFLRGTCSFCSRTLRKQLDHNLTFHKLVAYMICLHTAIHIIAHLFNFDCYSRSRQATDGSLASILSSLSHDEKKGGSWLNPIQSRNTTVEYVTFTSIAGLTGVIMTIALILMVTSATEFIRRSYFEVFWYTHHLFIFYILGLGIHGIGGIVRGQTEESMNESHPRKCAESFEMWDDRDSHCRRPKFEGHPPESWKWILAPVILYICERILRFYRSQQKVVITKVVMHPSKVLELQMNKRGFSMEVGQYIFVNCPSISLLEWHPFTLTSAPEEDFFSIHIRAAGDWTENLIRAFEQQYSPIPRIEVDGPFGTASEDVFQYEVAVLVGAGIGVTPFASILKSIWYKFQCADHNLKTKKIYFYWICRETGAFSWFNNLLTSLEQEMEELGKVGFLNYRLFLTGWDSNIVGHAALNFDKATDIVTGLKQKTSFGRPMWDNEFSTIATSHPKSVVGVFLCGPRTLAKSLRKCCHRYSSLDPRKVQFYFNKENF

SEQ ID NO: 1609 - protein, 847 aa, Artificial Sequence
  Synthetic polypeptide
APLCLEASLSQASARLAPSVNFEDCTGRQRTAYFSLDTRFKVGTDGVITVKRPLRFHNPQIHFLVYAWDSTYRKFSTKVTLNTVGHHHRPPPHQASVSGIQAELLTFPNSSPGLRRQKRDWVIPPISCPENEKGPFPKNLVQIKSNKDKEGKVFYSITGQGADTPPVGVFIIERETGWLKVTEPLDRERIATYTLFSHAVSSNGNAVEDPMEILITVTDQNDNKPEFTQEVFKGSVMEGALPGTSVMEVTATDADDDVNTYNAAIAYTILSQDPELPDKNMFTINRNTGVISVVTTGLDRESFPTYTLVVQAADLQGEGLSTTATAVITVTDTNDNPPIFNPTTYKGQVPENEANVVITTLKVTDADAPNTPAWEAVYTILNDDGGQFVVTTNPVNNDGILKTAKGLDFEAKQQYILHVAVTNVVPFEVSLTTSTATVTVDVLDVNEAPIFVPPEKRVEVSEDFGVGQEITSYTAQEPDTFMEQKITYRIWRDTANWLEINPDTGAISTRAELDREDFEHVKNSTYTALIIATDNGSPVATGTGTLLLILSDVNDNAPIPEPRTIFFCERNPKPQVINIIDADLPPNTSPFTAELTHGASANWTIQYNDPTQESIILKPKMALEVGDYKINLKLMDNQNKDQVTTLEVSVCDCEGAAGVCRKAQPVEAGLQIPAILGILGGILALLILILLLLLFLRRRAVVKEPLLPPEDDTRDNVYYYDEEGGGEEDQDFDLSQLHRGLDARPEVTRNDVAPTLMSVPRYLPRPANPDEIGNFIDENLKAADTDPTAPPYDSLLVFDYEGSGSEAASLSSLNSSESDKDQDYDYLNEWGNRFKKLADMYGGGEDD

SEQ ID NO: 1610 - protein, 838 aa, Artificial Sequence
  Synthetic polypeptide
VGSPRDVVSFEQPEFSVSRGDQVARIPVIRRVLDGGKSQVSYRTQDGTAQGNRDYIPVEGELLFQPGEAWKELQVKLLELQEVDSLLRGRQVRRFHVQLSNPKFGAHLGQPHSTTIIIRDPDELDRSFTSQMLSSQPPPHGDLGAPQNPNAKAAGSRKIHFNWLPPSGKPMGYRVKYWIQGDSESEAHLLDSKVPSVELTNLYPYCDYEMKVCAYGAQGEGPYSSLVSCRTHQEVPSEPGRLAFNVVSSTVTQLSWAEPAETNGEITAYEVCYGLVNDDNRPIGPMKKVLVDNPKNRMLLIENLRESQPYRYTVKARNGAGWGPEREAIINLATQPKRPMSIPIIPDIPIVDAQSGEDYDSFLMYSDDVLRSPSGSQRPSVSDDTGCGWKFEPLLGEELDLRRVTWRLPPELIPRLSASSGRSSDAEAPHGPPDDGGAGGKGGSLPRSATPGPPGEHLVNGRMDFAFPGSTNSLHRMTTTSAAAYGTHLSPHVPHRVLSTSSTLTRDYNSLTRSEHSHSTTLPRDYSTLTSVSSHDSRLTAGVPDTPTRLVFSALGPTSLRVSWQEPRCERPLQGYSVEYQLLNGGELHRLNIPNPAQTSVVVEDLLPNHSYVFRVRAQSQEGWGREREGVITIESQVHPQSPLCPLPGSAFTLSTPSAPGPLVFTALSPDSLQLSWERPRRPNGDIVGYLVTCEMAQGGGPATAFRVDGDSPESRLTVPGLSENVPYKFKVQARTTEGFGPEREGIITIESQDGGPFPQLGSRAGLFQHPLQSEYSSITTTHTSATEPFLVDGLTLGAQHLEAGGSLTRHVTQEFVSRTLTTSGTLSTHMDQQFFQT

SEQ ID NO: 1611 - protein, 836 aa, Artificial Sequence
  Synthetic polypeptide
GGGGRGGGGEGGGLGGGLLQCSTVCSVNSSSLLLCRSPAVPDRAHPQRVFFTLDNVQVDFASASGGQGFLYQPNPRLAPLSREGPARPYRLKPGHVLDVEGEGLNLGISKEEVRVHIGRGECLVKTLTRTHLYCEPPAHAPQPANGSGLPQFVVQMGNVQLALGPVQYEAEPPLSAFPVEAQAGVGMGAAVLIAAVLLLTLMYRHKSKQALRDYQKVLVQLESLETGVGDQCRKEFTDLMTEMTDLSSDLEGSGIPFLDYRTYAERAFFPGHGGCPLQPKPEGPGEDGHCATVRQGLTQLSNLLNSKLFLLTLIHTLEEQPSFSQRDRCHVASLLSLALHGKLEYLTDIMRTLLGDLAAHYVHRNPKLMLRRTETMVEKLLTNWLSICLYAFLREVAGEPLYMLFRAIQYQVDKGPVDAVTGKAKRTLNDSRLLREDVEFQPLTLMVLVGPGAGGAAGSSEMQRVPARVLDTDTITQVKEKVLDQVYKGTPFSQRPSVHALDLEWRSGLAGHLTLSDEDLTSVTQNHWKRLNTLQHYKVPDGATVGLVPQLHRGSTISQSLAQRCPLGENIPTLEDGEEGGVCLWHLVKATEEPEGAKVRCSSLREREPARAKAIPEIYLTRLLSMKGTLQKFVDDTFQAILSVNRPIPIAVKYLFDLLDELAEKHGIEDPGTLHIWKTNSLLLRFWVNALKNPQLIFDVRVSDNVDAILAVIAQTFIDSCTTSEHKVGRDSPVNKLLYAREIPRYKQMVERYYADIRQSSPASYQEMNSALAELSGNYTSAPHCLEALQELYNHIHRYYDQIISALEEDPVGQKLQLACRLQQVAALVENKVTDL

SEQ ID NO: 1612 - protein, 836 aa, Artificial Sequence; identical to SEQ ID NO: 1611
  Synthetic polypeptide

SEQ ID NO: 1613 - protein, 836 aa, Artificial Sequence; identical to SEQ ID NO: 1611
  Synthetic polypeptide

SEQ ID NO: 1614 - protein, 836 aa, Artificial Sequence
  Synthetic polypeptide
EERPWNQRVNFEDCTGRQRTAYFSLDTRFKVGTDGVITVKRPLRFHNPQIHFLVYAWDSTYRKFSTKVTLNTVGHHHRPPPHQASVSGIQAELLTFPNSSPGLRRQKRDWVIPPISCPENEKGPFPKNLVQIKSNKDKEGKVFYSITGQGADTPPVGVFIIERETGWLKVTEPLDRERIATYTLFSHAVSSNGNAVEDPMEILITVTDQNDNKPEFTQEVFKGSVMEGALPGTSVMEVTATDADDDVNTYNAAIAYTILSQDPELPDKNMFTINRNTGVISVVTTGLDRESFPTYTLVVQAADLQGEGLSTTATAVITVTDTNDNPPIFNPTTYKGQVPENEANVVITTLKVTDADAPNTPAWEAVYTILNDDGGQFVVTTNPVNNDGILKTAKGLDFEAKQQYILHVAVTNVVPFEVSLTTSTATVTVDVLDVNEAPIFVPPEKRVEVSEDFGVGQEITSYTAQEPDTFMEQKITYRIWRDTANWLEINPDTGAISTRAELDREDFEHVKNSTYTALIIATDNGSPVATGTGTLLLILSDVNDNAPIPEPRTIFFCERNPKPQVINIIDADLPPNTSPFTAELTHGASANWTIQYNDPTQESIILKPKMALEVGDYKINLKLMDNQNKDQVTTLEVSVCDCEGAAGVCRKAQPVEAGLQIPAILGILGGILALLILILLLLLFLRRRAVVKEPLLPPEDDTRDNVYYYDEEGGGEEDQDFDLSQLHRGLDARPEVTRNDVAPTLMSVPRYLPRPANPDEIGNFIDENLKAADTDPTAPPYDSLLVFDYEGSGSEAASLSSLNSSESDKDQDYDYLNEWGNRFKKLADMYGGGEDD

SEQ ID NO: 1615 - protein, 833 aa, Artificial Sequence
  Synthetic polypeptide
MHSPRPGTQRLDANLISLVPERSFEGLSSLRHLWLDDNALTEIPVRALNNLPALQAMTLALNRISHIPDYAFQNLTSLVVLHLHNNRIQHLGTHSFEGLHNLETLDLNYNKLQEFPVAIRTLGRLQELGFHNNNIKAIPEKAFMGNPLLQTIHFYDNPIQFVGRSAFQYLPKLHTLSLNGAMDIQEFPDLKGTTSLEILTLTRAGIRLLPSGMCQQLPRLRVLELSHNQIEELPSLHRCQKLEEIGLQHNRIWEIGADTFSQLSSLQALDLSWNAIRSIHPEAFSTLHSLVKLDLTDNQLTTLPLAGLGGLMHLKLKGNLALSQAFSKDSFPKLRILEVPYAYQCCPYGMCASFFKASGQWEAEDLHLDDEESSKRPLGLLARQAENHYDQDLDELQLEMEDSKPHPSVQCSPTPGPFKPCEYLFESWGIRLAVWAIVLLSVLCNGLVLLTVFAGGPVPLPPVKFVVGAIAGANTLTGISCGLLASVDALTFGQFSEYGARWETGLGCRATGFLAVLGSEASVLLLTLAAVQCSVSVSCVRAYGKSPSLGSVRAGVLGCLALAGLAAALPLASVGEYGASPLCLPYAPPEGQPAALGFTVALVMMNSFCFLVVAGAYIKLYCDLPRGDFEAVWDCAMVRHVAWLIFADGLLYCPVAFLSFASMLGLFPVTPEAVKSVLLVVLPLPACLNPLLYLLFNPHFRDDLRRLRPRAGDSGPLAYAAAGELEKSSCDSTQALVAFSDVDLILEASEAGRPPGLETYGFPSVTLISCQQPGAPRLEGSHCVEPEGNHFGNPQPSMDGELLLRAEGSTPAGGGLSGGGGFQPSGLAFASHV

SEQ ID NO: 1616 - protein, 833 aa, Artificial Sequence; identical to SEQ ID NO: 1615
  Synthetic polypeptide

SEQ ID NO: 1617 - protein, 827 aa, Artificial Sequence
  Synthetic polypeptide
YQELTHVDQASFQVDAFGTSFILDVVLNHDLLSSEYIERHIEHGGKTVEVKGGEHCYYQGHIRGNPDSFVALSTCHGLHGMFYDGNHTYLIEPEENDTTQEDFHFHSVYKSRLFEFSLDDLPSEFQQVNITPSKFILKPRPKRSKRQLRRYPRNVEEETKYIELMIVNDHLMFKKHRLSVVHTNTYAKSVVNMADLIYKDQLKTRIVLVAMETWATDNKFAISENPLITLREFMKYRRDFIKEKSDAVHLFSGSQFESSRSGAAYIGGICSLLKGGGVNEFGKTDLMAVTLAQSLAHNIGIISDKRKLASGECKCEDTWSGCIMGDTGYYLPKKFTQCNIEEYHDFLNSGGGACLFNKPSKLLDPPECGNGFIETGEECDCGTPAECVLEGAECCKKCTLTQDSQCSDGLCCKKCKFQPMGTVCREAVNDCDIRETCSGNSSQCAPNIHKMDGYSCDGVQGICFGGRCKTRDRQCKYIWGQKVTASDKYCYEKLNIEGTEKGNCGKDKDTWIQCNKRDVLCGYLLCTNIGNIPRLGELDGEITSTLVVQQGRTLNCSGGHVKLEEDVDLGYVEDGTPCGPQMMCLEHRCLPVASFNFSTCLSSKEGTICSGNGVCSNELKCVCNRHWIGSDCNTYFPHNDDAKTGITLSGNGVAGTNIIIGIIAGTILVLALILGITAWGYKNYREQRQLPQGDYVKKPGDGDSFYSDIPPGVSTNSASSSKKRSNGLSHSWSERIPDTKHISDICENGRPRSNSWQGNLGGNKKKIRGKRFRPRSNSTETLSPAKSPSSSTGSIASSRKYPYPMPPLPDEDKKVNRQSARLWETSI

SEQ ID NO: 1618 - protein, 827 aa, Artificial Sequence
  Synthetic polypeptide
GPGVSCLHTDMLWQGAPRSWKAHLEPMFQVLMKAKRAVQRGATAVIFDVSENPEAIDQLNQGSEDPLKRPVVYVKGADAIKLMNIVNKQKVARARIQHRPPRQPTEYFDMGIFLAFFVVVSLVCLILLVKIKLKQRRSQNSMNRLAVQALEKMETRKFNSKSKGRREGSCGALDTLSSSSTSDCAICLEKYIDGEELRVIPCTHRFHRKCVDPWLLQHHTCPHCRHNIIEQKGNPSAVCVETSNLSRGRQQRVTLPVHYPGRVHRTNAIPAYPTRTSMDSHGNPVTLLTMDRHGEQSLYSPQTPAYIRSYPPLHLDHSLAAHRCGLEHRAYSPAHPFRRPKLSGRSFSKAACFSQYETMYQHYYFQGLSYPEQEGQSPPSLAPRGPARAFPPSGSGSLLFPTVVHVAPPSHLESGSTSSFSCYHGHRSVCSGYLADCPGSDSSSSSSSGQCHCSSSDSVVDCTEVSNQGVYGSCSTFRSSLSSDYDPFIYRSRSPCRASEAGGSGSSGRGPALCFEGSPPPEELPAVHSHGAGRGEPWPGPASPSGDQVSTCSLEMNYSSNSSLEHRGPNSSTSEVGLEASPGAAPDLRRTWKGGHELPSCACCCEPQPSPAGPSAGAAGSSTLFLGPHLYEGSGPAGGEPQSGSSQGLYGLHPDHLPRTDGVKYEGLPCCFYEEKQVARGGGGGSGCYTEDYSVSVQYTLTEEPPPGCYPGARDLSQRIPIIPEDVDCDLGLPSDCQGTHSLGSWGGTRGPDTPRPHRGLGATREEERALCCQARALLRPGCPPEEAGAVRANFPSALQDTQESSTTATEAAGPRSHSADSSSPGA

SEQ ID NO: 1619 - protein, 827 aa, Artificial Sequence; identical to SEQ ID NO: 1618
  Synthetic polypeptide

SEQ ID NO: 1620 - protein, 827 aa, Artificial Sequence; identical to SEQ ID NO: 1618
  Synthetic polypeptide

SEQ ID NO: 1621 - protein, 827 aa, Artificial Sequence; identical to SEQ ID NO: 1618
  Synthetic polypeptide

SEQ ID NO: 1622 - protein, 821 aa, Artificial Sequence
  Synthetic polypeptide
VGSPRDVVSFEQPEFSVSRGDQVARIPVIRRVLDGGKSQVSYRTQDGTAQGNRDYIPVEGELLFQPGEAWKELQVKLLELQEVDSLLRGRQVRRFHVQLSNPKFGAHLGQPHSTTIIIRDPDELDRSFTSQMLSSQPPPHGDLGAPQNPNAKAAGSRKIHFNWLPPSGKPMGYRVKYWIQGDSESEAHLLDSKVPSVELTNLYPYCDYEMKVCAYGAQGEGPYSSLVSCRTHQEVPSEPGRLAFNVVSSTVTQLSWAEPAETNGEITAYEVCYGLVNDDNRPIGPMKKVLVDNPKNRMLLIENLRESQPYRYTVKARNGAGWGPEREAIINLATQPKRPMSIPIIPDIPIVDAQSGEDYDSFLMYSDDVLRSPSGSQRPSVSDDTEHLVNGRMDFAFPGSTNSLHRMTTTSAAAYGTHLSPHVPHRVLSTSSTLTRDYNSLTRSEHSHSTTLPRDYSTLTSVSSHGLPPIWEHGRSRLPLSWALGSRSRAQMKGFPPSRGPRDSIILAGRPAAPSWGPDSRLTAGVPDTPTRLVFSALGPTSLRVSWQEPRCERPLQGYSVEYQLLNGGELHRLNIPNPAQTSVVVEDLLPNHSYVFRVRAQSQEGWGREREGVITIESQVHPQSPLCPLPGSAFTLSTPSAPGPLVFTALSPDSLQLSWERPRRPNGDIVGYLVTCEMAQGGGPATAFRVDGDSPESRLTVPGLSENVPYKFKVQARTTEGFGPEREGIITIESQDGGPFPQLGSRAGLFQHPLQSEYSSITTTHTSATEPFLVDGLTLGAQHLEAGGSLTRHVTQEFVSRTLTTSGTLSTHMDQQFFQT

SEQ ID NO: 1623 - protein, 821 aa, Artificial Sequence; identical to SEQ ID NO: 1622
  Synthetic polypeptide

SEQ ID NO: 1624 - protein, 821 aa, Artificial Sequence
  Synthetic polypeptide
CNLISTKNTKISQASVSLKRLRIFLSHEELEPDSIERRPVKDGGGTNSITVRNATFTWARSDPPTLNGITFSIPEGALVAVVGQVGCGKSSLLSALLAEMDKVEGHVAIKTRILVTHSMSYLPQVDVIIVMSGGKISEMGSYQELLARDGAFAEFLRTYASTEQEQDAEENGVTGVSGPGKEAKQMENGMLVTDSAGKQLQRQLSSSSSYSGDISRHHNSTAELQKAEAKKEETWKLMEADKAQTGQVKLSVYWDYMKAIGLFISFLSIFLFMCNHVSALASNYWLSLWTDDPIVNGTQEHTKVRLSVYGALGISQGIAVFGYSMAVSIGGILASRCLHVDLLHSILRSPMSFFERTPSGNLVNRFSKELDTVDSMIPEVIKMFMGSLFNVIGACIVILLATPIAAIIIPPLGLIYFFVQRFYVASSRQLKRLESVSRSPVYSHFNETLLGVSVIRAFEEQERFIHQSDLKVDENQKAYYPSIVANRWLAVRLECVGNCIVLFAALFAVISRHSLSAGLVGLSVSYSLQVTTYLNWLVRMSSEMETNIVAVERLKEYSETEKEAPWQIQETAPPSSWPQVGRVEFRNYCLRYREDLDFVLRHINVTINGGEKVGIVGRTGAGKSSLTLGLFRINESAEGEIIIDGINIAKIGLHDLRFKITIIPQDPVLFSGSLRMNLDPFSQYSDEEVWTSLELAHLKDFVSALPDKLDHECAEGGENLSVGQRQLVCLARALLRKTKILVLDEATAAVDLETDDLIQSTIRTQFEDCTVLTIAHRLNTIMDYTRVIVLDKGEIQEYGAPSDLLQQRGLFYSMAKDAGLV

SEQ ID NO: 1625 - protein, 820 aa, Artificial Sequence
  Synthetic polypeptide
YQELTHVDQASFQVDAFGTSFILDVVLNHDLLSSEYIERHIEHGGKTVEVKGGEHCYYQGHIRGNPDSFVALSTCHGLHGMFYDGNHTYLIEPEENDTTQEDFHFHSVYKSRLFEFSLDDLPSEFQQVNITPSKFILKPRPKRSKRQLRRYPRNVEEETKYIELMIVNDHLMFKKHRLSVVHTNTYAKSVVNMADLIYKDQLKTRIVLVAMETWATDNKFAISENPLITLREFMKYRRDFIKEKSDAVHLFSGSQFESSRSGAAYIGGICSLLKGGGVNEFGKTDLMAVTLAQSLAHNIGIISDKRKLASGECKCEDTWSGCIMGDTGYYLPKKFTQCNIEEYHDFLNSGGGACLFNKPSKLLDPPECGNGFIETGEECDCGTPAECVLEGAECCKKCTLTQDSQCSDGLCCKKCKFQPMGTVCREAVNDCDIRETCSGNSSQCAPNIHKMDGYSCDGVQGICFGGRCKTRDRQCKYIWGQKVTASDKYCYEKLNIEGTEKGNCGKDKDTWIQCNKRDVLCGYLLCTNIGNIPRLGELDGEITSTLVVQQGRTLNCSGGHVKLEEDVDLGYVEDGTPCGPQMMCLEHRCLPVASFNFSTCLSSKEGTICSGNGVCSNELKCVCNRHWIGSDCNTYFPHNDDAKTGITLSGNGVAGTNIIIGIIAGTILVLALILGITAWGYNNIFNFRSNGLSHSWSERIPDTKHISDICENGRPRSNSWQGNLGGNKKKIRGKRFRPRSNSTEYLNPWFKRDYNVAKWVEDVNKNTEGPYFRTLSPAKSPSSSTGSIASSRKYPYPMPPLPDEDKKVNRQSARLWETSI

SEQ ID NO: 1626 - protein, 820 aa, Artificial Sequence
  Synthetic polypeptide
YQELTHVDQASFQVDAFGTSFILDVVLNHDLLSSEYIERHIEHGGKTVEVKGGEHCYYQGHIRGNPDSFVALSTCHGLHGMFYDGNHTYLIEPEENDTTQEDFHFHSVYKSRLFEFSLDDLPSEFQQVNITPSKFILKPRPKRSKRQLRRYPRNVEEETKYIELMIVNDHLMFKKHRLSVVHTNTYAKSVVNMADLIYKDQLKTRIVLVAMETWATDNKFAISENPLITLREFMKYRRDFIKEKSDAVHLFSGSQFESSRSGAAYIGGICSLLKGGGVNEFGKTDLMAVTLAQSLAHNIGIISDKRKLASGECKCEDTWSGCIMGDTGYYLPKKFTQCNIEEYHDFLNSGGGACLFNKPSKLLDPPECGNGFIETGEECDCGTPAECVLEGAECCKKCTLTQDSQCSDGLCCKKCKFQPMGTVCREAVNDCDIRETCSGNSSQCAPNIHKMDGYSCDGVQGICFGGRCKTRDRQCKYIWGQKVTASDKYCYEKLNIEGTEKGNCGKDKDTWIQCNKRDVLCGYLLCTNIGNIPRLGELDGEITSTLVVQQGRTLNCSGGHVKLEEDVDLGYVEDGTPCGPQMMCLEHRCLPVASFNFSTCLSSKEGTICSGNGVCSNELKCVCNRHWIGSDCNTYFPHNDDAKTGITLSGNGVAGTNIIIGIIAGTILVLALILGITAWGYKNYREQRSNGLSHSWSERIPDTKHISDICENGRPRSNSWQGNLGGNKKKIRGKRFRPRSNSTEYLNPWFKRDYNVAKWVEDVNKNTEGPYFRTLSPAKSPSSSTGSIASSRKYPYPMPPLPDEDKKVNRQSARLWETSI

SEQ ID NO: 1627 - protein, 820 aa, Artificial Sequence
  Synthetic polypeptide
SQHFGRPSITFSIPEGALVAVVGQVGCGKSSLLSALLAEMDKVEGHVAIKGSVAYVPQQAWIQNDSLRENILFGCQLEEPYYRSVIQACALLPDLEILPSGDRTEIGEKTRILVTHSMSYLPQVDVIIVMSGGKISEMGSYQELLARDGAFAEFLRTYASTEQEQDAEENGVTGVSGPGKEAKQMENGMLVTDSAGKQLQRQLSSSSSYSGDISRHHNSTAELQKAEAKKEETWKLMEADKAQTGQVKLSVYWDYMKAIGLFISFLSIFLFMCNHVSALASNYWLSLWTDDPIVNGTQEHTKVRLSVYGALGISQGIAVFGYSMAVSIGGILASRCLHVDLLHSILRSPMSFFERTPSGNLVNRFSKELDTVDSMIPEVIKMFMGSLFNVIGACIVILLATPIAAIIIPPLGLIYFFVQRFYVASSRQLKRLESVSRSPVYSHFNETLLGVSVIRAFEEQERFIHQSDLKVDENQKAYYPSIVANRWLAVRLECVGNCIVLFAALFAVISRHSLSAGLVGLSVSYSLQVTTYLNWLVRMSSEMETNIVAVERLKEYSETEKEAPWQIQETAPPSSWPQVGRVEFRNYCLRYREDLDFVLRHINVTINGGEKVGIVGRTGAGKSSLTLGLFRINESAEGEIIIDGINIAKIGLHDLRFKITIIPQDPVLFSGSLRMNLDPFSQYSDEEVWTSLELAHLKDFVSALPDKLDHECAEGGENLSVGQRQLVCLARALLRKTKILVLDEATAAVDLETDDLIQSTIRTQFEDCTVLTIAHRLNTIMDYTRVIVLDKGEIQEYGAPSDLLQQRGLFYSMAKDAGLV

SEQ ID NO: 1628 - protein, 817 aa, Artificial Sequence
  Synthetic polypeptide
SQHFGRPSITFSIPEGALVAVVGQVGCGKSSLLSALLAEMDKVEGHVAIKGVNLSGGQKQRVSLARAVYSNADIYLFDDPLSAVDAHVGKHIFENVIGPKGMLKNKTRILVTHSMSYLPQVDVIIVMSGGKISEMGSYQELLARDGAFAEFLRTYASTEQEQDAEENGVTGVSGPGKEAKQMENGMLVTDSAGKQLQRQLSSSSSYSGDISRHHNSTAELQKAEAKKEETWKLMEADKAQTGQVKLSVYWDYMKAIGLFISFLSIFLFMCNHVSALASNYWLSLWTDDPIVNGTQEHTKVRLSVYGALGISQGIAVFGYSMAVSIGGILASRCLHVDLLHSILRSPMSFFERTPSGNLVNRFSKELDTVDSMIPEVIKMFMGSLFNVIGACIVILLATPIAAIIIPPLGLIYFFVQRFYVASSRQLKRLESVSRSPVYSHFNETLLGVSVIRAFEEQERFIHQSDLKVDENQKAYYPSIVANRWLAVRLECVGNCIVLFAALFAVISRHSLSAGLVGLSVSYSLQVTTYLNWLVRMSSEMETNIVAVERLKEYSETEKEAPWQIQETAPPSSWPQVGRVEFRNYCLRYREDLDFVLRHINVTINGGEKVGIVGRTGAGKSSLTLGLFRINESAEGEIIIDGINIAKIGLHDLRFKITIIPQDPVLFSGSLRMNLDPFSQYSDEEVWTSLELAHLKDFVSALPDKLDHECAEGGENLSVGQRQLVCLARALLRKTKILVLDEATAAVDLETDDLIQSTIRTQFEDCTVLTIAHRLNTIMDYTRVIVLDKGEIQEYGAPSDLLQQRGLFYSMAKDAGLV

SEQ ID NO: 1629 - protein, 813 aa, Artificial Sequence
  Synthetic polypeptide
KKGPGIREVSSWLCQEPEPCHPGFDAESYTFTVPRRHLERGRVLGRVNFEDCTGRQRTAYFSLDTRFKVGTDGVITVKRPLRFHNPQIHFLVYAWDSTYRKFSTKVTLNTVGHHHRPPPHQASVSGIQAELLTFPNSSPGLRRQKRDWVIPPISCPENEKGPFPKNLVQIKSNKDKEGKVFYSITGQGADTPPVGVFIIERETGWLKVTEPLDRERIATYTLFSHAVSSNGNAVEDPMEILITVTDQNDNKPEFTQEVFKGSVMEGALPGTSVMEVTATDADDDVNTYNAAIAYTILSQDPELPDKNMFTINRNTGVISVVTTGLDRESFPTYTLVVQAADLQGEGLSTTATAVITVTDTNDNPPIFNPTTGLDFEAKQQYILHVAVTNVVPFEVSLTTSTATVTVDVLDVNEAPIFVPPEKRVEVSEDFGVGQEITSYTAQEPDTFMEQKITYRIWRDTANWLEINPDTGAISTRAELDREDFEHVKNSTYTALIIATDNGSPVATGTGTLLLILSDVNDNAPIPEPRTIFFCERNPKPQVINIIDADLPPNTSPFTAELTHGASANWTIQYNDPTQESIILKPKMALEVGDYKINLKLMDNQNKDQVTTLEVSVCDCEGAAGVCRKAQPVEAGLQIPAILGILGGILALLILILLLLLFLRRRAVVKEPLLPPEDDTRDNVYYYDEEGGGEEDQDFDLSQLHRGLDARPEVTRNDVAPTLMSVPRYLPRPANPDEIGNFIDENLKAADTDPTAPPYDSLLVFDYEGSGSEAASLSSLNSSESDKDQDYDYLNEWGNRFKKLADMYGGGEDD

SEQ ID NO: 1630 - protein, 811 aa, Artificial Sequence
  Synthetic polypeptide
RIMLPVEFKDKTLSGRELLLPLELTLELCEVLLDSINTWTVHYEQLLIDSGAVWLTDSSSNVNGHQPVSKVTTLIRQGQVYSFSQQPQDQVVVSGQPVTLLCAIPEYDGFVLWIKDGLALGVGRDLSSYPQYLVVGNHLSGEHHLKILRAELQDDAVYECQAIQAAIRSRPARLTVLVPPDDPVILGGPVISLRAGDPLNLTCHADNAKPAASIIWLRKGEVINGATYSKTLLRDGKRESIVSTLFISPGDVENGQSIVCRATNKAIPGGKETSVTIDIQHPPLVNLSVEPQPVLEDNVVTFHCSAKANPAVTQYRWAKRGQIIKEASGEVYRTTVDYTYFSEPVSCEVTNALGSTNLSRTVDVYFGPRMTTEPQSLLVDLGSDAIFSCAWTGNPSLTIVWMKRGSGVVLSNEKTLTLKSVRQEDAGKYVCRAVVPRVGAGEREVTLTVNGPPIISSTQTQHALHGEKGQIKCFIRSTPPPDRIAWSWKENVLESGTSGRYTVETISTEEGVISTLTISNIVRADFQTIYNCTAWNSFGSDTEIIRLKEQGSEMKSGAGLEAESVPMAVIIGVAVGAGVAFLVLMATIVAFCCARSQRNLKGVVSAKNDIRVEIVHKEPASGREGEEHSTIKQLMMDRGEFQQDSVLKQLEVLKEEEKEFQNLKDPTNGYYSVNTFKEHHSTPTISLSSCQPDLRPAGKQRVPTGMSFTNIYSTLSGQGRLYDYGQRFVLGMGSSSIELCEREFQRGSLSDSSSFLDTQCDSSVSSSGKQDGYVQFDKASKASASSSHHSQSSSQNSDPSRPLQRRMQTHV

SEQ ID NO: 1631 - protein, 811 aa, Artificial Sequence
  Synthetic polypeptide
SQHFGRPSITFSIPEGALVAVVGQVGCGKSSLLSALLAEMDKVEGHVAIKGSVAYVPQQAWIQNDSLRENILFGCQLEEPYYRSVIQACALLPDLEILPSGDRTEIGEKGVNLSGGQKQRVSLARAVYSNADIYLFDDPLSAVDAHVGKHIFENVIGPKGMLKNKTRILVTHSMSYLPQVDVIIVMSGGKISEMGSYQELLARDGAFAEFLRTYASTEQEQDAEENGVTGVSGPGKEAKQMENGMLVTDSAGKQLQRQLSSSSSYSGDISRHHNSTAELQKAEAKKEETWKLMEADKAQTGQVKLSVYWDYMKAIGLFISFLSIFLFMCNHVSALASNYWLSLWTDDPIVNGTQEHTKVRLSVYGALGISQGIAVFGYSMAVSIGGILASRCLHVDLLHSILRSPMSFFERTPSGNLVNRFSKELDTVDSMIPEVIKMFMGSLFNVIGACIVILLATPIAAIIIPPLGLIYFFVQRFYVASSRQLKRLESVSRSPVYSHFNETLLGVSVIRAFEEQERFIHQSDLKVDENQKAYYPSIVANRWLAVRLECVGNCIVLFAALFAVISRHSLSAGLVGLSVSYSLQVTTYLNWLVRMSSEMETNIVAVERLKEYSETEKEAPWQIQETAPPSSWPQVGRVEFRNYCLRYREDLDFVLRHINVTINGGEKVGIVGRTGAGKSSLTLGLFRINESAEGEIIIDGINIAKIGLHDLRFKITIIPQDPVLFSGSLRMNLDPFSQYSDEEVWTSLELAHLKDFVSALPDKLDHECAEGGENLRVIVLDKGEIQEYGAPSDLLQQRGLFYSMAKDAGLV

SEQ ID NO: 1632 - protein, 811 aa, Artificial Sequence
  Synthetic polypeptide
QACSTWDLWMHLWIRKEVDEVLEILEPPTKYQISQPEVYVAAPGESLEVRCLLKDAAVISWTKDGVHLGPNNRTVLIGEYLQIKGATPRDSGLYACTASRTVDSETWYFMVNVTDAISSGDDEDDTDGAEDFVSENSNNKRAPYWTNTEKMEKRLHAVPAANTVKFRCPAGGNPMPTMRWLKNGKEFKQEHRIGGYKVRNQHWSLIMESVVPSDKGNYTCVVENEYGSINHTYHLDVVERSPHRPILQAGLPANASTVVGGDVEFVCKVYSDAQPHIQWIKHVEKNGSKYGPDGLPYLKVLKHSGINSSNAEVLALFNVTEADAGEYICKVSNYIGQANQSAWLTVLPKQQAPGREKEITASPDYLEIAIYCIGVFLIACMVVTVILCRMKNTTKKPDFSSQPAVHKLTKRIPLRRQVTVSAESSSSMNSNTPLVRITTRLSSTADTPMLAGVSEYELPEDPKWEFPRDKLTLGKPLGEGCFGQVVMAEAVGIDKDKPKEAVTVAVKMLKDDATEKDLSDLVSEMEMMKMIGKHKNIINLLGACTQDGPLYVIVEYASKGNLREYLRARRPPGMEYSYDINRVPEEQMTFKDLVSCTYQLARGMEYLASQKCIHRDLAARNVLVTENNVMKIADFGLARDINNIDYYKKTTNGRLPVKWMAPEALFDRVYTHQSDVWSFGVLMWEIFTLGGSPYPGIPVEELFKLLKEGHRMDKPANCTNELYMMMRDCWHAVPSQRPTFKQLVEDLDRILTLTTNEEYLDLSQPLEQYSPSYPDTRSSCSSGDDSVFSPDPMPYEPCLPQYPHINGSVKT

SEQ ID NO: 1633 - protein, 810 aa, Artificial Sequence
  Synthetic polypeptide
SQHFGRPRWADRLRPGVQDQPRQHRDYIPVEGELLFQPGEAWKELQVKLLELQEVDSLLRGRQVRRFHVQLSNPKFGAHLGQPHSTTIIIRDPDELDRSFTSQMLSSQPPPHGDLGAPQNPNAKAAGSRKIHFNWLPPSGKPMGYRVKYWIQGDSESEAHLLDSKVPSVELTNLYPYCDYEMKVCAYGAQGEGPYSSLVSCRTHQEVPSEPGRLAFNVVSSTVTQLSWAEPAETNGEITAYEVCYGLVNDDNRPIGPMKKVLVDNPKNRMLLIENLRESQPYRYTVKARNGAGWGPEREAIINLATQPKRPMSIPIIPDIPIVDAQSGEDYDSFLMYSDDVLRSPSGSQRPSVSDDTGCGWKFEPLLGEELDLRRVTWRLPPELIPRLSASSGRSSDAEAPHGPPDDGGAGGKGGSLPRSATPGPPGEHLVNGRMDFAFPGSTNSLHRMTTTSAAAYGTHLSPHVPHRVLSTSSTLTRDYNSLTRSEHSHSTTLPRDYSTLTSVSSHDSRLTAGVPDTPTRLVFSALGPTSLRVSWQEPRCERPLQGYSVEYQLLNGGELHRLNIPNPAQTSVVVEDLLPNHSYVFRVRAQSQEGWGREREGVITIESQVHPQSPLCPLPGSAFTLSTPSAPGPLVFTALSPDSLQLSWERPRRPNGDIVGYLVTCEMAQGGGPATAFRVDGDSPESRLTVPGLSENVPYKFKVQARTTEGFGPEREGIITIESQDGGPFPQLGSRAGLFQHPLQSEYSSITTTHTSATEPFLVDGLTLGAQHLEAGGSLTRHVTQEFVSRTLTTSGTLSTHMDQQFFQT

SEQ ID NO: 1634 - protein, 810 aa, Artificial Sequence
  Synthetic polypeptide
QACSTWDLWMHLWIRKEVDEVLEILEPPTKYQISQPEVYVAAPGESLEVRCLLKDAAVISWTKDGVHLGPNNRTVLIGEYLQIKGATPRDSGLYACTASRTVDSETWYFMVNVTDAISSGDDEDDTDGAEDFVSENSNNKRAPYWTNTEKMEKRLHAVPAANTVKFRCPAGGNPMPTMRWLKNGKEFKQEHRIGGYKVRNQHWSLIMESVVPSDKGNYTCVVENEYGSINHTYHLDVVERSPHRPILQAGLPANASTVVGGDVEFVCKVYSDAQPHIQWIKHVEKNGSKYGPDGLPYLKVLKAAGVNTTDKEIEVLYIRNVTFEDAGEYTCLAGNSIGISFHSAWLTVLPAPGREKEITASPDYLEIAIYCIGVFLIACMVVTVILCRMKNTTKKPDFSSQPAVHKLTKRIPLRRQVTVSAESSSSMNSNTPLVRITTRLSSTADTPMLAGVSEYELPEDPKWEFPRDKLTLGKPLGEGCFGQVVMAEAVGIDKDKPKEAVTVAVKMLKDDATEKDLSDLVSEMEMMKMIGKHKNIINLLGACTQDGPLYVIVEYASKGNLREYLRARRPPGMEYSYDINRVPEEQMTFKDLVSCTYQLARGMEYLASQKCIHRDLAARNVLVTENNVMKIADFGLARDINNIDYYKKTTNGRLPVKWMAPEALFDRVYTHQSDVWSFGVLMWEIFTLGGSPYPGIPVEELFKLLKEGHRMDKPANCTNELYMMMRDCWHAVPSQRPTFKQLVEDLDRILTLTTNEEYLDLSQPLEQYSPSYPDTRSSCSSGDDSVFSPDPMPYEPCLPQYPHINGSVKT

SEQ ID NO: 1635 - protein, 808 aa, Artificial Sequence
  Synthetic polypeptide
QACSTWDLWMHLWIRKEVDEVLEILEPPTKYQISQPEVYVAAPGESLEVRCLLKDAAVISWTKDGVHLGPNNRTVLIGEYLQIKGATPRDSGLYACTASRTVDSETWYFMVNVTDAISSGDDEDDTDGAEDFVSENSNNKRAPYWTNTEKMEKRLHAVPAANTVKFRCPAGGNPMPTMRWLKNGKEFKQEHRIGGYKVRNQHWSLIMESVVPSDKGNYTCVVENEYGSINHTYHLDVVERSPHRPILQAGLPANASTVVGGDVEFVCKVYSDAQPHIQWIKHVEKNGSKYGPDGLPYLKVLKAAGVNTTDKEIEVLYIRNVTFEDAGEYTCLAGNSIGISFHSAWLTVLPAPGREKEITASPDYLEIAIYCIGVFLIACMVVTVILCRMKNTTKKPDFSSQPAVHKLTKRIPLRRQVSAESSSSMNSNTPLVRITTRLSSTADTPMLAGVSEYELPEDPKWEFPRDKLTLGKPLGEGCFGQVVMAEAVGIDKDKPKEAVTVAVKMLKDDATEKDLSDLVSEMEMMKMIGKHKNIINLLGACTQDGPLYVIVEYASKGNLREYLRARRPPGMEYSYDINRVPEEQMTFKDLVSCTYQLARGMEYLASQKCIHRDLAARNVLVTENNVMKIADFGLARDINNIDYYKKTTNGRLPVKWMAPEALFDRVYTHQSDVWSFGVLMWEIFTLGGSPYPGIPVEELFKLLKEGHRMDKPANCTNELYMMMRDCWHAVPSQRPTFKQLVEDLDRILTLTTNEEYLDLSQPLEQYSPSYPDTRSSCSSGDDSVFSPDPMPYEPCLPQYPHINGSVKT

SEQ ID NO: 1636 - protein, 804 aa, Artificial Sequence
  Synthetic polypeptide
QGGTGTILLKLFQSIEKEGILPNSFYEASIILIPKPGRDTTKKENFRPISLMNIDAKILNKILANRIQQHIKKLIHHDQVGFIPGMQGWFNIHKSINVIQHINRAKDKNHMIISIDAEKAFDKIQQPFMLKTLNKLGIDGTYFKIIRAIYDKPTANIILNGQKLEAFPLKTGTRQGCPLSPLLFNIVLEVLARAIRQEKEIKGIQLGKEEVKLSLFADDMIVYLENPIVSAQNLLKLISNFSKVSGYKINVQKSQAFLYTNNRQTESQIMSELPFTIASKRIKYLGIQLTRDVKDLFKENYKPLLKEIKEDTNKWKNIPYSWIGRINIVKMAILPKSTLACARASALCLNFNSTLILLPVCRNLLSFLRGTCSFCSRTLRKQLDHNLTFHKLVAYMICLHTAIHIIAHLFNFDCYSRSRQATDGSLASILSSLSHDEKKGGSWLNPIQSRNTTVEYVTFTSIAGLTGVIMTIALILMVTSATEFIRRSYFEVFWYTHHLFIFYILGLGIHGIGGIVRGQTEESMNESHPRKCAESFEMWDDRDSHCRRPKFEGHPPESWKWILAPVILYICERILRFYRSQQKVVITKVVMHPSKVLELQMNKRGFSMEVGQYIFVNCPSISLLEWHPFTLTSAPEEDFFSIHIRAAGDWTENLIRAFEQQYSPIPRIEVDGPFGTASEDVFQYEVAVLVGAGIGVTPFASILKSIWYKFQCADHNLKTKKVGHAALNFDKATDIVTGLKQKTSFGRPMWDNEFSTIATSHPKSVVGVFLCGPRTLAKSLRKCCHRYSSLDPRKVQFYFNKENF

SEQ ID NO: 1637 - protein, 799 aa, Artificial Sequence
  Synthetic polypeptide
RIMLPVEFKDKTLSGRELLLPLELTLELCEVLLDSINTWTVHYEQLLIDSGAVWLTDSSSNVNGHQPVSKVTTLIRQGQVYSFSQQPQDQVVVSGQPVTLLCAIPEYDGFVLWIKDGLALGVGRDLSSYPQYLVVGNHLSGEHHLKILRAELQDDAVYECQAIQAAIRSRPARLTVLVPPDDPVILGGPVISLRAGDPLNLTCHADNAKPAASIIWLRKGEVINGATYSKTLLRDGKRESIVSTLFISPGDVENGQSIVCRATNKAIPGGKETSVTIDIQHPPLVNLSVEPQPVLEDNVVTFHCSAKANPAVTQYRWAKRGQIIKEASGEVYRTTVDYTYFSEPVSCEVTNALGSTNLSRTVDVYFGPRMTTEPQSLLVDLGSDAIFSCAWTGNPSLTIVWMKRGSGVVLSNEKTLTLKSVRQEDAGKYVCRAVVPRVGAGEREVTLTVNGPPIISSTQTQHALHGEKGQIKCFIRSTPPPDRIAWSWKENVLESGTSGRYTVETISTEEGVISTLTISNIVRADFQTIYNCTAWNSFGSDTEIIRLKEQESVPMAVIIGVAVGAGVAFLVLMATIVAFCCARSQRNLKGVVSAKNDIRVEIVHKEPASGREGEEHSTIKQLMMDRGEFQQDSVLKQLEVLKEEEKEFQNLKDPTNGYYSVNTFKEHHSTPTISLSSCQPDLRPAGKQRVPTGMSFTNIYSTLSGQGRLYDYGQRFVLGMGSSSIELCEREFQRGSLSDSSSFLDTQCDSSVSSSGKQDGYVQFDKASKASASSSHHSQSSSQNSDPSRPLQRRMQTHV

SEQ ID NO: 1638 - protein, 798 aa, Artificial Sequence
  Synthetic polypeptide
WLTPVIPALWEAKDYIPVEGELLFQPGEAWKELQVKLLELQEVDSLLRGRQVRRFHVQLSNPKFGAHLGQPHSTTIIIRDPDELDRSFTSQMLSSQPPPHGDLGAPQNPNAKAAGSRKIHFNWLPPSGKPMGYRVKYWIQGDSESEAHLLDSKVPSVELTNLYPYCDYEMKVCAYGAQGEGPYSSLVSCRTHQEVPSEPGRLAFNVVSSTVTQLSWAEPAETNGEITAYEVCYGLVNDDNRPIGPMKKVLVDNPKNRMLLIENLRESQPYRYTVKARNGAGWGPEREAIINLATQPKRPMSIPIIPDIPIVDAQSGEDYDSFLMYSDDVLRSPSGSQRPSVSDDTGCGWKFEPLLGEELDLRRVTWRLPPELIPRLSASSGRSSDAEAPHGPPDDGGAGGKGGSLPRSATPGPPGEHLVNGRMDFAFPGSTNSLHRMTTTSAAAYGTHLSPHVPHRVLSTSSTLTRDYNSLTRSEHSHSTTLPRDYSTLTSVSSHDSRLTAGVPDTPTRLVFSALGPTSLRVSWQEPRCERPLQGYSVEYQLLNGGELHRLNIPNPAQTSVVVEDLLPNHSYVFRVRAQSQEGWGREREGVITIESQVHPQSPLCPLPGSAFTLSTPSAPGPLVFTALSPDSLQLSWERPRRPNGDIVGYLVTCEMAQGGGPATAFRVDGDSPESRLTVPGLSENVPYKFKVQARTTEGFGPEREGIITIESQDGGPFPQLGSRAGLFQHPLQSEYSSITTTHTSATEPFLVDGLTLGAQHLEAGGSLTRHVTQEFVSRTLTTSGTLSTHMDQQFFQT

SEQ ID NO: 1639 - protein, 793 aa, Artificial Sequence
  Synthetic polypeptide
SQHFGRPRWADRLRPGVQDQPRQHRDYIPVEGELLFQPGEAWKELQVKLLELQEVDSLLRGRQVRRFHVQLSNPKFGAHLGQPHSTTIIIRDPDELDRSFTSQMLSSQPPPHGDLGAPQNPNAKAAGSRKIHFNWLPPSGKPMGYRVKYWIQGDSESEAHLLDSKVPSVELTNLYPYCDYEMKVCAYGAQGEGPYSSLVSCRTHQEVPSEPGRLAFNVVSSTVTQLSWAEPAETNGEITAYEVCYGLVNDDNRPIGPMKKVLVDNPKNRMLLIENLRESQPYRYTVKARNGAGWGPEREAIINLATQPKRPMSIPIIPDIPIVDAQSGEDYDSFLMYSDDVLRSPSGSQRPSVSDDTEHLVNGRMDFAFPGSTNSLHRMTTTSAAAYGTHLSPHVPHRVLSTSSTLTRDYNSLTRSEHSHSTTLPRDYSTLTSVSSHGLPPIWEHGRSRLPLSWALGSRSRAQMKGFPPSRGPRDSIILAGRPAAPSWGPDSRLTAGVPDTPTRLVFSALGPTSLRVSWQEPRCERPLQGYSVEYQLLNGGELHRLNIPNPAQTSVVVEDLLPNHSYVFRVRAQSQEGWGREREGVITIESQVHPQSPLCPLPGSAFTLSTPSAPGPLVFTALSPDSLQLSWERPRRPNGDIVGYLVTCEMAQGGGPATAFRVDGDSPESRLTVPGLSENVPYKFKVQARTTEGFGPEREGIITIESQDGGPFPQLGSRAGLFQHPLQSEYSSITTTHTSATEPFLVDGLTLGAQHLEAGGSLTRHVTQEFVSRTLTTSGTLSTHMDQQFFQT

SEQ ID NO: 1640 - protein, 793 aa, Artificial Sequence; identical to SEQ ID NO: 1639
  Synthetic polypeptide

SEQ ID NO: 1641 - protein, 791 aa, Artificial Sequence
  Synthetic polypeptide
YQELTHVDQASFQVDAFGTSFILDVVLNHDLLSSEYIERHIEHGGKTVEVKGGEHCYYQGHIRGNPDSFVALSTCHGLHGMFYDGNHTYLIEPEENDTTQEDFHFHSVYKSRLFEFSLDDLPSEFQQVNITPSKFILKPRPKRSKRQLRRYPRNVEEETKYIELMIVNDHLMFKKHRLSVVHTNTYAKSVVNMADLIYKDQLKTRIVLVAMETWATDNKFAISENPLITLREFMKYRRDFIKEKSDAVHLFSGSQFESSRSGAAYIGGICSLLKGGGVNEFGKTDLMAVTLAQSLAHNIGIISDKRKLASGECKCEDTWSGCIMGDTGYYLPKKFTQCNIEEYHDFLNSGGGACLFNKPSKLLDPPECGNGFIETGEECDCGTPAECVLEGAECCKKCTLTQDSQCSDGLCCKKCKFQPMGTVCREAVNDCDIRETCSGNSSQCAPNIHKMDGYSCDGVQGICFGGRCKTRDRQCKYIWGQKVTASDKYCYEKLNIEGTEKGNCGKDKDTWIQCNKRDVLCGYLLCTNIGNIPRLGELDGEITSTLVVQQGRTLNCSGGHVKLEEDVDLGYVEDGTPCGPQMMCLEHRCLPVASFNFSTCLSSKEGTICSGNGVCSNELKCVCNRHWIGSDCNTYFPHNDDAKTGITLSGNGVAGTNIIIGIIAGTILVLALILGITAWGYKNYREQRSNGLSHSWSERIPDTKHISDICENGRPRSNSWQGNLGGNKKKIRGKRFRPRSNSTETLSPAKSPSSSTGSIASSRKYPYPMPPLPDEDKKVNRQSARLWETSI

SEQ ID NO: 1642 - protein, 786 aa, Artificial Sequence
  Synthetic polypeptide
GLHSHVELDDYHEDGFCQPYRGIACARFIGNRTIYVDSLQMQGEIENRITAAFTMIGTSTHLSDQCSQFAIPSFCHFVFPLCDARSRTPKPRELCRDECEVLESDLCRQEYTIARSNPLILMRLQLPKCEALPMPESPDAANCMRIGIPAERLGRYHQCYNGSGMDYRGTASTTKSGHQCQPWALQHPHSHHLSSTDFPELGGGHAYCRNPGGQMEGPWCFTQNKNVRMELCDVPSCSPRDSSKMGILYILVPSIAIPLVIACLFFLVCMCRNKQKASASTPQRRQLMASPSQDMEMPLINQHKQAKLKEISLSAVRFMEELGEDRFGKVYKGHLFGPAPGEQTQAVAIKTLKDKAEGPLREEFRHEAMLRARLQHPNVVCLLGVVTKDQPLSMIFSYCSHGDLHEFLVMRSPHSDVGSTDDDRTVKSALEPPDFVHLVAQIAAGMEYLSSHHVVHKDLATRNVLVYDKLNVKISDLGLFREVYAADYYKLLGNSLLPIRWMAPEAIMYGKFSIDSDIWSYGVVLWEVFSYGLQPYCGYSNQDVVEMIRNRQVLPCPDDCPAWVYALMIECWNEFPSRRPRFKDIHSRLRAWGNLSNYNSSAQTSGASNTTQTSSLSTSPVSNVSNARYVGPKQKAPPFPQPQFIPMKGQIRPMVPPPQLYVPVNGYQPVPAYGAYLPNFYPVQIPMQMAPQQVPPQMVPKPSSHHSGSGSTSTGYVTTAPSNTSMADRAALLSEGADDTQNAPEDGAQSTVQEAEEEEEGSVPETELLGDCDTLQVDEAQVQLEA

SEQ ID NO: 1643 - protein, 786 aa, Artificial Sequence
  Synthetic polypeptide
APLCLEASLSQASARLAPSVNFEDCTGRQRTAYFSLDTRFKVGTDGVITVKRPLRFHNPQIHFLVYAWDSTYRKFSTKVTLNTVGHHHRPPPHQASVSGIQAELLTFPNSSPGLRRQKRDWVIPPISCPENEKGPFPKNLVQIKSNKDKEGKVFYSITGQGADTPPVGVFIIERETGWLKVTEPLDRERIATYTLFSHAVSSNGNAVEDPMEILITVTDQNDNKPEFTQEVFKGSVMEGALPGTSVMEVTATDADDDVNTYNAAIAYTILSQDPELPDKNMFTINRNTGVISVVTTGLDRESFPTYTLVVQAADLQGEGLSTTATAVITVTDTNDNPPIFNPTTGLDFEAKQQYILHVAVTNVVPFEVSLTTSTATVTVDVLDVNEAPIFVPPEKRVEVSEDFGVGQEITSYTAQEPDTFMEQKITYRIWRDTANWLEINPDTGAISTRAELDREDFEHVKNSTYTALIIATDNGSPVATGTGTLLLILSDVNDNAPIPEPRTIFFCERNPKPQVINIIDADLPPNTSPFTAELTHGASANWTIQYNDPTQESIILKPKMALEVGDYKINLKLMDNQNKDQVTTLEVSVCDCEGAAGVCRKAQPVEAGLQIPAILGILGGILALLILILLLLLFLRRRAVVKEPLLPPEDDTRDNVYYYDEEGGGEEDQDFDLSQLHRGLDARPEVTRNDVAPTLMSVPRYLPRPANPDEIGNFIDENLKAADTDPTAPPYDSLLVFDYEGSGSEAASLSSLNSSESDKDQDYDYLNEWGNRFKKLADMYGGGEDD

SEQ ID NO: 1644 - protein, 781 aa, Artificial Sequence
  Synthetic polypeptide
WLTPVIPALWEAKDYIPVEGELLFQPGEAWKELQVKLLELQEVDSLLRGRQVRRFHVQLSNPKFGAHLGQPHSTTIIIRDPDELDRSFTSQMLSSQPPPHGDLGAPQNPNAKAAGSRKIHFNWLPPSGKPMGYRVKYWIQGDSESEAHLLDSKVPSVELTNLYPYCDYEMKVCAYGAQGEGPYSSLVSCRTHQEVPSEPGRLAFNVVSSTVTQLSWAEPAETNGEITAYEVCYGLVNDDNRPIGPMKKVLVDNPKNRMLLIENLRESQPYRYTVKARNGAGWGPEREAIINLATQPKRPMSIPIIPDIPIVDAQSGEDYDSFLMYSDDVLRSPSGSQRPSVSDDTEHLVNGRMDFAFPGSTNSLHRMTTTSAAAYGTHLSPHVPHRVLSTSSTLTRDYNSLTRSEHSHSTTLPRDYSTLTSVSSHGLPPIWEHGRSRLPLSWALGSRSRAQMKGFPPSRGPRDSIILAGRPAAPSWGPDSRLTAGVPDTPTRLVFSALGPTSLRVSWQEPRCERPLQGYSVEYQLLNGGELHRLNIPNPAQTSVVVEDLLPNHSYVFRVRAQSQEGWGREREGVITIESQVHPQSPLCPLPGSAFTLSTPSAPGPLVFTALSPDSLQLSWERPRRPNGDIVGYLVTCEMAQGGGPATAFRVDGDSPESRLTVPGLSENVPYKFKVQARTTEGFGPEREGIITIESQDGGPFPQLGSRAGLFQHPLQSEYSSITTTHTSATEPFLVDGLTLGAQHLEAGGSLTRHVTQEFVSRTLTTSGTLSTHMDQQFFQT

SEQ ID NO: 1645 - protein, 781 aa, Artificial Sequence; identical to SEQ ID NO: 1644
  Synthetic polypeptide

SEQ ID NO: 1646 - protein, 780 aa, Artificial Sequence
  Synthetic polypeptide
YQELTHVDQASFQVDAFGTSFILDVVLNHDLLSSEYIERHIEHGGKTVEVKGGEHCYYQGHIRGNPDSFVALSTCHGLHGMFYDGNHTYLIEPEENDTTQEDFHFHSVYKSRLFEFSLDDLPSEFQQVNITPSKFILKPRPKRSKRQLRRYPRNVEEETKYIELMIVNDHLMFKKHRLSVVHTNTYAKSVVNMADLIYKDQLKTRIVLVAMETWATDNKFAISENPLITLREFMKYRRDFIKEKSDAVHLFSGSQFESSRSGAAYIGGICSLLKGGGVNEFGKTDLMAVTLAQSLAHNIGIISDKRKLASGECKCEDTWSGCIMGDTGYYLPKKFTQCNIEEYHDFLNSGGGACLFNKPSKLLDPPECGNGFIETGEECDCGTPAECVLEGAECCKKCTLTQDSQCSDGLCCKKCKFQPMGTVCREAVNDCDIRETCSGNSSQCAPNIHKMDGYSCDGVQGICFGGRCKTRDRQCKYIWGQKVTASDKYCYEKLNIEGTEKGNCGKDKDTWIQCNKRDVLCGYLLCTNIGNIPRLGELDGEITSTLVVQQGRTLNCSGGHVKLEEDVDLGYVEDGTPCGPQMMCLEHRCLPVASFNFSTCLSSKEGTICSGNGVCSNELKCVCNRHWIGSDCNTYFPHNDDAKTGITLSGNGVAGTNIIIGIIAGTILVLALILGITAWGYKNYREQRQLPQGDYVKKPGDGDSFYSDIPPGVSTNSASSSKKRSNGLSHSWSERIPDTKHISDICENGRPRSNSWQGNLGGNKKKIRGKRFRPRSNSTE

SEQ ID NO: 1647 - protein, 776 aa, Artificial Sequence
  Synthetic polypeptide
NKRQRTALLDLSWERACWATQAFHHSACRQMDTKMLQAHAKVWHLYNTSFRPTQGGQVSIALSSHWINPRRMTDHSIKECQKSLDFVLGWFAKPVFIDGDYPESMKNNLSSILPDFTESEKKFIKGTADFFALCFGPTLSFQLLDPHMKFRQLESPNLRQLLSWIDLEFNHPQIFIVENGWFVSGTTKRDDAKYMYYLKKFIMETLKAIKLDGVDVIGYTAWSLMDGFEWHRGYSIRRGLFYVDFLSQDKMLLPKSSALFYQKLIEKNGFPPLPENQPLEGTFPCDFAWGVVDNYIQVDTTLSQFTDLNVYLWDVHHSKRLIKVDGVVTKKRKSYCVDFAAIQPQIALLQEMHVTHFRFSLDWALILPLGNQSQVNHTILQYYRCMASELVRVNITPVVALWQPMAPNQGLPRLLARQGAWENPYTALAFAEYARLCFQELGHHVKLWITMNEPYTRNMTYSAGHNLLKAHALAWHVYNEKFRHAQNGKISIALQADWIEPACPFSQKDKEVAERVLEFDIGWLAEPIFGSGDYPWVMRDWLNQRNNFLLPYFTEDEKKLIQGTFDFLALSHYTTILVDSEKEDPIKYNDYLEVQEMTDITWLNSPSQVAVVPWGLRKVLNWLKFKYGDLPMYIISNGIDDGLHAEDDQLRVYYMQNYINEALKAHILDGINLCGYFAYSFNDRTAPRFGLYRYAADQFEPKASMKHYRKIIDSNGFPGPETLERFCPEEFTVCTECSFFHTRKSLLAFIAFLFFASIISLSLIFYYSKKGRRSYK

SEQ ID NO: 1648 - protein, 775 aa, Artificial Sequence
  Synthetic polypeptide
AKITPLHSSLGEEETPKESLTEAEVATEKEGEDGDQPTTPPKPLKTSKAETPTESVSEPEVATKQELQEEEEQTKPPRRAPKTLSSFFTPRKPAVKKEVKEEEPGAPGKEGAAEGPLDPSGYNPAKNNYHPVEDACWKPGQKVPYLAVARTFEKIEEVSARLRMVETLSNLLRSVVALSPPDLLPVLYLSLNHLGPPQQGLELGVGDGVLLKAVAQATGRQLESVRAEAAEKGDVGLVAENSRSTQRLMLPPPPLTASGVFSKFRDIARLTGSASTAKKIDIIKGLFVACRHSEARFIARSLSGRLRLGLAEQSVLAALSQAVSLTPPGQEFPPAMVDAGKGKTAEARKTWLEEQGMILKQTFCEVPDLDRIIPVLLEHGLERLPEHCKLSPGIPLKPMLAHPTRGISEVLKRFEEAAFTCEYKYDGQRAQIHALEGGEVKIFSRNQEDNTGKYPDIISRIPKIKLPSVTSFILDTEAVAWDREKKQIQPFQVLTTRKRKEVDASEIQVQVCLYAFDLIYLNGESLVREPLSRRRQLLRENFVETEGEFVFATSLDTKDIEQIAEFLEQSVKDSCEGLMVKTLDVDATYEIAKRSHNWLKLKKDYLDGVGDTLDLVVIGAYLGRGKRAGRYGGFLLASYDEDSEELQAICKLGTGFSDEELEEHHQSLKALVLPSPRPYVRIDGAVIPDHWLDPSAVWEVKCADLSLSPIYPAARGLVDSDKGISLRFPRFIRVREDKQPEQATTSAQVACLYRKQSQIQNQQGEDSGSDPEDTY

SEQ ID NO: 1649 - protein, 775 aa, Artificial Sequence
  Synthetic polypeptide
EERPWNQRVNFEDCTGRQRTAYFSLDTRFKVGTDGVITVKRPLRFHNPQIHFLVYAWDSTYRKFSTKVTLNTVGHHHRPPPHQASVSGIQAELLTFPNSSPGLRRQKRDWVIPPISCPENEKGPFPKNLVQIKSNKDKEGKVFYSITGQGADTPPVGVFIIERETGWLKVTEPLDRERIATYTLFSHAVSSNGNAVEDPMEILITVTDQNDNKPEFTQEVFKGSVMEGALPGTSVMEVTATDADDDVNTYNAAIAYTILSQDPELPDKNMFTINRNTGVISVVTTGLDRESFPTYTLVVQAADLQGEGLSTTATAVITVTDTNDNPPIFNPTTGLDFEAKQQYILHVAVTNVVPFEVSLTTSTATVTVDVLDVNEAPIFVPPEKRVEVSEDFGVGQEITSYTAQEPDTFMEQKITYRIWRDTANWLEINPDTGAISTRAELDREDFEHVKNSTYTALIIATDNGSPVATGTGTLLLILSDVNDNAPIPEPRTIFFCERNPKPQVINIIDADLPPNTSPFTAELTHGASANWTIQYNDPTQESIILKPKMALEVGDYKINLKLMDNQNKDQVTTLEVSVCDCEGAAGVCRKAQPVEAGLQIPAILGILGGILALLILILLLLLFLRRRAVVKEPLLPPEDDTRDNVYYYDEEGGGEEDQDFDLSQLHRGLDARPEVTRNDVAPTLMSVPRYLPRPANPDEIGNFIDENLKAADTDPTAPPYDSLLVFDYEGSGSEAASLSSLNSSESDKDQDYDYLNEWGNRFKKLADMYGGGEDD

SEQ ID NO: 1650 - protein, 774 aa, Artificial Sequence
  Synthetic polypeptide
AKITPLHSSLGEETPKESLTEAEVATEKEGEDGDQPTTPPKPLKTSKAETPTESVSEPEVATKQELQEEEEQTKPPRRAPKTLSSFFTPRKPAVKKEVKEEEPGAPGKEGAAEGPLDPSGYNPAKNNYHPVEDACWKPGQKVPYLAVARTFEKIEEVSARLRMVETLSNLLRSVVALSPPDLLPVLYLSLNHLGPPQQGLELGVGDGVLLKAVAQATGRQLESVRAEAAEKGDVGLVAENSRSTQRLMLPPPPLTASGVFSKFRDIARLTGSASTAKKIDIIKGLFVACRHSEARFIARSLSGRLRLGLAEQSVLAALSQAVSLTPPGQEFPPAMVDAGKGKTAEARKTWLEEQGMILKQTFCEVPDLDRIIPVLLEHGLERLPEHCKLSPGIPLKPMLAHPTRGISEVLKRFEEAAFTCEYKYDGQRAQIHALEGGEVKIFSRNQEDNTGKYPDIISRIPKIKLPSVTSFILDTEAVAWDREKKQIQPFQVLTTRKRKEVDASEIQVQVCLYAFDLIYLNGESLVREPLSRRRQLLRENFVETEGEFVFATSLDTKDIEQIAEFLEQSVKDSCEGLMVKTLDVDATYEIAKRSHNWLKLKKDYLDGVGDTLDLVVIGAYLGRGKRAGRYGGFLLASYDEDSEELQAICKLGTGFSDEELEEHHQSLKALVLPSPRPYVRIDGAVIPDHWLDPSAVWEVKCADLSLSPIYPAARGLVDSDKGISLRFPRFIRVREDKQPEQATTSAQVACLYRKQSQIQNQQGEDSGSDPEDTY

SEQ ID NO: 1651 - protein, 774 aa, Artificial Sequence; identical to SEQ ID NO: 1650
  Synthetic polypeptide

SEQ ID NO: 1652 - protein, 774 aa, Artificial Sequence
  Synthetic polypeptide
TSQPLKLFIANQKRLEIINEDDVEAYVGLRNLTIVDSGLKFVAHKAFLKNSNLQHINFTRNKLTSLSRKHFRHLDLSELILVGNPFTCSCDIMWIKTLQEAKSSPDTQDLYCLNESSKNIPLANLQIPNCGLPSANLAAPNLTVEEGKSITLSCSVAGDPVPNMYWDVGNLVSKHMNETSHTQGSLRITNISSDDSGKQISCVAENLVGEDQDSVNLTVHFAPTITFLESPTSDHHWCIPFTVKGNPKPALQWFYNGAILNESKYICTKIHVTNHTEYHGCLQLDNPTHMNNGDYTLIAKNEYGKDEKQISAHFMGWPGIDDGANPNYPDVIYEDYGTAANDIGDTTNRSNEIPSTDVTDKTGREHLSVYAVVVIASVVGFCLLVMLFLLKLARHSKFGMKDFSWFGFGKVKSRQGVGPASVISNDDDSASPLHHISNGSNTPSSSEGGPDAVIIGMTKIPVIENPQYFGITNSQLKPDTFVQHIKRHNIVLKRELGEGAFGKVFLAECYNLCPEQDKILVAVKTLKDASDNARKDFHREAELLTNLQHEHIVKFYGVCVEGDPLIMVFEYMKHGDLNKFLRAHGPDAVLMAEGNPPTELTQSQMLHIAQQIAAGMVYLASQHFVHRDLATRNCLVGENLLVKIGDFGMSRDVYSTDYYRVGGHTMLPIRWMPPESIMYRKFTTESDVWSLGVVLWEIFTYGKQPWYQLSNNEVIECITQGRVLQRPRTCPQEVYELMLGCWQREPHMRKNIKGIHTLLQNLAKASPVYLDILG

SEQ ID NO: 1653 - protein, 774 aa, Artificial Sequence; identical to SEQ ID NO: 1652
  Synthetic polypeptide

SEQ ID NO: 1654 - protein, 774 aa, Artificial Sequence
  Synthetic polypeptide
QACSTWDLWMHLWIRKEVDEVLEILEPPTKYQISQPEVYVAAPGESLEVRCLLKDAAVISWTKDGVHLGPNNRTVLIGEYLQIKGATPRDSGLYACTASRTVDSETWYFMVNVTDAISSGDDEDDTDGAEDFVSENSNNKRAPYWTNTEKMEKRLHAVPAANTVKFRCPAGGNPMPTMRWLKNGKEFKQEHRIGGYKVRNQHWSLIMESVVPSDKGNYTCVVENEYGSINHTYHLDVVERSPHRPILQAGLPANASTVVGGDVEFVCKVYSDAQPHIQWIKHVEKNGSKYGPDGLPYLKVLKAAGVNTTDKEIEVLYIRNVTFEDAGEYTCLAGNSIGISFHSAWLTVLPAPGREKEITASPDYLEIAIYCIGVFLIACMVVTVILCRMKNTTKKPDFSSQPAVHKLTKRIPLRRQVSAESSSSMNSNTPLVRITTRLSSTADTPMLAGVSEYELPEDPKWEFPRDKLTLGKPLGEGCFGQVVMAEAVGIDKDKPKEAVTVAVKMLKDDATEKDLSDLVSEMEMMKMIGKHKNIINLLGACTQDGPLYVIVEYASKGNLREYLRARRPPGMEYSYDINRVPEEQMTFKDLVSCTYQLARGMEYLASQKCIHRDLAARNVLVTENNVMKIADFGLARDINNIDYYKKTTNGRLPVKWMAPEALFDRVYTHQSDVWSFGVLMWEIFTLGGSPYPGIPVEELFKLLKEGHRMDKPANCTNELYMMMRDCWHAVPSQRPTFKQLVEDLDRILTLTTNEEYLDLSQPLEPYSPCYPDPR

SEQ ID NO: 1655 - protein, 772 aa, Artificial Sequence
  Synthetic polypeptide
LFLSAAFCMYKKGERVIFYLIVLLRKSNENNAGDKWSAFLKEQSTLAQMYPLQEIQNLTVKLQLQALQQNGSSVLSEDKSKRLNTILNTMSTIYSTGKVCNPDNPQECLLLEPGLNEIMANSLDYNERLWAWESWRSEVGKQLRPLYEEYVVLKNEMARANHYEDYGDYWRGDYEVNGVDGYDYSRGQLIEDVEHTFEEIKPLYEHLHAYVRAKLMNAYPSYISPIGCLPAHLLGDMWGRFWTNLYSLTVPFGQKPNIDVTDAMVDQAWDAQRIFKEAEKFFVSVGLPNMTQGFWENSMLTDPGNVQKAVCHPTAWDLGKGDFRILMCTKVTMDDFLTAHHEMGHIQYDMAYAAQPFLLRNGANEGFHEAVGEIMSLSAATPKHLKSIGLLSPDFQEDNETEINFLLKQALTIVGTLPFTYMLEKWRWMVFKGEIPKDQWMKKWWEMKREIVGVVEPVPHDETYCDPASLFHVSNDYSFIRYYTRTLYQFQFQEALCQAAKHEGPLHKCDISNSTEAGQKLFNMLRLGKSEPWTLALENVVGAKNMNVRPLLNYFEPLFTWLKDQNKNSFVGWSTDWSPYADQSIKVRISLKSALGDKAYEWNDNEMYLFRSSVAYAMRQYFLKVKNQMILFGEEDVRVANLKPRISFNFFVTAPKNVSDIIPRTEVEKAIRMSRSRINDAFRLNDNSLEFLGIQPTLGPPNQPPVSIWLIVFGVVMGVIVVGIVILIFTGIRDRKKKNKARSGENPYASIDISKGENNPGFQNTDDVQTSF

SEQ ID NO: 1656 - protein, 772 aa, Artificial Sequence; identical to SEQ ID NO: 1655
  Synthetic polypeptide

SEQ ID NO: 1657 - protein, 771 aa, Artificial Sequence
  Synthetic polypeptide
GVEGGGSGEGSRTCCVTVELVKALLNELASVKVNEVVRYEAGYVVCAVIAGLYLLLVPTAGLCFCCCRCHRRCGGRVKTEHKALACERAALMVFLLLTTLLLLIGVVCAFVTNQRTHEQMGPSIEAMPETLLSLWGLVSDVPQELQAVAQQFSLPQEQVSEELDGVGVSIGSAIHTQLRSSVYPLLAAVGSLGQVLQVSVHHLQTLNATVVELQAGQQDLEPAIREHRDRLLELLQEARCQGDCAGALSWARTLELGADFSQVPSVDHVLHQLKGVPEANFSSMVQEENSTFNALPALAAMQTSSVVQELKKAVAQQPEGVRTLAEGFPGLEAASRWAQALQEVEESSRPYLQEVQRYETYRWIVGCVLCSVVLFVVLCNLLGLNLGIWGLSARDDPSHPEAKGEAGARFLMAGVGLSFLFAAPLILLVFATFLVGGNVQTLVCQSWENGELFEFADTPGNLPPSMNLSQLLGLRKNISIHQAYQQCKEGAALWTVLQLNDSYDLEEHLDINQYTNKLRQELQSLKVDTQSLDLLSSAARRDLEALQSSGLQRIHYPDFLVQIQRPVVKTSMEQLAQELQGLAQAQDNSVLGQRLQEEAQGLRNLHQEKVVPQQSLVAKLNLSVRALESSAPNLQLETSDVLANVTYLKGELPAWAARILRNVSECFLAREMGYFSQYVAWVREEVTQRIATCQPLSGALDNSRVILCDMMADPWNAFWFCLAWCTFFLIPSIIFAVKTSKYFRPIRKRLSSTSSEETQLFHIPRVTSLKL

SEQ ID NO: 1658 - protein, 771 aa, Artificial Sequence; identical to SEQ ID NO: 1657
  Synthetic polypeptide

SEQ ID NO: 1659 - protein, 771 aa, Artificial Sequence; identical to SEQ ID NO: 1657
  Synthetic polypeptide

SEQ ID NO: 1660 - protein, 770 aa, Artificial Sequence
  Synthetic polypeptide
MVPRLRSGDLPWEINPLSSCSLLREKDPLTTSGPQTDQPKEHLTNFKSGNASTTTTVIDSKNGSVPKSPGKVLKRTVTEDIVTTFSSPAAWLLVIALIITWSAVAIVMFDLVDYKNFSASSIAKIGSDPLKLVRDAMEETTDWIYGFFSLLSDIISSEDEEDDDGDEDTDKGEIDEPPLRKKEIHKDKTEKQEKPERKIQTKVTHKEKEKGKEKVREKEKPEKKATHKEKIEKKEKPETKTLAKEQKKAKTAEKSEEKTKKEVKGGKQEKVKQTAAKVKEVQKTPSKPKEKEDKEKAAVSKHEQKDQYAFCRYMIDIFVHGDLKPGQSPAIPPPLPTEQASRPTPASPALEEKEGEKKKAEKKVTSETKKKEKEDIKKKSEKETAIDVEKKEPGKASETKQGTVKIAAQAAAKKDEKKEDSKKTKKPAEVEQPKGKKQEKKEKHVEPAKSPKKEHSVPSDKQVKAKTERAKEEIGAVSIKKAVPGKKEEKTTKTVEQEIRKEKSGKTSSILKDKEPIKGKEEKVPASLKEKEPETKKDEKMSKAGKEVKPKPPQLQGKKEEKPEPQIKKEAKPAISEKVQIHKQDIVKPEKTVSHGKPEEKVLKQVKAVTIEKTAKPKPTKKAEHREREPPSIKTDKPKPTPKGTSEVTESGKKKTEISEKESKEKADMKHLREEKVSTRKESLQLHNVTKAEKPARVSKDVEDVPASKKAKEGTEDVSPTKQKSPISFFQCVYLDGYNGYGFQFPFTPADRPGESSGQANSPGQKQQGQ

SEQ ID NO: 1661 - protein, 769 aa, Artificial Sequence
  Synthetic polypeptide
WLRNFNTGEGGLGQPFGWKRMAGPGGCDSDHWGPHCSNRCQCQNGALCNPITGACVCAAGFRGWRCEELCAPGTHGKGCQLPCQCRHGASCDPRAGECLCAPGYTGVYCEELCPPGSHGAHCELRCPCQNGGTCHHITGECACPPGWTGAVCAQPCPPGTFGQNCSQDCPCHHGGQCDHVTGQCHCTAGYMGDRCQEECPFGSFGFQCSQHCDCHNGGQCSPTTGACECEPGYKGPRCQERLCPEGLHGPGCTLPCPCDADNTISCHPVTGACTCQPGWSGHHCNESCPVGYYGDGCQLPCTCQNGADCHSITGGCTCAPGFMGEVCAVSCAAGTYGPNCSSICSCNNGGTCSPVDGSCTCKEGWQGLDCTLPCPSGTWGLNCNESCTCANGAACSPIDGSCSCTPGWLGDTCELPCPDGTFGLNCSEHCDCSHADGCDPVTGHCCCLAGWTGIRCDSTCPPGRWGPNCSVSCSCENGGSCSPEDGSCECAPGFRGPLCQRICPPGFYGHGCAQPCPLCVHSSRPCHHISGICECLPGFSGALCNQVCAGGYFGQDCAQLCSCANNGTCSPIDGSCQCFPGWIGKDCSQACPPGFWGPACFHACSCHNGASCSAEDGACHCTPGWTGLFCTQRKPHLLASQPLRIPCCGLLATVGIVQTSREGGMQAAPGLVVPDSCPTRTEELCRGSSRPDWIQGIDKPKVLEGQGCKAAQQHFLGRTVGAYASVRMAPAVTTSVASAPAAQASPGNTVSRDVPQEPLAMGVSSYVSA

SEQ ID NO: 1662 - protein, 768 aa, Artificial Sequence
  Synthetic polypeptide
VGSPRDVVSFEQPEFSVSRGDQVARIPVIRRVLDGGKSQVSYRTQDGTAQGNRDYIPVEGELLFQPGEAWKELQVKLLELQEVDSLLRGRQVRRFHVQLSNPKFGAHLGQPHSTTIIIRDPDELDRSFTSQMLSSQPPPHGDLGAPQNPNAKAAGSRKIHFNWLPPSGKPMGYRVKYWIQGDSESEAHLLDSKVPSVELTNLYPYCDYEMKVCAYGAQGEGPYSSLVSCRTHQEVPSEPGRLAFNVVSSTVTQLSWAEPAETNGEITAYEVCYGLVNDDNRPIGPMKKVLVDNPKNRMLLIENLRESQPYRYTVKARNGAGWGPEREAIINLATQPKRPMSIPIIPDIPIVDAQSGEDYDSFLMYSDDVLRSPSGSQRPSVSDDTEHLVNGRMDFAFPGSTNSLHRMTTTSAAAYGTHLSPHVPHRVLSTSSTLTRDYNSLTRSEHSHSTTLPRDYSTLTSVSSHDSRLTAGVPDTPTRLVFSALGPTSLRVSWQEPRCERPLQGYSVEYQLLNGGELHRLNIPNPAQTSVVVEDLLPNHSYVFRVRAQSQEGWGREREGVITIESQVHPQSPLCPLPGSAFTLSTPSAPGPLVFTALSPDSLQLSWERPRRPNGDIVGYLVTCEMAQGGGPATAFRVDGDSPESRLTVPGLSENVPYKFKVQARTTEGFGPEREGIITIESQDGGPFPQLGSRAGLFQHPLQSEYSSITTTHTSATEPFLVDGLTLGAQHLEAGGSLTRHVTQEFVSRTLTTSGTLSTHMDQQFFQT

SEQ ID NO: 1663 - protein, 768 aa, Artificial Sequence; identical to SEQ ID NO: 1662
  Synthetic polypeptide

SEQ ID NO: 1664 - protein, 766 aa, Artificial Sequence
  Synthetic polypeptide
GKRLFYLQDTKSSNGTFINSQRLSRGSEESPPCEILSGDIIQFGVDVTENTRKVTHGCIVSTIKLFLPDGMEARLRSDVIHAPLPSPVDKVAANTPSMYSQELFQLSQYLQEALHREQMLEQKLATLQRLLAITQEASDTSWQALIDEDRLLSRLEVMGNQLQACSKNQTEDSLRKELIALQEDKHNYETTAKESLRRVLQEKIEVVRKLSEVERSLSNTEDECTHLKEMNERTQEELRELANKYNGAVNEIKDLSDKLKVAEGKQEEIQQKGQAEKKELQHKIDEMEEKEQELQAKIEALQADNDFTNERLTALQVRLEHLQEKTLKECSSLEHLLSKSGGDCTFIHQFIECQKKLIVEGHLTKAVEETKLSKENQTRAKESDFSDTLSPSKEKSSDDTTDAQMDEQDLNEPLAKVSLLKDDLQGAQSEIEAKQEIQHLRKELIEAQELARTSKQKCFELQALLEEERKAYRNQVEESTKQIQVLQAQLQRLHIDTENLREEKDSEITSTRDELLSARDEILLLHQAAAKVASERDTDIASLQEELKKVRAELERWRKAASEYEKEITSLQNSFQLRCQQCEDQQREEATRLQGELEKLRKEWNALETECHSLKRENVLLSSELQRQEKELHNSQKQSLELTSDLSILQMSRKELENQVGSLKEQHLRDSADLKTLLSKAENQAKDVQKEYEKTQTVLSELKLKFEMTEQEKQSITDELKQCKNNLKLLREKGNNKPWPWMPMLAALVAVTAIVLYVPGLARASP

SEQ ID NO: 1665 - protein, 765 aa, Artificial Sequence
  Synthetic polypeptide
LPTSDGFIGIWYFSCSLFSLLPTFEEGPCFPFTFRHDCKFPEASPAMWNSCPAGTFKASQEAEGCSHCPSNSRSPAEASPICTCRTGYYRADFDPPEVACTSVPSGPRNVISIVNETSIILEWHPPRETGGRDDVTYNIICKKCRADRRSCSRCDDNVEFVPRQLGLTECRVSISSLWAHTPYTFDIQAINGVSSKSPFPPQHVSVNITTNQAAPSTVPIMHQVSATMRSITLSWPQPEQPNGIILDYEIRYYEKEHNEFNSSMARSQTNTARIDGLRPGMVYVVQVRARTVAGYGKFSGKMCFQTLTDDDYKSELREQLPLIAGSAAAGVVFVVSLVAISIVCSRKRAYSKEAVYSDKLQHYSTGRGSPGMKIYIDPFTYEDPNEAVREFAKEIDVSFVKIEEVIGAGEFGEVYKGRLKLPGKREIYVAIKTLKAGYSEKQRRDFLSEASIMGQFDHPNIIRLEGVVTKSRPVMIITEFMENGALDSFLRQNDGQFTVIQLVGMLRGIAAGMKYLAEMNYVHRDLAARNILVNSNLVCKVSDFGLSRYLQDDTSDPTYTSSLGGKIPVRWTAPEAIAYRKFTSASDVWSYGIVMWEVMSFGERPYWDMSNQDVINAIEQDYRLPPPMDCPAALHQLMLDCWQKDRNSRPRFAEIVNTLDKMIRNPASLKTVATITAVPSQPLLDRSIPDFTAFTTVDDWLSAIKMVQYRDSFLTAGFTSLQLVTQMTSEDLLRIGITLAGHQKKILNSIHSMRVQISQSPTAMA

SEQ ID NO: 1666 - protein, 763 aa, Artificial Sequence
  Synthetic polypeptide
KPLLNEIKEDTNKWKNIPCSWIGRINIVKMAILPKALAANAGTGFAVAEPQIAMFCGKLNMHVNIQTGKWEPDPTGTKSCFETKEEVLQYCQEMYPELQITNVMEANQRVSIDNWCRRDKKQCKSRFVTPFKCLVGEFVSDVLLVPEKCQFFHKERMEVCENHQHWHTVVKEACLTQGMTLYSYGMLLPCGVDQFHGTEYVCCPQTKIIGSVSKEEEEEDEEEEEEEDEEEDYDVYKSEFPTEADLEDFTEAAVDEDDEDEEEGEEVVEDRDYYYDTFKGDDYNEENPTEPGSDGTMSDKEITHDVKAVCSQEAMTGPCRAVMPRWYFDLSKGKCVRFIYGGCGGNRNNFESEDYCMAVCKAMIPPTPLPTNDVDVYFETSADDNEHARFQKAKEQLEIRHRNRMDRVKKEWEEAELQAKNLPKAERQTLIQHFQAMVKALEKEAASEKQQLVETHLARVEAMLNDRRRMALENYLAALQSDPPRPHRILQALRRYVRAENKDRLHTIRHYQHVLAVDPEKAAQMKSQVMTHLHVIEERRNQSLSLLYKVPYVAQEIQEEIDELLQEQRADMDQFTASISETPVDVRVSSEESEEIPPFHPFHPFPALPENEDTQPELYHPMKKGSGVGEQDGGLIGAEEKVINSKNKVDENMVIDETLDVKEMIFNAERVGGLEEERESVGPLREDFSLSSSALIGLLVIAVAIATVIVISLVMLRKRQYGTISHGIVEVDPMLTPEERHLNKMQNHGYENPTYKYLEQMQI

SEQ ID NO: 1667 - protein, 762 aa, Artificial Sequence
  Synthetic polypeptide
AVGRARTRRAGLALAVTSGCDSDHWGPHCSNRCQCQNGALCNPITGACVCAAGFRGWRCEELCAPGTHGKGCQLPCQCRHGASCDPRAGECLCAPGYTGVYCEELCPPGSHGAHCELRCPCQNGGTCHHITGECACPPGWTGAVCAQPCPPGTFGQNCSQDCPCHHGGQCDHVTGQCHCTAGYMGDRCQEECPFGSFGFQCSQHCDCHNGGQCSPTTGACECEPGYKGPRCQERLCPEGLHGPGCTLPCPCDADNTISCHPVTGACTCQPGWSGHHCNESCPVGYYGDGCQLPCTCQNGADCHSITGGCTCAPGFMGEVCAVSCAAGTYGPNCSSICSCNNGGTCSPVDGSCTCKEGWQGLDCTLPCPSGTWGLNCNESCTCANGAACSPIDGSCSCTPGWLGDTCELPCPDGTFGLNCSEHCDCSHADGCDPVTGHCCCLAGWTGIRCDSTCPPGRWGPNCSVSCSCENGGSCSPEDGSCECAPGFRGPLCQRICPPGFYGHGCAQPCPLCVHSSRPCHHISGICECLPGFSGALCNQVCAGGYFGQDCAQLCSCANNGTCSPIDGSCQCFPGWIGKDCSQACPPGFWGPACFHACSCHNGASCSAEDGACHCTPGWTGLFCTQRKPHLLASQPLRIPCCGLLATVGIVQTSREGGMQAAPGLVVPDSCPTRTEELCRGSSRPDWIQGIDKPKVLEGQGCKAAQQHFLGRTVGAYASVRMAPAVTTSVASAPAAQASPGNTVSRDVPQEPLAMGVSSYVSA

SEQ ID NO: 1668 - protein, 762 aa, Artificial Sequence
  Synthetic polypeptide
MVPRLRSGDLPWEINPLSSCSLLREKDPLTTSGPQTDQPKEHLTNFKSGNASTTTTVIDSKNGSVPKSPGKVLKRTVTEDIVTTFSSPAAWLLVIALIITWSAVAIVMFDLVDYKNFSASSIAKIGSDPLKLVRDAMEETTDWIYGFFSLLSDIISSEDEEDDDGDEDTDKGEIDEPPLRKKEIHKDKTEKQEKPERKIQTKVTHKEKEKGKEKVREKEKPEKKATHKEKIEKKEKPETKTLAKEQKKAKTAEKSEEKTKKEVKGGKQEKVKQTAAKVKEVQKTPSKPKEKEDKEKAAVSKHEQKDQYAFCRYMIDIFVHGDLKPGQSPAIPPPLPTEQASRPTPASPALEEKEGEKKKAEKKVTSETKKKEKEDIKKKSEKETAIDVEKKEPGKASETKQGTVKIAAQAAAKKDEKKEDSKKTKKPAEVEQPKGKKQEKKEKHVEPAKSPKKEHSVPSDKQVKAKTERAKEEIGAVSIKKAVPGKKEEKTTKTVEQEIRKEKSGKTSSILKDKEPIKGKEEKVPASLKEKEPETKKDEKMSKAGKEVKPKPPQLQGKKEEKPEPQIKKEAKPAISEKVQIHKQDIVKPEKTVSHGKPEEKVLKQVKAVTIEKTAKPKPTKKAEHREREPPSIKTDKPKPTPKGTSEVTESGKKKTEISEKESKEKADMKHLREEKVSTRKESLQLHNVTKEDVEDVPASKKAKEGTEDVSPTKQKSPISFFQCVYLDGYNGYGFQFPFTPADRPGESSGQANSPGQKQQGQ

SEQ ID NO: 1669 - protein, 761 aa, Artificial Sequence
  Synthetic polypeptide
SQHFGRPSITFSIPEGALVAVVGQVGCGKSSLLSALLAEMDKVEGHVAIKTRILVTHSMSYLPQVDVIIVMSGGKISEMGSYQELLARDGAFAEFLRTYASTEQEQDAEENGVTGVSGPGKEAKQMENGMLVTDSAGKQLQRQLSSSSSYSGDISRHHNSTAELQKAEAKKEETWKLMEADKAQTGQVKLSVYWDYMKAIGLFISFLSIFLFMCNHVSALASNYWLSLWTDDPIVNGTQEHTKVRLSVYGALGISQGIAVFGYSMAVSIGGILASRCLHVDLLHSILRSPMSFFERTPSGNLVNRFSKELDTVDSMIPEVIKMFMGSLFNVIGACIVILLATPIAAIIIPPLGLIYFFVQRFYVASSRQLKRLESVSRSPVYSHFNETLLGVSVIRAFEEQERFIHQSDLKVDENQKAYYPSIVANRWLAVRLECVGNCIVLFAALFAVISRHSLSAGLVGLSVSYSLQVTTYLNWLVRMSSEMETNIVAVERLKEYSETEKEAPWQIQETAPPSSWPQVGRVEFRNYCLRYREDLDFVLRHINVTINGGEKVGIVGRTGAGKSSLTLGLFRINESAEGEIIIDGINIAKIGLHDLRFKITIIPQDPVLFSGSLRMNLDPFSQYSDEEVWTSLELAHLKDFVSALPDKLDHECAEGGENLSVGQRQLVCLARALLRKTKILVLDEATAAVDLETDDLIQSTIRTQFEDCTVLTIAHRLNTIMDYTRVIVLDKGEIQEYGAPSDLLQQRGLFYSMAKDAGLV

SEQ ID NO: 1670 - protein, 760 aa, Artificial Sequence
  Synthetic polypeptide
VFHKGTQTRFSQEPADQTVVAGQRAVLPCVLLNYSGIVQWTKDGLALGMGQGLKAWPRYRVVGSADAGQYNLEITDAELSDDASYECQATEAALRSRRAKLTVLIPPEDTRIDGGPVILLQAGTPHNLTCRAFNAKPAATIIWFRDGTQQEGAVASTELLKDGKRETTVSQLLINPTDLDIGRVFTCRSMNEAIPSGKETSIELDVHHPPTVTLSIEPQTVQEGERVVFTCQATANPEILGYRWAKGGFLIEDAHESRYETNVDYSFFTEPVSCEVHNKVGSTNVSTLVNVHFAPRIVVDPKPTTTDIGSDVTLTCVWVGNPPLTLTWTKKDSNMGPRPPGSPPEAALSAQVLSNSNQLLLKSVTQADAGTYTCRAIVPRIGVAEREVPLYVNGPPIISSEAVQYAVRGDGGKVECFIGSTPPPDRIAWAWKENFLEVGTLERYTVERTNSGSGVLSTLTINNVMEADFQTHYNCTAWNSFGPGTAIIQLEEREVLPVGIIAGATIGASILLIFFFIALVFFLYRRRKGSRKDVTLRKLDIKVETVNREPLTMHSDREDDTASVSTATRVMKAIYSSFKDDVDLKQDLRCDTIDTREEYEMKDPTNGYYNVRAHEDRPSSRAVLYADYRAPGPARFDGRPSSRLSHSSGYAQLNTYSRGPASDYGPEPTPPGPAAPAGTDTTSQLSYENYEKFNSHPFPGAAGYPTYRLGYPQAPPSGLERTPYEAYDPIGKYATATRFSYTSQHSDYGQRFQQRMQTHV

SEQ ID NO: 1671 - protein, 759 aa, Artificial Sequence
  Synthetic polypeptide
SSKTVLVITYREPPNPEYQEFQNRLLIRAREDFGVELGPSLMNLIAGCFYDGILLYAEVLNETIQEGGTREDGLRIVEKMQGRRYHGVTGLVVMDKNNDRETDFVLWAMGDLDSGDFQPAAHYSGAEKQIWWTGRPIPWVKGAPPSDNPPCAFDLDDPSCDKTPLSTLAIVALGTGITFIMFGVSSFLIFRKLMLEKELASMLWRIRWEELQFGNSERYHKGAGSRLTLSLRGSSYGSLMTAHGKYQIFANTGHFKGNVVAIKHVNKKRIELTRQVLFELKHMRDVQFNHLTRFIGACIDPPNICIVTEYCPRGSLQDILENDSINLDWMFRYSLINDLVKGMAFLHNSIISSHGSLKSSNCVVDSRFVLKITDYGLASFRSTAEPDDSHALYAKKLWTAPELLSGNPLPTTGMQKADVYSFGIILQEIALRSGPFYLEGLDLSPKEIVQKVRNGQRPYFRPSIDRTQLNEELVLLMERCWAQDPAERPDFGQIKGFIRRFNKEGGTSILDNLLLRMEQYANNLEKLVEERTQAYLEEKRKAEALLYQILPHSVAEQLKRGETVQAEAFDSVTIYFSDIVGFTALSAESTPMQVVTLLNDLYTCFDAIIDNFDVYKVETIGDAYMVVSGLPGRNGQRHAPEIARMALALLDAVSSFRIRHRPHDQLRLRIGVHTGPVCAGVVGLKMPRYCLFGDTVNTASRMESNGQALKIHVSSTTKDALDELGCFQLELRGDVEMKGKGKMRTYWLLGERKGPPGLL

SEQ ID NO: 1672 - protein, 758 aa, Artificial Sequence
  Synthetic polypeptide
YQELTHVDQASFQVDAFGTSFILDVVLNHDLLSSEYIERHIEHGGKTVEVKGGEHCYYQGHIRGNPDSFVALSTCHGLHGMFYDGNHTYLIEPEENDTTQEDFHFHSVYKSRLFEFSLDDLPSEFQQVNITPSKFILKPRPKRSKRQLRRYPRNVEEETKYIELMIVNDHLMFKKHRLSVVHTNTYAKSVVNMADLIYKDQLKTRIVLVAMETWATDNKFAISENPLITLREFMKYRRDFIKEKSDAVHLFSGSQFESSRSGAAYIGGICSLLKGGGVNEFGKTDLMAVTLAQSLAHNIGIISDKRKLASGECKCEDTWSGCIMGDTGYYLPKKFTQCNIEEYHDFLNSGGGACLFNKPSKLLDPPECGNGFIETGEECDCGTPAECVLEGAECCKKCTLTQDSQCSDGLCCKKCKFQPMGTVCREAVNDCDIRETCSGNSSQCAPNIHKMDGYSCDGVQGICFGGRCKTRDRQCKYIWGQKVTASDKYCYEKLNIEGTEKGNCGKDKDTWIQCNKRDVLCGYLLCTNIGNIPRLGELDGEITSTLVVQQGRTLNCSGGHVKLEEDVDLGYVEDGTPCGPQMMCLEHRCLPVASFNFSTCLSSKEGTICSGNGVCSNELKCVCNRHWIGSDCNTYFPHNDDAKTGITLSGNGVAGTNIIIGIIAGTILVLALILGITAWGYKNYREQRQLPQGDYVKKPGDGDSFYSDIPPGVSTNSASSSKKRSNGLSHSWSERIPDTKHISDICENGRPRSNSWQG

SEQ ID NO: 1673 - protein, 758 aa, Artificial Sequence
  Synthetic polypeptide
GQEFETSLANMERRSLKERNPLKIFPSKRILRRHKRDWVVAPISVPENGKGPFPQRLNQLKSNKDRDTKIFYSITGPGADSPPEGVFAVEKETGWLLLNKPLDREEIAKYELFGHAVSENGASVEDPMNISIIVTDQNDHKPKFTQDTFRGSVLEGVLPGTSVMQVTATDEDDAIYTYNGVVAYSIHSQEPKDPHDLMFTIHRSTGTISVISSGLDREKVPEYTLTIQATDMDGDGSTTTAVAVVEILDANDNAPMFDPQKYEAHVPENAVGHEVQRLTVTDLDAPNSPAWRATYLIMGGDDGDHFTITTHPESNQGILTTRKGLDFEAKNQHTLYVEVTNEAPFVLKLPTSTATIVVHVEDVNEAPVFVPPSKVVEVQEGIPTGEPVCVYTAEDPDKENQKISYRILRDPAGWLAMDPDSGQVTAVGTLDREDEQFVRNNIYEVMVLAMDNGSPPTTGTGTLLLTLIDVNDHGPVPEPRQITICNQSPVRQVLNITDKDLSPHTSPFQAQLTDDSDIYWTAEVNEEGDTVVLSLKKFLKQDTYDVHLSLSDHGNKEQLTVIRATVCDCHGHVETCPGPWKGGFILPVLGAVLALLFLLLVLLLLVRKKRKIKEPLLLPEDDTRDNVFYYGEEGGGEEDQDYDITQLHRGLEARPEVVLRNDVAPTIIPTPMYRPRPANPDEIGNFIIENLKAANTDPTAPPYDTLLVFDYEGSGSDAASLSSLTSSASDQDQDYDYLNEWGSRFKKLADMYGGGEDD

SEQ ID NO: 1674 - protein, 758 aa, Artificial Sequence; identical to SEQ ID NO: 1673
  Synthetic polypeptide

SEQ ID NO: 1675 - protein, 758 aa, Artificial Sequence
  Synthetic polypeptide
TSQPLKLFIANQKRLEIINEDDVEAYVGLRNLTIVDSGLKFVAHKAFLKNSNLQHINFTRNKLTSLSRKHFRHLDLSELILVGNPFTCSCDIMWIKTLQEAKSSPDTQDLYCLNESSKNIPLANLQIPNCGLPSANLAAPNLTVEEGKSITLSCSVAGDPVPNMYWDVGNLVSKHMNETSHTQGSLRITNISSDDSGKQISCVAENLVGEDQDSVNLTVHFAPTITFLESPTSDHHWCIPFTVKGNPKPALQWFYNGAILNESKYICTKIHVTNHTEYHGCLQLDNPTHMNNGDYTLIAKNEYGKDEKQISAHFMGWPGIDDGANPNYPDVIYEDYGTAANDIGDTTNRSNEIPSTDVTDKTGREHLSVYAVVVIASVVGFCLLVMLFLLKLARHSKFGMKGPASVISNDDDSASPLHHISNGSNTPSSSEGGPDAVIIGMTKIPVIENPQYFGITNSQLKPDTFVQHIKRHNIVLKRELGEGAFGKVFLAECYNLCPEQDKILVAVKTLKDASDNARKDFHREAELLTNLQHEHIVKFYGVCVEGDPLIMVFEYMKHGDLNKFLRAHGPDAVLMAEGNPPTELTQSQMLHIAQQIAAGMVYLASQHFVHRDLATRNCLVGENLLVKIGDFGMSRDVYSTDYYRVGGHTMLPIRWMPPESIMYRKFTTESDVWSLGVVLWEIFTYGKQPWYQLSNNEVIECITQGRVLQRPRTCPQEVYELMLGCWQREPHMRKNIKGIHTLLQNLAKASPVYLDILG

SEQ ID NO: 1676 - protein, 758 aa, Artificial Sequence; identical to SEQ ID NO: 1675
  Synthetic polypeptide

SEQ ID NO: 1677 - protein, 758 aa, Artificial Sequence
  Synthetic polypeptide
QACSTWDLWMHLWIRKEVDEVLEILEPPTKYQISQPEVYVAAPGESLEVRCLLKDAAVISWTKDGVHLGPNNRTVLIGEYLQIKGATPRDSGLYACTASRTVDSETWYFMVNVTDAISSGDDEDDTDGAEDFVSENSNNKRAPYWTNTEKMEKRLHAVPAANTVKFRCPAGGNPMPTMRWLKNGKEFKQEHRIGGYKVRNQHWSLIMESVVPSDKGNYTCVVENEYGSINHTYHLDVVERSPHRPILQAGLPANASTVVGGDVEFVCKVYSDAQPHIQWIKHVEKNGSKYGPDGLPYLKVLKHSGINSSNAEVLALFNVTEADAGEYICKVSNYIGQANQSAWLTVLPKQQAPGREKEITASPDYLEIAIYCIGVFLIACMVVTVILCRMKNTTKKPDFSSQPAVHKLTKRIPLRRQVTVSAESSSSMNSNTPLVRITTRLSSTADTPMLAGVSEYELPEDPKWEFPRDKLTLGKPLGEGCFGQVVMAEAVGIDKDKPKEAVTVAVKMLKDDATEKDLSDLVSEMEMMKMIGKHKNIINLLGACTQDGPLYVIVEYASKGNLREYLRARRPPGMEYSYDINRVPEEQMTFKDLVSCTYQLARGMEYLASQKCIHRDLAARNVLVTENNVMKIADFGLARDINNIDYYKKTTNGRLPVKWMAPEALFDRVYTHQSDVWSFGVLMWEIFTLGGSPYPGIPVEELFKLLKEGHRMDKPANCTNELYMMMRDCWHAVPSQRPTFKQLVEDLDRILTLTTNEI

SEQ ID NO: 1678 - protein, 757 aa, Artificial Sequence
  Synthetic polypeptide
QACSTWDLWMHLWIRKEVDEVLEILEPPTKYQISQPEVYVAAPGESLEVRCLLKDAAVISWTKDGVHLGPNNRTVLIGEYLQIKGATPRDSGLYACTASRTVDSETWYFMVNVTDAISSGDDEDDTDGAEDFVSENSNNKRAPYWTNTEKMEKRLHAVPAANTVKFRCPAGGNPMPTMRWLKNGKEFKQEHRIGGYKVRNQHWSLIMESVVPSDKGNYTCVVENEYGSINHTYHLDVVERSPHRPILQAGLPANASTVVGGDVEFVCKVYSDAQPHIQWIKHVEKNGSKYGPDGLPYLKVLKHSGINSSNAEVLALFNVTEADAGEYICKVSNYIGQANQSAWLTVLPKQQAPGREKEITASPDYLEIAIYCIGVFLIACMVVTVILCRMKNTTKKPDFSSQPAVHKLTKRIPLRRQVTVSAESSSSMNSNTPLVRITTRLSSTADTPMLAGVSEYELPEDPKWEFPRDKLTLGKPLGEGCFGQVVMAEAVGIDKDKPKEAVTVAVKMLKDDATEKDLSDLVSEMEMMKMIGKHKNIINLLGACTQDGPLYVIVEYASKGNLREYLRARRPPGMEYSYDINRVPEEQMTFKDLVSCTYQLARGMEYLASQKCIHRDLAARNVLVTENNVMKIADFGLARDINNIDYYKKTTNGRLPVKWMAPEALFDRVYTHQSDVWSFGVLMWEIFTLGGSPYPGIPVEELFKLLKEGHRMDKPANCTNELYMMMRDCWHAVPSQRPTFKQLVEDLDRILTLTTNE

SEQ ID NO: 1679 - protein, 755 aa, Artificial Sequence
  Synthetic polypeptide
LSPPPTGLHPLHPVHFSDLSSSISSSVWCFLIPHSNPSLSVLCTGWFIKSSNEATNITPKHNMKAFLDELKAENIKKFLYNFTQIPHLAGTEQNFQLAKQIQSQWKEFGLDSVELAHYDVLLSYPNKTHPNYISIINEDGNEIFNTSLFEPPPPGYENVSDIVPPFSAFSPQGMPEGDLVYVNYARTEDFFKLERDMKINCSGKIVIARYGKVFRGNKVKNAQLAGAKGVILYSDPADYFAPGVKSYPDGWNLPGGGVQRGNILNLNGAGDPLTPGYPANEYAYRRGIAEAVGLPSIPVHPIGYYDAQKLLEKMGGSAPPDSSWRGSLKVPYNVGPGFTGNFSTQKVKMHIHSTNEVTRIYNVIGTLRGAVEPDRYVILGGHRDSWVFGGIDPQSGAAVVHEIVRSFGTLKKEGWRPRRTILFASWDAEEFGLLGSTEWAEENSRLLQERGVAYINADSSIEGNYTLRVDCTPLMYSLVHNLTKELKSPDEGFEGKSLYESWTKKSPSPEFSGMPRISKLGSGNDFEVFFQRLGIASGRARYTKNWETNKFSGYPLYHSVYETYELVEKFYDPMFKYHLTVAQVRGGMVFELANSIVLPFDCRDYAVVLRKYADKIYSISMKHPQEMKTYSVSFDSLFSAVKNFTEIASKFSERLQDFDKSNPIVLRMMNDQLMFLERAFIDPLGLPDRPFYRHVIYAPSSHNKYAGESFPGIYDALFDIESKVDPSKAWGEVKRQIYVAAFTVQAAAETLSEVA

SEQ ID NO: 1680 - protein, 755 aa, Artificial Sequence; identical to SEQ ID NO: 1679
  Synthetic polypeptide

SEQ ID NO: 1681 - protein, 751 aa, Artificial Sequence
  Synthetic polypeptide
KPLLNEIKEDTNKWKNIPCSWIGRINIVKMAILPKALAANAGTGFAVAEPQIAMFCGKLNMHVNIQTGKWEPDPTGTKSCFETKEEVLQYCQEMYPELQITNVMEANQRVSIDNWCRRDKKQCKSRFVTPFKCLVGEFVSDVLLVPEKCQFFHKERMEVCENHQHWHTVVKEACLTQGMTLYSYGMLLPCGVDQFHGTEYVCCPQTKIIGSVSKEEEEEDEEEEEEEDEEEDYDVYKSEFPTEADLEDFTEAAVDEDDEDEEEGEEVVEDRDYYYDTFKGDDYNEENPTEPGSDGTMSDKEITHDVKAVCSQEAMTGPCRAVMPRWYFDLSKGKCVRFIYGGCGGNRNNFESEDYCMAVCKAMIPPTPLPTNDVDVYFETSADDNEHARFQKAKEQLEIRHRNRMDRVKKEWEEAELQAKNLPKAERQTLIQHFQAMVKALEKEAASEKQQLVETHLARVEAMLNDRRRMALENYLAALQSDPPRPHRILQALRRYVRAENKDRLHTIRHYQHVLAVDPEKAAQMKSQVMTHLHVIEERRNQSLSLLYKVPYVAQEIQEEIDELLQEQRADMDQFTASISETPVDVRVSSEESEEIPPFHPFHPFPALPENEGSGVGEQDGGLIGAEEKVINSKNKVDENMVIDETLDVKEMIFNAERVGGLEEERESVGPLREDFSLSSSALIGLLVIAVAIATVIVISLVMLRKRQYGTISHGIVEVDPMLTPEERHLNKMQNHGYENPTYKYLEQMQI

SEQ ID NO: 1682 - protein, 751 aa, Artificial Sequence; identical to SEQ ID NO: 1681
  Synthetic polypeptide

SEQ ID NO: 1683 - protein, 751 aa, Artificial Sequence
  Synthetic polypeptide
IIIYKMKILARTPRPIIFLQPPWTTVFQGERVTLTCKGFRFYSPQKTKWYHRYLGKEILRETPDNILEVQESGEYRCQAQGSPLSSPVHLDFSSASLILQAPLSVFEGDSVVLRCRAKAEVTLNNTIYKNDNVLAFLNKRTDFHIPHACLKDNGAYRCTGYKESCCPVSSNTVKIQVQEPFTRPVLRASSFQPISGNPVTLTCETQLSLERSDVPLRFRFFRDDQTLGLGWSLSPNFQITAMWSKDSGFYWCKAATMPYSVISDSPRSWIQVQIPASHPVLTLSPEKALNFEGTKVTLHCETQEDSLRTLYRFYHEGVPLRHKSVRCERGASISFSLTTENSGNYYCTADNGLGAKPSKAVSLSVTVPVSHPVLNLSSPEDLIFEGAKVTLHCEAQRGSLPILYQFHHEGAALERRSANSAGGVAISFSLTAEHSGNYYCTADNGFGPQRSKAVSLSVTVPVSHPVLTLSSAEALTFEGATVTLHCEVQRGSPQILYQFYHEDMPLWSSSTPSVGRVSFSFSLTEGHSGNYYCTADNGFGPQRSEVVSLFVTVPVSRPILTLRVPRAQAVVGDLLELHCEAPRGSPPILYWFYHEDVTLGSSSAPSGGEASFNLSLTAEHSGNYSCEANNGLVAQHSDTISLSVIVPVSRPILTFRAPRAQAVVGDLLELHCEALRGSSPILYWFYHEDVTLGKISAPSGGGASFNLSLTTEHSGIYSCEADNGLEAQRSEMVTLKVAGEWALPTSSTSEN

SEQ ID NO: 1684 - protein, 749 aa, Artificial Sequence
  Synthetic polypeptide
GKRLFYLQDTKSSNGTFINSQRLSRGSEESPPCEILSGDIIQFGVDVTENTRKVTHGCIVSTIKLFLPDGMEARLRSDVIHAPLPSPVDKVAANTPSMYSQELFQLSQYLQEALHREQMLEQKLATLQRLLAITQEASDTSWQALIDEDRLLSRLEVMGNQLQACSKNQTEDSLRKELIALQEDKHNYETTAKESLRRVLQEKIEVVRKLSEVERSLSNTEDECTHLKEMNERTQEELRELANKYNGAVNEIKDLSDKLKVAEGKQEEIQQKGQAEKKELQHKIDEMEEKEQELQAKIEALQADNDFTNERLTALQEHLLSKSGGDCTFIHQFIECQKKLIVEGHLTKAVEETKLSKENQTRAKESDFSDTLSPSKEKSSDDTTDAQMDEQDLNEPLAKVSLLKDDLQGAQSEIEAKQEIQHLRKELIEAQELARTSKQKCFELQALLEEERKAYRNQVEESTKQIQVLQAQLQRLHIDTENLREEKDSEITSTRDELLSARDEILLLHQAAAKVASERDTDIASLQEELKKVRAELERWRKAASEYEKEITSLQNSFQLRCQQCEDQQREEATRLQGELEKLRKEWNALETECHSLKRENVLLSSELQRQEKELHNSQKQSLELTSDLSILQMSRKELENQVGSLKEQHLRDSADLKTLLSKAENQAKDVQKEYEKTQTVLSELKLKFEMTEQEKQSITDELKQCKNNLKLLREKGNNKPWPWMPMLAALVAVTAIVLYVPGLARASP

SEQ ID NO: 1685 - protein, 749 aa, Artificial Sequence; identical to SEQ ID NO: 1684
  Synthetic polypeptide

SEQ ID NO: 1686 - protein, 748 aa, Artificial Sequence
  Synthetic polypeptide
GQAWWLMPVIPALWEAEADGSLEILMSEPGKLSQKIKVWLQEYWNITDLVAISTFMIGAILRLQNQPYMGYGRVIYCVDIIFWYIRVLDIFGVNKYLGPYVMMIGKMMIDMLYFVVIMLVVLMSFGVARQAILHPEEKPSWKLARNIFYMPYWMIYGEVFADQIDLYAMEINPPCGENLYDEEGKRLPPCIPGAWLTPALMACYLLVANILLVNLLIAVFNNTFFEVKSISNQVWKFQRYQLIMTFHDRPVLPPPMIILSHIYIIIMRLSGRCRKKREGDQEERDRGLKLFLSDEELKRLHEFEEQCVQEHFREKEDEQQSSSDERIRVTSERVENMSMRLEEINERETFMKTSLQTVDLRLAQLEELSNRMVNALENLAGIDRSDLIQARSRASSECEATYLLRQSSINSADGYSLYRYHFNGEELLFEDTSLSTSPGTGVRKKTCSFRIKEEKDVKTHLVPECQNSLHLSLGTSTSATPDGSHLAVDDLKNAEESKLGPDIGISKEDDERQTDSKKEETISPSLNKTDVIHGQDKSDVQNTQLTVETTNIEGTISYPLEETKITRYFPDETINACKTMKSRSFVYSRGRKLVGGVNQDVEYSSITDQQLTTEWQCQVQKITRSHSTDIPYIVSEAAVQAEHKEQFADMQDEHHVAEAIPRIPRLSLTITDRNGMENLLSVKPDQTLGFPSLRSKSLHGHPRNVKSIQGKLDRSGHASSVSSLVIVSGMTAEEKKVKKEKASTETEC

SEQ ID NO: 1687 - protein, 748 aa, Artificial Sequence; identical to SEQ ID NO: 1686
  Synthetic polypeptide

SEQ ID NO: 1688 - protein, 748 aa, Artificial Sequence; identical to SEQ ID NO: 1686
  Synthetic polypeptide

SEQ ID NO: 1689 - protein, 748 aa, Artificial Sequence; identical to SEQ ID NO: 1686
  Synthetic polypeptide

SEQ ID NO: 1690 - protein, 744 aa, Artificial Sequence
  Synthetic polypeptide
VFHKGTQTRFSQEPADQTVVAGQRAVLPCVLLNYSGIVQWTKDGLALGMGQGLKAWPRYRVVGSADAGQYNLEITDAELSDDASYECQATEAALRSRRAKLTVLIPPEDTRIDGGPVILLQAGTPHNLTCRAFNAKPAATIIWFRDGTQQEGAVASTELLKDGKRETTVSQLLINPTDLDIGRVFTCRSMNEAIPSGKETSIELDVHHPPTVTLSIEPQTVQEGERVVFTCQATANPEILGYRWAKGGFLIEDAHESRYETNVDYSFFTEPVSCEVHNKVGSTNVSTLVNVHFAPRIVVDPKPTTTDIGSDVTLTCVWVGNPPLTLTWTKKDSNMVLSNSNQLLLKSVTQADAGTYTCRAIVPRIGVAEREVPLYVNGPPIISSEAVQYAVRGDGGKVECFIGSTPPPDRIAWAWKENFLEVGTLERYTVERTNSGSGVLSTLTINNVMEADFQTHYNCTAWNSFGPGTAIIQLEEREVLPVGIIAGATIGASILLIFFFIALVFFLYRRRKGSRKDVTLRKLDIKVETVNREPLTMHSDREDDTASVSTATRVMKAIYSSFKDDVDLKQDLRCDTIDTREEYEMKDPTNGYYNVRAHEDRPSSRAVLYADYRAPGPARFDGRPSSRLSHSSGYAQLNTYSRGPASDYGPEPTPPGPAAPAGTDTTSQLSYENYEKFNSHPFPGAAGYPTYRLGYPQAPPSGLERTPYEAYDPIGKYATATRFSYTSQHSDYGQRFQQRMQTHV

SEQ ID NO: 1691 - protein, 742 aa, Artificial Sequence
  Synthetic polypeptide
VEYPKFKNPESEMLKNPKLFACQHDAQRKCSLEYFGFWTFRIPDAQPVYPELQITNVVEANQPVTIQNWCKRGRKQCKTHPHFVIPYRCLVGEFVSDALLVPDKCKFLHQERMDVCETHLHWHTVAKETCSEKSTNLHDYGMLLPCGIDKFRGVEFVCCPLAEESDNVDSADAEEDDSDVWWGGADTDYADGSEDKVVEVAEEEEVAEVEEEEADDDEDDEDGDEVEEEAEEPYEEATERTTSIATTTTTTTESVEEVVREVCSEQAETGPCRAMISRWYFDVTEGKCAPFFYGGCGGNRNNFDTEEYCMAVCGSAMSQSLLKTTQEPLARDPVKLPTTAASTPDAVDKYLETPGDENEHAHFQKAKERLEAKHRERMSQVMREWEEAERQAKNLPKADKKAVIQHFQEKVESLEQEAANERQQLVETHMARVEAMLNDRRRLALENYITALQAVPPRPRHVFNMLKKYVRAEQKDRQHTLKHFEHVRMVDPKKAAQIRSQVMTHLRVIYERMNQSLSLLYNVPAVAEEIQDEVDELLQKEQNYSDDVLANMISEPRISYGNDALMPSLTETKTTVELLPVNGEFSLDDLQPWHSFGADSVPANTENEVEPVDARPAADRGLTTRPGSGLTNIKTEEISEVKMDAEFRHDSGYEVHHQKLVFFAEDVGSNKGAIIGLMVGGVVIATVIVITLVMLKKKQYTSIHHGVVEVDAAVTPEERHLSKMQQNGYENPTYKFFEQMQN

SEQ ID NO: 1692 - protein, 742 aa, Artificial Sequence; identical to SEQ ID NO: 1691
  Synthetic polypeptide

SEQ ID NO: 1693 - protein, 741 aa, Artificial Sequence
  Synthetic polypeptide
PQFLSPAHTTLPSLKAFTWLCRCLQCSSPVLSGLAPGEKISAQMSLPRKGLPRPPTSCLPTPAPTLASPPSPLPASVLHSSHHHLIFLCMHRFAFLAPGFALPPRWKLLNSLSVDPDAECKYGLYFRDGRRKVDYILVYHHKRPSGNRTLVRRVQHSDTPSGARSVKQDHPLPGKGASLDAGSGEPPMDYHEDDKRFRREEYEGNLLEAGLELERDEDTKIHGVGFVKIHAPWNVLCREAEFLKLKMPTKKMYHINETRGLLKKINSVLQKITDPIQPKVAEHRPQTMKRLSYPFSREKQHLFDLSDKDSFFDSKTRSTIVYEILKRTTCTKAKYSMGITSLLANGVYAAAYPLHDGDYNGENVEFNDRKLLYEEWARYGVFYKYQPIDLVRKYFGEKIGLYFAWLGVYTQMLIPASIVGIIVFLYGCATMDENIPSMEMCDQRHNITMCPLCDKTCSYWKMSSACATARASHLFDNPATVFFSVFMALWAATFMEHWKRKQMRLNYRWDLTGFEEEEDHPRAEYEARVLEKSLKKESRNKETDKVKLTWRDRFPAYLTNLVSIIFMIAVTFAIVLGVIIYRISMAAALAMNSSPSVRSNIRVTVTATAVIINLVVIILLDEVYGCIARWLTKIEVPKTEKSFEERLIFKAFLLKFVNSYTPIFYVAFFKGRFVGRPGDYVYIFRSFRMEEVTEILFISGSPFCLAYDLSTPCTWEKQLQHICSAKSSRFLSFLLETFLFP

SEQ ID NO: 1694 - protein, 740 aa, Artificial Sequence
  Synthetic polypeptide
SQHFGRPRWADRLRPGVQDQPRQHRDYIPVEGELLFQPGEAWKELQVKLLELQEVDSLLRGRQVRRFHVQLSNPKFGAHLGQPHSTTIIIRDPDELDRSFTSQMLSSQPPPHGDLGAPQNPNAKAAGSRKIHFNWLPPSGKPMGYRVKYWIQGDSESEAHLLDSKVPSVELTNLYPYCDYEMKVCAYGAQGEGPYSSLVSCRTHQEVPSEPGRLAFNVVSSTVTQLSWAEPAETNGEITAYEVCYGLVNDDNRPIGPMKKVLVDNPKNRMLLIENLRESQPYRYTVKARNGAGWGPEREAIINLATQPKRPMSIPIIPDIPIVDAQSGEDYDSFLMYSDDVLRSPSGSQRPSVSDDTEHLVNGRMDFAFPGSTNSLHRMTTTSAAAYGTHLSPHVPHRVLSTSSTLTRDYNSLTRSEHSHSTTLPRDYSTLTSVSSHDSRLTAGVPDTPTRLVFSALGPTSLRVSWQEPRCERPLQGYSVEYQLLNGGELHRLNIPNPAQTSVVVEDLLPNHSYVFRVRAQSQEGWGREREGVITIESQVHPQSPLCPLPGSAFTLSTPSAPGPLVFTALSPDSLQLSWERPRRPNGDIVGYLVTCEMAQGGGPATAFRVDGDSPESRLTVPGLSENVPYKFKVQARTTEGFGPEREGIITIESQDGGPFPQLGSRAGLFQHPLQSEYSSITTTHTSATEPFLVDGLTLGAQHLEAGGSLTRHVTQEFVSRTLTTSGTLSTHMDQQFFQT

SEQ ID NO: 1695 - protein, 740 aa, Artificial Sequence; identical to SEQ ID NO: 1694
  Synthetic polypeptide

SEQ ID NO: 1696 - protein, 738 aa, Artificial Sequence
  Synthetic polypeptide
RSKESGLGVRLVEDLEELEKGLQVKLSNTEMSGAGDSEYITLADVEKKEREYSEQLIDNMEAFWKQMANIQHFLVDQFKCSSSKARQLMMTLTERMIAAEGLLCDSQELQALDALERTMGRAHMAKVIEFLKLQVQEETRCRLAAISHGLELLAGEGKLSGRQKEELLTQQHKAFWQEAERFSREFVQRGKDLVTASLAHQVEGTAKLTLAQEEEQRSFLAEAQPTADPEKFLEAFHEVLERQRLMQCDLEEEENVRATEAVVALCQELYFSTVDTFQKFVDALFLQTLPGMTGLPPEECDYLRQEVQENAAWQLGKSNRFRRQQWKLFQELLEQDQQVWMEECALSSVLQTHLREDHEGTIRGVLGRLGGLTEESTRCVLQGHDLLLRSALRRLALRGNALATLTQMRLSGKKHLLQELREQRALEQGSSQCLDEHQWQLLRALEARVLEEASRLEEEAQQTRLQLQQRLLAEAQEVGQLLQQHMECAIGQALLVHARNAATKSRAKDRDDFKRTLMEAAVESVYVTSAGVSRLVQAYYQQIGRIMEDHEERKLQHLKTLQGERMENYKLRKKQELSNPSSGSRTAGGAHETSQAVHQRMLSQQKRFLAQFPVHQQMRLHAQQQQAGVMDLLEAQLETQLQEAEQNFISELAALARVPLAESKLLPAKRGLLEKPLRTKRKKPLPQERGDLGVPNNEDLASGDQTSGSLSSKRLSQQESEAGDSGNSKKMLKRRSNL

SEQ ID NO: 1697 - protein, 738 aa, Artificial Sequence; identical to SEQ ID NO: 1696
  Synthetic polypeptide

SEQ ID NO: 1698 - protein, 736 aa, Artificial Sequence
  Synthetic polypeptide
LPGVQVHELVRGVKGVFLANQKIDGKVMTLITYNKGRDWDYLRPPSMDMNGKPTNCKPPDCHLHLHLRWADNPYVSGTVHTKDTAPGLIMGAGNLGSQLVEYKEEMYITSDCGHTWRQVFEEEHHILYLDHGGVIVAIKDTSIPLKILKFSVDEGLTWSTHNFTSTSVFVDGLLSEPGDETLVMTVFGHISFRSDWELVKVDFRPSFSRQCGEEDYSSWELSNLQGDRCIMGQQRSFRKRKSTSWCIKGRSFTSALTSRVCECRDSDFLCDYGFERSSSSESSTNKCSANFWFNPLSPPDDCALGQTYTSSLGYRKVVSNVCEGGVDMQQSQVQLQCPLTPPRGLQVSIQGEAVAVRPGEDVLFVVRQEQGDVLTTKYQVDLGDGFKAMYVNLTLTGEPIRHRYESPGIYRVSVRAENTAGHDEAVLFVQVNSPLQALYLEVVPVIGLNQEVNLTAVLLPLNPNLTVFYWWIGHSLQPLLSLDNSVTTRFSDTGDVRVTVQAACGNSVLQDSRVLRVLDQFQVMPLQFSKELDAYNPNTPEWREDVGLVVTRLLSKETSVPQELLVTVVKPGLPTLADLYVLLPPPRPTRKRSLSSDKRLAAIQQVLNAQKISFLLRGGVRVLVALRDTGTGAEQLGGGGGYWAVVVLFVIGLFAAGAFILYKFKSRKRPGRTVYAQMHNEKEQEMTSPVSHSEDVQGAVQGEEFIDDDLDSQTLGNHSGVVLSINSREMHSYLVS

SEQ ID NO: 1699 - protein, 736 aa, Artificial Sequence
  Synthetic polypeptide
GQEFETSLANRILMSEPGKLSQKIKVWLQEYWNITDLVAISTFMIGAILRLQNQPYMGYGRVIYCVDIIFWYIRVLDIFGVNKYLGPYVMMIGKMMIDMLYFVVIMLVVLMSFGVARQAILHPEEKPSWKLARNIFYMPYWMIYGEVFADQIDLYAMEINPPCGENLYDEEGKRLPPCIPGAWLTPALMACYLLVANILLVNLLIAVFNNTFFEVKSISNQVWKFQRYQLIMTFHDRPVLPPPMIILSHIYIIIMRLSGRCRKKREGDQEERDRGLKLFLSDEELKRLHEFEEQCVQEHFREKEDEQQSSSDERIRVTSERVENMSMRLEEINERETFMKTSLQTVDLRLAQLEELSNRMVNALENLAGIDRSDLIQARSRASSECEATYLLRQSSINSADGYSLYRYHFNGEELLFEDTSLSTSPGTGVRKKTCSFRIKEEKDVKTHLVPECQNSLHLSLGTSTSATPDGSHLAVDDLKNAEESKLGPDIGISKEDDERQTDSKKEETISPSLNKTDVIHGQDKSDVQNTQLTVETTNIEGTISYPLEETKITRYFPDETINACKTMKSRSFVYSRGRKLVGGVNQDVEYSSITDQQLTTEWQCQVQKITRSHSTDIPYIVSEAAVQAEHKEQFADMQDEHHVAEAIPRIPRLSLTITDRNGMENLLSVKPDQTLGFPSLRSKSLHGHPRNVKSIQGKLDRSGHASSVSSLVIVSGMTAEEKKVKKEKASTETEC

SEQ ID NO: 1700 - protein, 736 aa, Artificial Sequence; identical to SEQ ID NO: 1699
  Synthetic polypeptide

SEQ ID NO: 1701 - protein, 736 aa, Artificial Sequence; identical to SEQ ID NO: 1699
  Synthetic polypeptide

SEQ ID NO: 1702 - protein, 736 aa, Artificial Sequence; identical to SEQ ID NO: 1699
  Synthetic polypeptide

SEQ ID NO: 1703 - protein, 734 aa, Artificial Sequence
  Synthetic polypeptide
RSFCGLHQTAEIRVETACAQGTFKPLSGEGSCQPCPANSHSNTIGSAVCQCRVGYFRARTDPRGAPCTTPPSAPRSVVSRLNGSSLHLEWSAPLESGGREDLTYALRCRECRPGGSCAPCGGDLTFDPGPRDLVEPWVVVRGLRPDFTYTFEVTALNGVSSLATGPVPFEPVNVTTDREVPPAVSDIRVTRSSPSSLSLAWAVPRAPSGAVLDYEVKYHEKGAEGPSSVRFLKTSENRAELRGLKRGASYLVQVRARSEAGYGPFGQEHHSQTQLDESEGWREQLALIAGTAVVGVVLVLVVIVVAVLCLRKQSNGREAEYSDKHGQYLIGHGTKVYIDPFTYEDPNEAVREFAKEIDVSYVKIEEVIGAGEFGEVCRGRLKAPGKKESCVAIKTLKGGYTERQRREFLSEASIMGQFEHPNIIRLEGVVTNSMPVMILTEFMENGALDSFLRLNDGQFTVIQLVGMLRGIASGMRYLAEMSYVHRDLAARNILVNSNLVCKVSDFGLSRFLEENSSDPTYTSSLGGKIPIRWTAPEAIAFRKFTSASDAWSYGIVMWEVMSFGERPYWDMSNQDVINAIEQDYRLPPPPDCPTSLHQLMLDCWQKDRNARPRFPQVVSALDKMIRNPASLKIVARENGGASHPLLDQRQPHYSAFGSVGEWLRAIKMGRYEESFAAAGFGSFELVSQISAEDLLRIGVTLAGHQKKILASVQHMKSQAKPGTPGGTGGPAPQY

SEQ ID NO: 1704 - protein, 728 aa, Artificial Sequence
  Synthetic polypeptide
WLTPVIPALWEAKDYIPVEGELLFQPGEAWKELQVKLLELQEVDSLLRGRQVRRFHVQLSNPKFGAHLGQPHSTTIIIRDPDELDRSFTSQMLSSQPPPHGDLGAPQNPNAKAAGSRKIHFNWLPPSGKPMGYRVKYWIQGDSESEAHLLDSKVPSVELTNLYPYCDYEMKVCAYGAQGEGPYSSLVSCRTHQEVPSEPGRLAFNVVSSTVTQLSWAEPAETNGEITAYEVCYGLVNDDNRPIGPMKKVLVDNPKNRMLLIENLRESQPYRYTVKARNGAGWGPEREAIINLATQPKRPMSIPIIPDIPIVDAQSGEDYDSFLMYSDDVLRSPSGSQRPSVSDDTEHLVNGRMDFAFPGSTNSLHRMTTTSAAAYGTHLSPHVPHRVLSTSSTLTRDYNSLTRSEHSHSTTLPRDYSTLTSVSSHDSRLTAGVPDTPTRLVFSALGPTSLRVSWQEPRCERPLQGYSVEYQLLNGGELHRLNIPNPAQTSVVVEDLLPNHSYVFRVRAQSQEGWGREREGVITIESQVHPQSPLCPLPGSAFTLSTPSAPGPLVFTALSPDSLQLSWERPRRPNGDIVGYLVTCEMAQGGGPATAFRVDGDSPESRLTVPGLSENVPYKFKVQARTTEGFGPEREGIITIESQDGGPFPQLGSRAGLFQHPLQSEYSSITTTHTSATEPFLVDGLTLGAQHLEAGGSLTRHVTQEFVSRTLTTSGTLSTHMDQQFFQT

SEQ ID NO: 1705 - protein, 728 aa, Artificial Sequence; identical to SEQ ID NO: 1704
  Synthetic polypeptide

SEQ ID NO: 1706 - protein, 728 aa, Artificial Sequence
  Synthetic polypeptide
ACPVEHPCGGLRPAWATQIQRVLPGPAGEVPQVPDKETKATMGTENTPGGKASPDPQDVRPSVFHNIKLFVLCHSLLQLAQLMISGYLKSSISTVEKRFGLSSQTSGLLASFNEVGNTALIVFVSYFGSRVHRPRMIGYGAILVALAGLLMTLPHFISEPYRYDNTSPEDMPQDFKASLCLPTTSAPASAPSNGNCSSYTETQHLSVVGIMFVAQTLLGVGGVPIQPFGISYIDDFAHNSNSPLYLGILFAVTMMGPGLAFGLGSLMLRLYVDINQMPEGGISLTIKDPRWVGAWWLGFLIAAGAVALAAIPYFFFPKEMPKEKRELQFRRKVLAVTDSPARKGKDSPSKQSPGESTKKQDGLVQIAPNLTVIQFIKVFPRVLLQTLRHPIFLLVVLSQVCLSSMAAGMAIFLPKFLERQFSITASYANLLIGCLSFPSVIVGIVVGGVLVKRLHLGPVGCGALCLLGMLLCLFFSLPLFFIGCSSHQIAGITHQTSAHPGLELSPSCMEACSCPLDGFNPVCDPSTRVEYITPCHAGCSSWVVQDALDNSQVFYTNCSCVVEGNPVLAGSCDSTCSHLVVPFLLLVSLGSALACLTHTPSFMLILRGVKKEDKTLAVGIQFMFLRILAWMPSPVIHGSAIDTTCVHWALSCGRRAVCRYYNNDLLRNRFIGLQFFFKTGSVICFALVLAVLRQQDKEARTKESRSSPAVEQQLLVSGPGKKPEDSRV

SEQ ID NO: 1707 - protein, 728 aa, Artificial Sequence
  Synthetic polypeptide
GKRLFYLQDTKSSNGTFINSQRLSRGSEESPPCEILSGDIIQFGVDVTENTRKVTHGCIVSTIKLFLPDGMEARLRSDVIHAPLPSPVDKVAANTPSMYSQELFQLSQYLQEALHREQMLEQKLATLQRLLAITQEASDTSWQALIDEDRLLSRLEVMGNQLQACSKNQTEDSLRKELIALQEDKHNYETTAKESLRRVLQEKIEVVRKLSEVERSLSNTEDECTHLKEMNERTQEELRELANKYNGAVNEIKDLSDKLKVAEGKQEEIQQKGQAEKKELQHKIDEMEEKEQELQAKIEALQADNDFTNERLTALQEKLIVEGHLTKAVEETKLSKENQTRAKESDFSDTLSPSKEKSSDDTTDAQMDEQDLNEPLAKVSLLKDDLQGAQSEIEAKQEIQHLRKELIEAQELARTSKQKCFELQALLEEERKAYRNQVEESTKQIQVLQAQLQRLHIDTENLREEKDSEITSTRDELLSARDEILLLHQAAAKVASERDTDIASLQEELKKVRAELERWRKAASEYEKEITSLQNSFQLRCQQCEDQQREEATRLQGELEKLRKEWNALETECHSLKRENVLLSSELQRQEKELHNSQKQSLELTSDLSILQMSRKELENQVGSLKEQHLRDSADLKTLLSKAENQAKDVQKEYEKTQTVLSELKLKFEMTEQEKQSITDELKQCKNNLKLLREKGNNKPWPWMPMLAALVAVTAIVLYVPGLARASP

SEQ ID NO: 1708 - protein, 725 aa, Artificial Sequence
  Synthetic polypeptide
LATAQDLNITCRFAGVFHVEKNGRYSISRTEAADLCKAFNSTLPTMAQMEKALSIGFETCRYGFIEGHVVIPRIHPNSICAANNTGVYILTSNTSQYDTYCFNASAPPEEDCTSVTDLPNAFDGPITITIVNRDGTRYVQKGEYRTNPEDIYPSNPTDDDVSSGSSSERSSTSGGYIFYTFSTVHPIPDEDSPWITDSTDRIPATTLMSTSATATETATKRQETWDWFSWLFLPSESKNHLHTTTQMAGTSSNTISAGWEPNEENEDERDRHLSFSGSGIDDDEDFISSTISTTPRAFDHTKQNQDWTQWNPSHSNPEVLLQTTTRMTDVDRNGTTAYEGNWNPEAHPPLIHHEHHEEEETPHSTSTIQATPSSTTEETATQKEQWFGNRWHEGYRQTPKEDSHSTTGTAAASAHTSHPMQGRTTPSPEDSSWTDFFNPISHPMGRGHQAGRRMDMDSSHSITLQPTANPNTGLVEDLDRTGPLSMTTQQSNSQSFSTSHEGLEEDKDHPTTSTLTSSNRNDVTGGRRDPNHSEGSTTLLEGYTSHYPHTKESRTFIPVTSAKTGSFGVTAVTVGDSNSNVNRSLSGDQDTFHPSGGSHTTHGSESDGHSHGSQEGGANTTSGPIRTPQIPEWLIILASLLALALILAVCIAVNSRRRCGQKKKLVINSGNGAVEDRKPSGLNGEASKSQEMVHLVNKESSETPDQFMTADETRNLQNVDMKIGV

SEQ ID NO: 1709 - protein, 725 aa, Artificial Sequence
  Synthetic polypeptide
KQGFLSPLFKAVSLRMAPKYTYSLGMSHPLYLCNASDDDNLEPGFISIVKLESPRRAPRPCLSLASKARMAGERGASAVLFDITEDRAAAEQLQQPLGLTWPVVLIWGNDAEKLMEFVYKNQKAHVRIELKEPPAWPDYDVWILMTVVGTIFVIILASVLRIRCRPRHSRPDPLQQRTAWAISQLATRRYQASCRQARGEWPDSGSSCSSAPVCAICLEEFSEGQELRVISCLHEFHRNCVDPWLHQHRTCPLCMFNITEGDSFSQSLGPSRSYQEPGRRLHLIRQHPGHAHYHLPAAYLLGPSRSAVARPPRPGPFLPSQEPGMGPRHHRFPRAAHPRAPGEQQRLAGAQHPYAQGWGLSHLQSTSQHPAACPVPLRRARPPDSSGSGESYCTERSGYLADGPASDSSSGPCHGSSSDSVVNCTDISLQGVHGSSSTFCSSLSSDFDPLVYCSPKGDPQRVDMQPSVTSRPRSLDSVVPTGETQVSSHVHYHRHRHHHYKKRFQWHGRKPGPETGVPQSRPPIPRTQPQPEPPSPDQQVTRSNSAAPSGRLSNPQCPRALPEPAPGPVDASSICPSTSSLFNLQKSSLSARHPQRKRRGGPSEPTPGSRPQDATVHPACQIFPHYTPSVAYPWSPEAHPLICGPPGLDKRLLPETPGPCYSNSQPVWLCLTPRQPLEPHPPGEGPSEWSSDTAEGRPCPYPHCQVLSAQPGSEEELEELCEQAV

SEQ ID NO: 1710 - protein, 725 aa, Artificial Sequence; identical to SEQ ID NO: 1709
  Synthetic polypeptide

SEQ ID NO: 1711 - protein, 725 aa, Artificial Sequence; identical to SEQ ID NO: 1709
  Synthetic polypeptide

SEQ ID NO: 1712 - protein, 724 aa, Artificial Sequence
  Synthetic polypeptide
VEYPKFKNPESEMLKNPKLFACQHDAQRKCSLEYFGFWTFRIPDAQPVYPELQITNVVEANQPVTIQNWCKRGRKQCKTHPHFVIPYRCLVGEFVSDALLVPDKCKFLHQERMDVCETHLHWHTVAKETCSEKSTNLHDYGMLLPCGIDKFRGVEFVCCPLAEESDNVDSADAEEDDSDVWWGGADTDYADGSEDKVVEVAEEEEVAEVEEEEADDDEDDEDGDEVEEEAEEPYEEATERTTSIATTTTTTTESVEEVVREVCSEQAETGPCRAMISRWYFDVTEGKCAPFFYGGCGGNRNNFDTEEYCMAVCGSAMSQSLLKTTQEPLARDPVKLPTTAASTPDAVDKYLETPGDENEHAHFQKAKERLEAKHRERMSQVMREWEEAERQAKNLPKADKKAVIQHFQEKVESLEQEAANERQQLVETHMARVEAMLNDRRRLALENYITALQAVPPRPRHVFNMLKKYVRAEQKDRQHTLKHFEHVRMVDPKKAAQIRSQVMTHLRVIYERMNQSLSLLYNVPAVAEEIQDEVDELLQKEQNYSDDVLANMISEPRISYGNDALMPSLTETKTTVELLPVNGEFSLDDLQPWHSFGADSVPANTENEGSGLTNIKTEEISEVKMDAEFRHDSGYEVHHQKLVFFAEDVGSNKGAIIGLMVGGVVIATVIVITLVMLKKKQYTSIHHGVVEVDAAVTPEERHLSKMQQNGYENPTYKFFEQMQN

SEQ ID NO: 1713 - protein, 724 aa, Artificial Sequence
  Synthetic polypeptide
ALDRDLNITCRFAGVFHVEKNGRYSISRTEAADLCKAFNSTLPTMAQMEKALSIGFETCRYGFIEGHVVIPRIHPNSICAANNTGVYILTSNTSQYDTYCFNASAPPEEDCTSVTDLPNAFDGPITITIVNRDGTRYVQKGEYRTNPEDIYPSNPTDDDVSSGSSSERSSTSGGYIFYTFSTVHPIPDEDSPWITDSTDRIPATTLMSTSATATETATKRQETWDWFSWLFLPSESKNHLHTTTQMAGTSSNTISAGWEPNEENEDERDRHLSFSGSGIDDDEDFISSTISTTPRAFDHTKQNQDWTQWNPSHSNPEVLLQTTTRMTDVDRNGTTAYEGNWNPEAHPPLIHHEHHEEEETPHSTSTIQATPSSTTEETATQKEQWFGNRWHEGYRQTPKEDSHSTTGTAAASAHTSHPMQGRTTPSPEDSSWTDFFNPISHPMGRGHQAGRRMDMDSSHSITLQPTANPNTGLVEDLDRTGPLSMTTQQSNSQSFSTSHEGLEEDKDHPTTSTLTSSNRNDVTGGRRDPNHSEGSTTLLEGYTSHYPHTKESRTFIPVTSAKTGSFGVTAVTVGDSNSNVNRSLSGDQDTFHPSGGSHTTHGSESDGHSHGSQEGGANTTSGPIRTPQIPEWLIILASLLALALILAVCIAVNSRRRCGQKKKLVINSGNGAVEDRKPSGLNGEASKSQEMVHLVNKESSETPDQFMTADETRNLQNVDMKIGV

SEQ ID NO: 1714 - protein, 724 aa, Artificial Sequence
  Synthetic polypeptide
LSPPPTGLHPLHPVHFSDLSSSISSSVWCFLIPHSNPSLSVLCTGWFIKSSNEATNITPKHNMKAFLDELKAENIKKFLYNFTQIPHLAGTEQNFQLAKQIQSQWKEFGLDSVELAHYDVLLSYPNKTHPNYISIINEDGNEIFNTSLFEPPPPGYENVSDIVPPFSAFSPQGMPEGDLVYVNYARTEDFFKLERDMKINCSGKIVIARYGKVFRGNKVKNAQLAGAKGVILYSDPADYFAPGVKSYPDGWNLPGGGVQRGNILNLNGAGDPLTPGYPANEYAYRRGIAEAVGLPSIPVHPIGYYDAQKLLEKMGGSAPPDSSWRGSLKVPYNVGPGFTGNFSTQKVKMHIHSTNEVTRIYNVIGTLRGAVEPDRYVILGGHRDSWVFGGIDPQSGAAVVHEIVRSFGTLKKEGWRPRRTILFASWDAEEFGLLGSTEWAEENSRLLQERGVAYINADSSIEGNYTLRVDCTPLMYSLVHNLTKELKSPDEGFEGKSLYESWTKKSPSPEFSGMPRISKLGSGNDFEVFFQRLGIASGRARYTKNWETNKFSGYPLYHSVYETYELVEKFYDPMFKYHLTVAQVRGGMVFELANSIVLPFDCRDYAVVLRKYADKIYSISMKHPQEMKTYSVSFDSLFSAVKNFTEIASKFSERLQDFDKSKHVIYAPSSHNKYAGESFPGIYDALFDIESKVDPSKAWGEVKRQIYVAAFTVQAAAETLSEVA

SEQ ID NO: 1715 - protein, 724 aa, Artificial Sequence; identical to SEQ ID NO: 1714
  Synthetic polypeptide

SEQ ID NO: 1716 - protein, 723 aa, Artificial Sequence
  Synthetic polypeptide
VEYPKFKNPESEMLKNPKLFACQHDAQRKCSLEYFGFWTFRIPDAQPVYPELQITNVVEANQPVTIQNWCKRGRKQCKTHPHFVIPYRCLVGEFVSDALLVPDKCKFLHQERMDVCETHLHWHTVAKETCSEKSTNLHDYGMLLPCGIDKFRGVEFVCCPLAEESDNVDSADAEEDDSDVWWGGADTDYADGSEDKVVEVAEEEEVAEVEEEEADDDEDDEDGDEVEEEAEEPYEEATERTTSIATTTTTTTESVEEVVREVCSEQAETGPCRAMISRWYFDVTEGKCAPFFYGGCGGNRNNFDTEEYCMAVCGSAIPTTAASTPDAVDKYLETPGDENEHAHFQKAKERLEAKHRERMSQVMREWEEAERQAKNLPKADKKAVIQHFQEKVESLEQEAANERQQLVETHMARVEAMLNDRRRLALENYITALQAVPPRPRHVFNMLKKYVRAEQKDRQHTLKHFEHVRMVDPKKAAQIRSQVMTHLRVIYERMNQSLSLLYNVPAVAEEIQDEVDELLQKEQNYSDDVLANMISEPRISYGNDALMPSLTETKTTVELLPVNGEFSLDDLQPWHSFGADSVPANTENEVEPVDARPAADRGLTTRPGSGLTNIKTEEISEVKMDAEFRHDSGYEVHHQKLVFFAEDVGSNKGAIIGLMVGGVVIATVIVITLVMLKKKQYTSIHHGVVEVDAAVTPEERHLSKMQQNGYENPTYKFFEQMQN

SEQ ID NO: 1717 - protein, 723 aa, Artificial Sequence; identical to SEQ ID NO: 1716
  Synthetic polypeptide

SEQ ID NO: 1718 - protein, 723 aa, Artificial Sequence
  Synthetic polypeptide
TQEVEVAVSQDHTTALQPGQQSEMPSQKLRAFALDLGGSTLEDPTDLEIVVVDQNDNRPAFLQEAFTGRVLEGAVPGTYVTRAEATDADDPETDNAALRFSILQQGSPELFSIDELTGEIRTVQVGLDREVVAVYNLTLQVADMSGDGLTATASAIITLDDINDNAPEFTRDEFFMEAIEAVSGVDVGRLEVEDRDLPGSPNWVARFTILEGDPDGQFTIRTDPKTNEGVLSIVKALDYESCEHYELKVSVQNEAPLQAAALRAERGQAKVRVHVQDTNEPPVFQENPLRTSLAEGAPPGTLVATFSARDPDTEQLQRLSYSKDYDPEDWLQVDAATGRIQTQHVLSPASPFLKGGWYRAIVLAQDDASQPRTATGTLSIEILEVNDHAPVLAPPPPGSLCSEPHQGPGLLLGATDEDLPPHGAPFHFQLSPRLPELGRNWSLSQVNVSHARLRPRHQVPEGLHRLSLLLRDSGQPPQQREQPLNVTVCRCGKDGVCLPGAAALLAGGTGLSLGALVIVLASALLLLVLVLLVALRARFWKQSRGKGLLHGPQDDLRDNVLNYDEQGGGEEDQDAYDISQLRHPTALSLPLGPPPLRRDAPQGRLHPQPPRVLPTSPLDIADFINDGLEAADSDPSVPPYDTALIYDYEGDGSVAGTLSSILSSQGDEDQDYDYLRDWGPRFARLADMYGHPCGLEYGARWDHQAREGLSPGALLPRHRGRTA

SEQ ID NO: 1719 - protein, 723 aa, Artificial Sequence
  Synthetic polypeptide
RRRRRAQSAAWAPGPRGLAAAGGRARGCGRRPSSSAPPQLGPWSWRGCRTVPLDALRTRCLCDRLSTFAILAQLSADANMEKATLPSVTLIVGCGVSSLTLLMLVIIYVSVWRYIRSERSVILINFCLSIISSNALILIGQTQTRNKVVCTLVAAFLHFFFLSSFCWVLTEAWQSYMAVTGHLRNRLIRKRFLCLGWGLPALVVAISVGFTKAKGYSTMNYCWLSLEGGLLYAFVGPAAAVVLVNMVIGILVFNKLVSKDGITDKKLKERAGASLWSSCVVLPLLALTWMSAVLAVTDRRSALFQILFAVFDSLEGFVIVMVHCILRREVQDAVKCRVVDRQEEGNGDSGGSFQNGHAQLMTDFEKDVDLACRSVLNKDIAACRTATITGTLKRPSLPEEEKLKLAHAKGPPTNFNSLPANVSKLHLHGSPRYPGGPLPDFPNHSLTLKRDKAPKSSFVGDGDIFKKLDSELSRAQEKALDTSYVILPTATATLRPKPKEEPKYSIHIDQMPQTRLIHLSTAPEASLPARSPPSRQPPSGGPPEAPPAQPPPPPPPPPPPPQQPLPPPPNLEPAPPSLGDPGEPAAHPGPSTGPSTKNENVATLSVSSLERRKSRYAELDFEKIMHTRKRHQDMFQDLNRKLQHAAEKDKEVLGPDSKPEKQQTPNKRPWESLRKAHGTPTWVKKELEPLQPSPLELRSVEWERSGATIPLVGQDIIDLQTEV

SEQ ID NO: 1720 - protein, 723 aa, Artificial Sequence; identical to SEQ ID NO: 1719
  Synthetic polypeptide

SEQ ID NO: 1721 - protein, 722 aa, Artificial Sequence
  Synthetic polypeptide
PRGHLEISGDIFGCHILGRRYWHLVGDGAGDLFIINENTGDIQATKRLDREEKPVYILRAQAINRRTGRPVEPESEFIIKIHDINDNEPIFTKEVYTATVPEMSDVGTFVVQVTATDADDPTYGNSAKVVYSILQGQPYFSVESETGIIKTALLNMDRENREQYQVVIQAKDMGGQMGGLSGTTTVNITLTDVNDNPPRFPQSTYQFKTPESSPPGTPIGRIKASDADVGENAEIEYSITDGEGLDMFDVITDQETQEGIITVKKLLDFEKKKVYTLKVEASNPYVEPRFLYLGPFKDSATVRIVVEDVDEPPVFSKLAYILQIREDAQINTTIGSVTAQDPDAARNPVKYSVDRHTDMDRIFNIDSGNGSIFTSKLLDRETLLWHNITVIATEINNPKQSSRVPLYIKVLDVNDNAPEFAEFYETFVCEKAKADQLIQTLHAVDKDDPYSGHQFSFSLAPEAASGSNFTIQDNKDNTAGILTRKNGYNRHEMSTYLLPVVISDNDYPVQSSTGTVTVRVCACDHHGNMQSCHAEALIHPTGLSTGALVAILLCIVILLVTVVLFAALRRQRKKEPLIISKEDIRDNIVSYNDEGGGEEDTQAFDIGTLRNPEAIEDNKLRRDIVPEALFLPRRTPTARDNTDVRDFINQRLKENDTDPTAPPYDSLATYAYEGTGSVADSLSSLESVTTDADQDYDYLSDWGPRFKKLADMYGGVDSDKDS

SEQ ID NO: 1722 - protein, 722 aa, Artificial Sequence
  Synthetic polypeptide
GVEGGGSGEGSRTCCVTVELVKALLNELASVKVNEVVRYEAGYVVCAVIAGLYLLLVPTAGLCFCCCRCHRRCGGRVKTEHKALACERAALMVFLLLTTLLLLIGVVCAFVTNQRTHEQMGPSIEAMPETLLSLWGLVSDVPQELQAVAQQFSLPQEQVSEELDGVGVSIGSAIHTQLRSSVYPLLAAVGSLGQVLQVSVHHLQTLNATVVELQAGQQDLEPAIREHRDRLLELLQEARCQGDCAGALSWARTLELGADFSQVPSVDHVLHQLKGVPEANFSSMVQEENSTFNALPALAAMQTSSVVQELKKAVAQQPEGVRTLAEGFPGLEAASRWAQALQEVEESSRPYLQEVQRYETYRWIVGCVLCSVVLFVVLCNLLGLNLGIWGLSARDDPSHPEAKGEAGARFLMAGVGLSFLFAAPLILLVFATFLVGGNVQTLVCQSWENGELFEFADTPGNLPPSMNLSQLLGLRKNISIHQAYQQCKEGAALWTVLQLNDSYDLEEHLDINQIQRPVVKTSMEQLAQELQGLAQAQDNSVLGQRLQEEAQGLRNLHQEKVVPQQSLVAKLNLSVRALESSAPNLQLETSDVLANVTYLKGELPAWAARILRNVSECFLAREMGYFSQYVAWVREEVTQRIATCQPLSGALDNSRVILCDMMADPWNAFWFCLAWCTFFLIPSIIFAVKTSKYFRPIRKRLSSTSSEETQLFHIPRVTSLKL

SEQ ID NO: 1723 - protein, 721 aa, Artificial Sequence
  Synthetic polypeptide
PSSVAQTCSRSALSERIAWAQEYKVTVYPELQITNVVEANQPVTIQNWCKRGRKQCKTHPHFVIPYRCLVGEFVSDALLVPDKCKFLHQERMDVCETHLHWHTVAKETCSEKSTNLHDYGMLLPCGIDKFRGVEFVCCPLAEESDNVDSADAEEDDSDVWWGGADTDYADGSEDKVVEVAEEEEVAEVEEEEADDDEDDEDGDEVEEEAEEPYEEATERTTSIATTTTTTTESVEEVVREVCSEQAETGPCRAMISRWYFDVTEGKCAPFFYGGCGGNRNNFDTEEYCMAVCGSAMSQSLLKTTQEPLARDPVKLPTTAASTPDAVDKYLETPGDENEHAHFQKAKERLEAKHRERMSQVMREWEEAERQAKNLPKADKKAVIQHFQEKVESLEQEAANERQQLVETHMARVEAMLNDRRRLALENYITALQAVPPRPRHVFNMLKKYVRAEQKDRQHTLKHFEHVRMVDPKKAAQIRSQVMTHLRVIYERMNQSLSLLYNVPAVAEEIQDEVDELLQKEQNYSDDVLANMISEPRISYGNDALMPSLTETKTTVELLPVNGEFSLDDLQPWHSFGADSVPANTENEVEPVDARPAADRGLTTRPGSGLTNIKTEEISEVKMDAEFRHDSGYEVHHQKLVFFAEDVGSNKGAIIGLMVGGVVIATVIVITLVMLKKKQYTSIHHGVVEVDAAVTPEERHLSKMQQNGYENPTYKFFEQMQN

SEQ ID NO: 1724 - protein, 721 aa, Artificial Sequence; identical to SEQ ID NO: 1723
  Synthetic polypeptide

SEQ ID NO: 1725 - protein, 721 aa, Artificial Sequence
  Synthetic polypeptide
VMTLSCEIPSSGSSWLKNSPTEHPVTPTPAPQRTTPFDCNFPLPTRILQNGPTPSPFPDSFSDSACLHPVGEFVSDALLVPDKCKFLHQERMDVCETHLHWHTVAKETCSEKSTNLHDYGMLLPCGIDKFRGVEFVCCPLAEESDNVDSADAEEDDSDVWWGGADTDYADGSEDKVVEVAEEEEVAEVEEEEADDDEDDEDGDEVEEEAEEPYEEATERTTSIATTTTTTTESVEEVVREVCSEQAETGPCRAMISRWYFDVTEGKCAPFFYGGCGGNRNNFDTEEYCMAVCGSAMSQSLLKTTQEPLARDPVKLPTTAASTPDAVDKYLETPGDENEHAHFQKAKERLEAKHRERMSQVMREWEEAERQAKNLPKADKKAVIQHFQEKVESLEQEAANERQQLVETHMARVEAMLNDRRRLALENYITALQAVPPRPRHVFNMLKKYVRAEQKDRQHTLKHFEHVRMVDPKKAAQIRSQVMTHLRVIYERMNQSLSLLYNVPAVAEEIQDEVDELLQKEQNYSDDVLANMISEPRISYGNDALMPSLTETKTTVELLPVNGEFSLDDLQPWHSFGADSVPANTENEVEPVDARPAADRGLTTRPGSGLTNIKTEEISEVKMDAEFRHDSGYEVHHQKLVFFAEDVGSNKGAIIGLMVGGVVIATVIVITLVMLKKKQYTSIHHGVVEVDAAVTPEERHLSKMQQNGYENPTYKFFEQMQN

SEQ ID NO: 1726 - protein, 721 aa, Artificial Sequence; identical to SEQ ID NO: 1725
  Synthetic polypeptide

SEQ ID NO: 1727 - protein, 721 aa, Artificial Sequence
  Synthetic polypeptide
LPGVQVHELVRGVKGVFLANQKIDGKVMTLITYNKGRDWDYLRPPSMDMNGKPTNCKPPDCHLHLHLRWADNPYVSGTVHTKDTAPGLIMGAGNLGSQLVEYKEEMYITSDCGHTWRQVFEEEHHILYLDHGGVIVAIKDTSIPLKILKFSVDEGLTWSTHNFTSTSVFVDGLLSEPGDETLVMTVFGHISFRSDWELVKVDFRPSFSRQCGEEDYSSWELSNLQGDRCIMGQQRSFRKRKSTSWCIKGRSFTSALTSRVCECRDSDFLCDYGFERSSSSESSTNKCSANFWFNPLSPPDDCALGQTYTSSLGYRKVVSNVCEGGVDMQQSQVQLQCPLTPPRGLQVSIQGEAVAVRPGEDVLFVVRQEQGDVLTTKYQVDLGDGFKAMYVNLTLTGEPIRHRYESPGIYRVSVRAENTAGHDEAVLFVQVNSPLQALYLEVVPVIGLNQEVNLTAVLLPLNPNLTVFYWWIGHSLQPLLSLDNSVTTRFSDTGDVRVTVQAACGNSVLQDSRVLRVLDQFQVMPLQFSKELDAYNPNTPEWREDVGLVVTRLLSKETSVPQELLVTVVKPGLPTLADLYVLLPPPRPTRKRSLSSDKRLAAIQQVLNAQKISFLLRGGVRVLVALRDTGTGAEQLGGGGGYWAVVVLFVIGLFAAGAFILYKFKRKRPGRTVYAQMHNEKEQEMTSPVSHSEDVQGAVQGNHSGVVLSINSREMHSYLVS

SEQ ID NO: 1728 - protein, 720 aa, Artificial Sequence
  Synthetic polypeptide
KLQNTHGASFSQARFAQRHGDEKGNDVRIILGQFDQNMAAKVFCCAYEENMYGSKYQWIIPGWYEPSWWEQVHTEANSSRCLRKNLLAAMEGYIGVDFEPLSSKQIKTISGKTPQQYEREYNNKRSGVGPSKFHGYAYDGIWVIAKTLQRAMETLHASSRHQRIQDFNYTDHTLGRIILNAMNETNFFGVTGQVVFRNGERMGTIKFTQFQDSREVKVGEYNAVADTLEIINDTIRFQGSEPPKDKTIILEQLRKISLPLYSILSALTILGMIMASAFLFFNIKNRNQKLIKMSSPYMNNLIILGGMLSYASIFLFGLDGSFVSEKTFETLCTVRTWILTVGYTTAFGAMFAKTWRVHAIFKNVKMKKKIIKDQKLLVIVGGMLLIDLCILICWQAVDPLRRTVEKYSMEPDPAGRDISIRPLLEHCENTHMTIWLGIVYAYKGLLMLFGCFLAWETRNVSIPALNDSKYIGMSVYNVGIMCIIGAAVSFLTRDQPNVQFCIVALVIIFCSTITLCLVFVPKLITLRTNPDAATQNRRFQFTQNQKKEDSKTSTSVTSVNQASTSRLEGLQSENHRLRMKITELDKDLEEVTMQLQDTPEKTTYIKQNHYQELNDILNLGNFTESTDGGKAILKNHLDQNPQLQWNTTEPSRTCKDPIEDINSPEHIQRRLSLQLPILHHAYLPSIGGVDASCVSPCVSPTASPRHRHVPPSFRVMVSGL

SEQ ID NO: 1729 - protein, 719 aa, Artificial Sequence
  Synthetic polypeptide
PSSVAQTCSRSALSERIAWAQEYKVYPELQITNVVEANQPVTIQNWCKRGRKQCKTHPHFVIPYRCLVGEFVSDALLVPDKCKFLHQERMDVCETHLHWHTVAKETCSEKSTNLHDYGMLLPCGIDKFRGVEFVCCPLAEESDNVDSADAEEDDSDVWWGGADTDYADGSEDKVVEVAEEEEVAEVEEEEADDDEDDEDGDEVEEEAEEPYEEATERTTSIATTTTTTTESVEEVVREVCSEQAETGPCRAMISRWYFDVTEGKCAPFFYGGCGGNRNNFDTEEYCMAVCGSAMSQSLLKTTQEPLARDPVKLPTTAASTPDAVDKYLETPGDENEHAHFQKAKERLEAKHRERMSQVMREWEEAERQAKNLPKADKKAVIQHFQEKVESLEQEAANERQQLVETHMARVEAMLNDRRRLALENYITALQAVPPRPRHVFNMLKKYVRAEQKDRQHTLKHFEHVRMVDPKKAAQIRSQVMTHLRVIYERMNQSLSLLYNVPAVAEEIQDEVDELLQKEQNYSDDVLANMISEPRISYGNDALMPSLTETKTTVELLPVNGEFSLDDLQPWHSFGADSVPANTENEVEPVDARPAADRGLTTRPGSGLTNIKTEEISEVKMDAEFRHDSGYEVHHQKLVFFAEDVGSNKGAIIGLMVGGVVIATVIVITLVMLKKKQYTSIHHGVVEVDAAVTPEERHLSKMQQNGYENPTYKFFEQMQN

SEQ ID NO: 1730 - protein, 719 aa, Artificial Sequence; identical to SEQ ID NO: 1729
  Synthetic polypeptide

SEQ ID NO: 1731 - protein, 718 aa, Artificial Sequence
  Synthetic polypeptide
GRERWLTPVIPALWEAKAGGSREKGSSSCNVRPACTDKDYFYTHTACDANGETQLMYKWAKPKICSEDLEGAVKLPASGVKTHCPPCNPGFFKTNNSTCQPCPYGSYSNGSDCTRCPAGTEPAVGFEYKWWNTLPTNMETTVLSGINFEYKGMTGWEVAGDHIYTAAGASDNDFMILTLVVPGFRPPQSVMADTENKEVARITFVFETLCSVNCELYFMVGVNSRTNTPVETWKGSKGKQSYTYIIEENTTTSFTWAFQRTTFHEASRKYTNDVAKIYSINVTNVMNGVASYCRPCALEASDVGSSCTSCPAGYYIDRDSGTCHSCPTNTILKAHQPYGVQACVPCGPGTKNNKIHSLCYNDCTFSRNTPTRTFNYNFSALANTVTLAGGPSFTSKGLKYFHHFTLSLCGNQGRKMSVCTDNVTDLRIPEGESGFSKSITAYVCQAVIIPPEVTGYKAGVSSQPVSLADRLIGVTTDMTLDGITSPAELFHLESLGIPDVIFFYRSNDVTQSCSSGRSTTIRVRCSPQKTVPGSLLLPGTCSDGTCDGCNFHFLWESAAACPLCSVADYHAIVSSCVAGIQKTTYVWREPKLCSGGISLPEQRVTICKTIDFWLKVGISAGTCTAILLTVLTCYFWKKNQKLEYKYSKLVMNATLKDCDLPAADSCAIMEGEDVEDDLIFTSKKSLFGKIKSFTSKRTPDGFDSVPLKTSSGGLDMDL

SEQ ID NO: 1732 - protein, 717 aa, Artificial Sequence
  Synthetic polypeptide
YYLQIIGWFIKSSNEATNITPKHNMKAFLDELKAENIKKFLYNFTQIPHLAGTEQNFQLAKQIQSQWKEFGLDSVELAHYDVLLSYPNKTHPNYISIINEDGNEIFNTSLFEPPPPGYENVSDIVPPFSAFSPQGMPEGDLVYVNYARTEDFFKLERDMKINCSGKIVIARYGKVFRGNKVKNAQLAGAKGVILYSDPADYFAPGVKSYPDGWNLPGGGVQRGNILNLNGAGDPLTPGYPANEYAYRRGIAEAVGLPSIPVHPIGYYDAQKLLEKMGGSAPPDSSWRGSLKVPYNVGPGFTGNFSTQKVKMHIHSTNEVTRIYNVIGTLRGAVEPDRYVILGGHRDSWVFGGIDPQSGAAVVHEIVRSFGTLKKEGWRPRRTILFASWDAEEFGLLGSTEWAEENSRLLQERGVAYINADSSIEGNYTLRVDCTPLMYSLVHNLTKELKSPDEGFEGKSLYESWTKKSPSPEFSGMPRISKLGSGNDFEVFFQRLGIASGRARYTKNWETNKFSGYPLYHSVYETYELVEKFYDPMFKYHLTVAQVRGGMVFELANSIVLPFDCRDYAVVLRKYADKIYSISMKHPQEMKTYSVSFDSLFSAVKNFTEIASKFSERLQDFDKSNPIVLRMMNDQLMFLERAFIDPLGLPDRPFYRHVIYAPSSHNKYAGESFPGIYDALFDIESKVDPSKAWGEVKRQIYVAAFTVQAAAETLSEVA

SEQ ID NO: 1733 - protein, 717 aa, Artificial Sequence; identical to SEQ ID NO: 1732
  Synthetic polypeptide

SEQ ID NO: 1734 - protein, 717 aa, Artificial Sequence
  Synthetic polypeptide
TQDLARTQGVNLGSVAPCLGFHVIPTISSIVPESCLLIVVGLLVGGLIKGVGETPPFLQSDVFFLFLLPPIILDAGYFLPLRQFTENLGTILIFAVVGTLWNAFFLGGLMYAVCLVGGEQINNIGLLDNLLFGSIISAVDPVAVLAVFEEIHINELLHILVFGESLLNDAVTVVLYHLFEEFANYEHVGIVDIFLGFLSFFVVALGGVLVGVVYGVIAAFTSRFTSHIRVIEPLFVFLYSYMAYLSAELFHLSGIMALIASGVVMRPYVEANISHKSHTTIKYFLKMWSSVSETLIFIFLGVSTVAGSHHWNWTFVISTLLFCLIARVLGVLGLTWFINKFRIVKLTPKDQFIIAYGGLRGAIAFSLGYLLDKKHFPMCDLFLTAIITVIFFTVFVQGMTIRPLVDLLAVKKKQETKRSINEEIHTQFLDHLLTGIEDICGHYGHHHWKDKLNRFNKKYVKKCLIAGERSKEPQLIAFYHKMEMKQAIELVESGGMGKIPSAVSTVSMQNIHPKSLPSERILPALSKDKEEEIRKILRNNLQKTRQRLRSYNRHTLVADPYEEAWNQMLLRRQKARQLEQKINNYLTVPAHKLDSPTMSRARIGSDPLAYEPKEDLPVITIDPASPQSPESVDLVNEELKGKVLGLSRDPAKVAEEDEDDDGGIMMRSKETSSPGTDDVFTPAPSDSPSSQRIQRCLSDPGPHPEPGEGEPFFPKGQ

SEQ ID NO: 1735 - protein, 715 aa, Artificial Sequence
  Synthetic polypeptide
GQAQWLTPVIPALWEAEAGGSPEYLVDCDEVIFMKEGCITERGTHEELMNLNGDYATIFNNLLLGETPPVEINSKKETSGSQKKSQDKGPKTGSVKKEKAVKPEEGQLVQLEEKGQGSVPWSVYGVYIQAAGGPLAFLVIMALFMLNVGSTAFSTWWLSYWIKQGSGNTTVTRGNETSVSDSMKDNPHMQYYASIYALSMAVMLILKAIRGVVFVKGTLRASSRLHDELFRRILRSPMKFFDTTPTGRILNRFSKDMDEVDVRLPFQAEMFIQNVILVFFCVGMIAGVFPWFLVAVGPLVILFSVLHIVSRVLIRELKRLDNITQSPFLSHITSSIQGLATIHAYNKGQEFLHRYQELLDDNQAPFFLFTCAMRWLAVRLDLISIALITTTGLMIVLMHGQIPPAYAGLAISYAVQLTGLFQFTVRLASETEARFTSVERINHYIKTLSLEAPARIKNKAPSPDWPQEGEVTFENAEMRYRENLPLVLKKVSFTIKPKEKIGIVGRTGSGKSSLGMALFRLVELSGGCIKIDGVRISDIGLADLRSKLSIIPQEPVLFSGTVRSNLDPFNQYTEDQIWDALERTHMKECIAQLPLKLESEVMENGDNFSVGERQLLCIARALLRHCKILILDEATAAMDTETDLLIQETIREAFADCTMLTIAHRLHTVLGSDRIMVLAQGQVVEFDTPSVLLSNDSSRFYAMFAAAENKVAVKG

SEQ ID NO: 1736 - protein, 715 aa, Artificial Sequence
  Synthetic polypeptide
QHRVKVKEDILWSPRNIGSYPSSASYYYCDYTSYLTSQSLSCLSCKVERRTGCDKGKWYMKKHSAWFMHFLPLANLECSPNIETFLCKAFVPTCIEQIHVVPPCRKLCEKVYSDCKKLIDTFGIRWPEELECDRLQYCDETVPVTFDPHTEFLGPQKKTEQVQRDIGFWCPRHLKTSGGQGYKFLGIDQCAPPCPNMYFKSDELEFAKSFIGTVSIFCLCATLFTFLTFLIDVRRFRYPERPIIYYSVCYSIVSLMYFIGFLLGDSTACNKADEKLELGDTVVLGSQNKACTVLFMLLYFFTMAGTVWWVILTITWFLAAGRKWSCEAIEQKAVWFHAVAWGTPGFLTVMLLAMNKVEGDNISGVCFVGLYDLDASRYFVLLPLCLCVFVGLSLLLAGIISLNHVRQVIQHDGRNQEKLKKFMIRIGVFSGLYLVPLVTLLGCYVYEQVNRITWEITWVSDHCRQYHIPCPYQAKAKARPELALFMIKYLMTLIVGISAVFWVGSKKTCTEWAGFFKRNRKRDPISESRRVLQESCEFFLKHNSKVKHKKKHYKPSSHKLKVISKSMGTSTGATANHGTSAVAITSHDYLGQETLTEIQTSPETSMREVKADGASTPRLREQDCGEPASPAASISRLSGEQVDGKGQAGSVSESARSEGRISPKSDITDTGLAQSNNLQVPSSSEPSSLKGSTSLLVHPVSGVRKEQGGGCHSDT

SEQ ID NO: 1737 - protein, 715 aa, Artificial Sequence; identical to SEQ ID NO: 1736
  Synthetic polypeptide

SEQ ID NO: 1738 - protein, 715 aa, Artificial Sequence; identical to SEQ ID NO: 1736
  Synthetic polypeptide

SEQ ID NO: 1739 - protein, 714 aa, Artificial Sequence
  Synthetic polypeptide
CGPLEEHWSEKWEACILVLILPLICHMTLKKLLIFSVPRFMHLYRGNNICPSRMAVRSIEPLDPSEKANKVLARIFKETELRKLKVLGSGVFGTVHKGVWIPEGESIKIPVCIKVIEDKSGRQSFQAVTDHMLAIGSLDHAHIVRLLGLCPGSSLQLVTQYLPLGSLLDHVRQHRGALGPQLLLNWGVQIAKGMYYLEEHGMVHRNLAARNVLLKSPSQVQVADFGVADLLPPDDKQLLYSEAKTPIKWMALESIHFGKYTHQSDVWSYGVTVWELMTFGAEPYAGLRLAEVPDLLEKGERLAQPQICTIDVYMVMVKCWMIDENIRPTFKELANEFTRMARDPPRYLVIKRESGPGIAPGPEPHGLTNKKLEEVELEPELDLDLDLEAEEDNLATTTLGSALSLPVGTLNRPRGSQSLLSPSSGYMPMNQGNLGESCQESAVSGSSERCPRPVSLHPMPRGCLASESSEGHVTGSEAELQEKVSMCRSRSRSRSPRPRGDSAYHSQRHSLLTPVTPLSPPGLEEEDVNGYVMPDTHLKGTPSSREGTLSSVGLSSVLGTEEEDEDEEYEYMNRRRRHSPPHPPRPSSLEELGYEYMDVGSDLSASLGSTQSCPLHPVPIMPTAGTTPDEDYEYMNRQRDGGGPGGDYAAMGACPASEQGYEEMRAFQGPGHQAPHVHYARLKTLRSLEATDSAFDNPDYWHSRLFPKANAQRT

SEQ ID NO: 1740 - protein, 714 aa, Artificial Sequence; identical to SEQ ID NO: 1739
  Synthetic polypeptide

SEQ ID NO: 1741 - protein, 714 aa, Artificial Sequence; identical to SEQ ID NO: 1739
  Synthetic polypeptide

SEQ ID NO: 1742 - protein, 713 aa, Artificial Sequence
  Synthetic polypeptide
PSSVAQTCSRSALSERIAWAQEYKITNVVEANQPVTIQNWCKRGRKQCKTHPHFVIPYRCLVGEFVSDALLVPDKCKFLHQERMDVCETHLHWHTVAKETCSEKSTNLHDYGMLLPCGIDKFRGVEFVCCPLAEESDNVDSADAEEDDSDVWWGGADTDYADGSEDKVVEVAEEEEVAEVEEEEADDDEDDEDGDEVEEEAEEPYEEATERTTSIATTTTTTTESVEEVVREVCSEQAETGPCRAMISRWYFDVTEGKCAPFFYGGCGGNRNNFDTEEYCMAVCGSAMSQSLLKTTQEPLARDPVKLPTTAASTPDAVDKYLETPGDENEHAHFQKAKERLEAKHRERMSQVMREWEEAERQAKNLPKADKKAVIQHFQEKVESLEQEAANERQQLVETHMARVEAMLNDRRRLALENYITALQAVPPRPRHVFNMLKKYVRAEQKDRQHTLKHFEHVRMVDPKKAAQIRSQVMTHLRVIYERMNQSLSLLYNVPAVAEEIQDEVDELLQKEQNYSDDVLANMISEPRISYGNDALMPSLTETKTTVELLPVNGEFSLDDLQPWHSFGADSVPANTENEVEPVDARPAADRGLTTRPGSGLTNIKTEEISEVKMDAEFRHDSGYEVHHQKLVFFAEDVGSNKGAIIGLMVGGVVIATVIVITLVMLKKKQYTSIHHGVVEVDAAVTPEERHLSKMQQNGYENPTYKFFEQMQN

SEQ ID NO: 1743 - protein, 713 aa, Artificial Sequence; identical to SEQ ID NO: 1742
  Synthetic polypeptide

SEQ ID NO: 1744 - protein, 713 aa, Artificial Sequence
  Synthetic polypeptide
GQEFETSLANMERRSLKERNPLKIFPSKRILRRHKRDWVVAPISVPENGKGPFPQRLNQLKSNKDRDTKIFYSITGPGADSPPEGVFAVEKETGWLLLNKPLDREEIAKYELFGHAVSENGASVEDPMNISIIVTDQNDHKPKFTQDTFRGSVLEGVLPGTSVMQVTATDEDDAIYTYNGVVAYSIHSQEPKDPHDLMFTIHRSTGTISVISSGLDREKVPEYTLTIQATDMDGDGSTTTAVAVVEILDANDNAPMFDPQKYEAHVPENAVGHEVQRLTVTDLDAPNSPAWRATYLIMGGDDGDHFTITTHPESNQGILTTRKGLDFEAKNQHTLYVEVTNEAPFVLKLPTSTATIVVHVEDVNEAPVFVPPSKVVEVQEGIPTGEPVCVYTAEDPDKENQKISYRILRDPAGWLAMDPDSGQVTAVGTLDREDEQFVRNNIYEVMVLAMDNGSPPTTGTGTLLLTLIDVNDHGPVPEPRQITICNQSPVRQVLNITDKDLSPHTSPFQAQLTDDSDIYWTAEVNEEGDTVVLSLKKFLKQDTYDVHLSLSDHGNKEQLTVIRATVCDCHGHVETCPGPWKGGFILPVLGAVLALLFLLLVLLLLVRKKRKIKEPLLLPEDDTRDNVFYYGEEGGGEEDQDYDITQLHRGLEARPEVVLRNDVAPTIIPTPMYRPRPANPDEIGNFIIEGRGERGSQRGNGGLQLARGRTRRS

SEQ ID NO: 1745 - protein, 713 aa, Artificial Sequence
  Synthetic polypeptide
HLESRHLKFGPAGEVPQVPDKETKATMGTENTPGGKASPDPQDVRPSVFHNIKLFVLCHSLLQLAQLMISGYLKSSISTVEKRFGLSSQTSGLLASFNEVGNTALIVFVSYFGSRVHRPRMIGYGAILVALAGLLMTLPHFISEPYRYDNTSPEDMPQDFKASLCLPTTSAPASAPSNGNCSSYTETQHLSVVGIMFVAQTLLGVGGVPIQPFGISYIDDFAHNSNSPLYLGILFAVTMMGPGLAFGLGSLMLRLYVDINQMPEGGISLTIKDPRWVGAWWLGFLIAAGAVALAAIPYFFFPKEMPKEKRELQFRRKVLAVTDSPARKGKDSPSKQSPGESTKKQDGLVQIAPNLTVIQFIKVFPRVLLQTLRHPIFLLVVLSQVCLSSMAAGMAIFLPKFLERQFSITASYANLLIGCLSFPSVIVGIVVGGVLVKRLHLGPVGCGALCLLGMLLCLFFSLPLFFIGCSSHQIAGITHQTSAHPGLELSPSCMEACSCPLDGFNPVCDPSTRVEYITPCHAGCSSWVVQDALDNSQVFYTNCSCVVEGNPVLAGSCDSTCSHLVVPFLLLVSLGSALACLTHTPSFMLILRGVKKEDKTLAVGIQFMFLRILAWMPSPVIHGSAIDTTCVHWALSCGRRAVCRYYNNDLLRNRFIGLQFFFKTGSVICFALVLAVLRQQDKEARTKESRSSPAVEQQLLVSGPGKKPEDSRV

SEQ ID NO: 1746 - protein, 707 aa, Artificial Sequence
  Synthetic polypeptide
TVSSIRAETVGISTAHTGPGTHPGLSEHLLNVCQGTSNKLTQLGTFEDHFLSLQRMFNNCEVVLGNLEITYVQRNYDLSFLKTIQEVAGYVLIALNTVERIPLENLQIIRGNMYYENSYALAVLSNYDANKTGLKELPMRNLQEILHGAVRFSNNPALCNVESIQWRDIVSSDFLSNMSMDFQNHLGSCQKCDPSCPNGSCWGAGEENCQKLTKIICAQQCSGRCRGKSPSDCCHNQCAAGCTGPRESDCLVCRKFRDEATCKDTCPPLMLYNPTTYQMDVNPEGKYSFGATCVKKCPRNYVVTDHGSCVRACGADSYEMEEDGVRKCKKCEGPCRKVCNGIGIGEFKDSLSINATNIKHFKNCTSISGDLHILPVAFRGDSFTHTPPLDPQELDILKTVKEITGFLLIQAWPENRTDLHAFENLEIIRGRTKQHGQFSLAVVSLNITSLGLRSLKEISDGDVIISGNKNLCYANTINWKKLFGTSGQKTKIISNRGENSCKATGQVCHALCSPEGCWGPEPRDCVSCRNVSRGRECVDKCNLLEGEPREFVENSECIQCHPECLPQAMNITCTGRGPDNCIQCAHYIDGPHCVKTCPAGVMGENNTLVWKYADAGHVCHLCHPNCTYGPGNESLKAMLFCLFKLSSCNQSNDGSVSHQSGSPAAQESCLGWIPSLLPSEFQLGWGGCSHLHAWPSASVIITASSCH

SEQ ID NO: 1747 - protein, 706 aa, Artificial Sequence
  Synthetic polypeptide
LQCCLHIGDAPILVGNPFTCSCDIMWIKTLQEAKSSPDTQDLYCLNESSKNIPLANLQIPNCGLPSANLAAPNLTVEEGKSITLSCSVAGDPVPNMYWDVGNLVSKHMNETSHTQGSLRITNISSDDSGKQISCVAENLVGEDQDSVNLTVHFAPTITFLESPTSDHHWCIPFTVKGNPKPALQWFYNGAILNESKYICTKIHVTNHTEYHGCLQLDNPTHMNNGDYTLIAKNEYGKDEKQISAHFMGWPGIDDGANPNYPDVIYEDYGTAANDIGDTTNRSNEIPSTDVTDKTGREHLSVYAVVVIASVVGFCLLVMLFLLKLARHSKFGMKDFSWFGFGKVKSRQGVGPASVISNDDDSASPLHHISNGSNTPSSSEGGPDAVIIGMTKIPVIENPQYFGITNSQLKPDTFVQHIKRHNIVLKRELGEGAFGKVFLAECYNLCPEQDKILVAVKTLKDASDNARKDFHREAELLTNLQHEHIVKFYGVCVEGDPLIMVFEYMKHGDLNKFLRAHGPDAVLMAEGNPPTELTQSQMLHIAQQIAAGMVYLASQHFVHRDLATRNCLVGENLLVKIGDFGMSRDVYSTDYYRVGGHTMLPIRWMPPESIMYRKFTTESDVWSLGVVLWEIFTYGKQPWYQLSNNEVIECITQGRVLQRPRTCPQEVYELMLGCWQREPHMRKNIKGIHTLLQNLAKASPVYLDILG

SEQ ID NO: 1748 - protein, 706 aa, Artificial Sequence; identical to SEQ ID NO: 1747
  Synthetic polypeptide

SEQ ID NO: 1749 - protein, 705 aa, Artificial Sequence
  Synthetic polypeptide
EQPGQRGLNKTSSFSCEAHNAKGVTTSRTATITVLPQQPRNLHLVSRQPTELEVAWTPGLSGIYPLTHCTLQAVLSNDGMGIQAGEPDPPEEPLTSQASVPPHQLRLGSLHPHTPYHIRVACTSSQGPSSWTHWLPVETPEGVPLGPPENISATRNGSQAFVHWQEPRAPLQGTLLGYRLAYQGQDTPEVLMDIGLRQEVTLELQGDGSVSNLTVCVAAYTAAGDGPWSLPVPLEAWRPGQAQPVHQLVKEPSTPAFSWPWWYVLLGAVVAAACVLILALFLVHRRKKETRYGEVFEPTVERGELVVRYRVRKSYSRRTTEATLNSLGISEELKEKLRDVMVDRHKVALGKTLGEGEFGAVMEGQLNQDDSILKVAVKTMKIAICTRSELEDFLSEAVCMKEFDHPNVMRLIGVCFQGSERESFPAPVVILPFMKHGDLHSFLLYSRLGDQPVYLPTQMLVKFMADIASGMEYLSTKRFIHRDLAARNCMLNENMSVCVADFGLSKKIYNGDYYRQGRIAKMPVKWIAIESLADRVYTSKSDVWSFGVTMWEIATRGQTPYPGVENSEIYDYLRQGNRLKQPADCLDGLYALMSRCWELNPQDRPSFTELREDLENTLKALPPAQEPDEILYVNMDEGGGYPEPPGAAGGADPPTQPDPKDSCSCLTAAEVHPAGRYVLCPSTTPSPAQPADRGSPAAPGQEDGA

SEQ ID NO: 1750 - protein, 703 aa, Artificial Sequence
  Synthetic polypeptide
PSSVAQTCSRSALSERIAWAQEYKVTVYPELQITNVVEANQPVTIQNWCKRGRKQCKTHPHFVIPYRCLVGEFVSDALLVPDKCKFLHQERMDVCETHLHWHTVAKETCSEKSTNLHDYGMLLPCGIDKFRGVEFVCCPLAEESDNVDSADAEEDDSDVWWGGADTDYADGSEDKVVEVAEEEEVAEVEEEEADDDEDDEDGDEVEEEAEEPYEEATERTTSIATTTTTTTESVEEVVREVCSEQAETGPCRAMISRWYFDVTEGKCAPFFYGGCGGNRNNFDTEEYCMAVCGSAMSQSLLKTTQEPLARDPVKLPTTAASTPDAVDKYLETPGDENEHAHFQKAKERLEAKHRERMSQVMREWEEAERQAKNLPKADKKAVIQHFQEKVESLEQEAANERQQLVETHMARVEAMLNDRRRLALENYITALQAVPPRPRHVFNMLKKYVRAEQKDRQHTLKHFEHVRMVDPKKAAQIRSQVMTHLRVIYERMNQSLSLLYNVPAVAEEIQDEVDELLQKEQNYSDDVLANMISEPRISYGNDALMPSLTETKTTVELLPVNGEFSLDDLQPWHSFGADSVPANTENEGSGLTNIKTEEISEVKMDAEFRHDSGYEVHHQKLVFFAEDVGSNKGAIIGLMVGGVVIATVIVITLVMLKKKQYTSIHHGVVEVDAAVTPEERHLSKMQQNGYENPTYKFFEQMQN

SEQ ID NO: 1751 - protein, 703 aa, Artificial Sequence
  Synthetic polypeptide
VMTLSCEIPSSGSSWLKNSPTEHPVTPTPAPQRTTPFDCNFPLPTRILQNGPTPSPFPDSFSDSACLHPVGEFVSDALLVPDKCKFLHQERMDVCETHLHWHTVAKETCSEKSTNLHDYGMLLPCGIDKFRGVEFVCCPLAEESDNVDSADAEEDDSDVWWGGADTDYADGSEDKVVEVAEEEEVAEVEEEEADDDEDDEDGDEVEEEAEEPYEEATERTTSIATTTTTTTESVEEVVREVCSEQAETGPCRAMISRWYFDVTEGKCAPFFYGGCGGNRNNFDTEEYCMAVCGSAMSQSLLKTTQEPLARDPVKLPTTAASTPDAVDKYLETPGDENEHAHFQKAKERLEAKHRERMSQVMREWEEAERQAKNLPKADKKAVIQHFQEKVESLEQEAANERQQLVETHMARVEAMLNDRRRLALENYITALQAVPPRPRHVFNMLKKYVRAEQKDRQHTLKHFEHVRMVDPKKAAQIRSQVMTHLRVIYERMNQSLSLLYNVPAVAEEIQDEVDELLQKEQNYSDDVLANMISEPRISYGNDALMPSLTETKTTVELLPVNGEFSLDDLQPWHSFGADSVPANTENEGSGLTNIKTEEISEVKMDAEFRHDSGYEVHHQKLVFFAEDVGSNKGAIIGLMVGGVVIATVIVITLVMLKKKQYTSIHHGVVEVDAAVTPEERHLSKMQQNGYENPTYKFFEQMQN

SEQ ID NO: 1752 - protein, 702 aa, Artificial Sequence
  Synthetic polypeptide
PSSVAQTCSRSALSERIAWAQEYKVTVYPELQITNVVEANQPVTIQNWCKRGRKQCKTHPHFVIPYRCLVGEFVSDALLVPDKCKFLHQERMDVCETHLHWHTVAKETCSEKSTNLHDYGMLLPCGIDKFRGVEFVCCPLAEESDNVDSADAEEDDSDVWWGGADTDYADGSEDKVVEVAEEEEVAEVEEEEADDDEDDEDGDEVEEEAEEPYEEATERTTSIATTTTTTTESVEEVVREVCSEQAETGPCRAMISRWYFDVTEGKCAPFFYGGCGGNRNNFDTEEYCMAVCGSAIPTTAASTPDAVDKYLETPGDENEHAHFQKAKERLEAKHRERMSQVMREWEEAERQAKNLPKADKKAVIQHFQEKVESLEQEAANERQQLVETHMARVEAMLNDRRRLALENYITALQAVPPRPRHVFNMLKKYVRAEQKDRQHTLKHFEHVRMVDPKKAAQIRSQVMTHLRVIYERMNQSLSLLYNVPAVAEEIQDEVDELLQKEQNYSDDVLANMISEPRISYGNDALMPSLTETKTTVELLPVNGEFSLDDLQPWHSFGADSVPANTENEVEPVDARPAADRGLTTRPGSGLTNIKTEEISEVKMDAEFRHDSGYEVHHQKLVFFAEDVGSNKGAIIGLMVGGVVIATVIVITLVMLKKKQYTSIHHGVVEVDAAVTPEERHLSKMQQNGYENPTYKFFEQMQN

SEQ ID NO: 1753 - protein, 702 aa, Artificial Sequence; identical to SEQ ID NO: 1752
  Synthetic polypeptide

SEQ ID NO: 1754 - protein, 702 aa, Artificial Sequence
  Synthetic polypeptide
VMTLSCEIPSSGSSWLKNSPTEHPVTPTPAPQRTTPFDCNFPLPTRILQNGPTPSPFPDSFSDSACLHPVGEFVSDALLVPDKCKFLHQERMDVCETHLHWHTVAKETCSEKSTNLHDYGMLLPCGIDKFRGVEFVCCPLAEESDNVDSADAEEDDSDVWWGGADTDYADGSEDKVVEVAEEEEVAEVEEEEADDDEDDEDGDEVEEEAEEPYEEATERTTSIATTTTTTTESVEEVVREVCSEQAETGPCRAMISRWYFDVTEGKCAPFFYGGCGGNRNNFDTEEYCMAVCGSAIPTTAASTPDAVDKYLETPGDENEHAHFQKAKERLEAKHRERMSQVMREWEEAERQAKNLPKADKKAVIQHFQEKVESLEQEAANERQQLVETHMARVEAMLNDRRRLALENYITALQAVPPRPRHVFNMLKKYVRAEQKDRQHTLKHFEHVRMVDPKKAAQIRSQVMTHLRVIYERMNQSLSLLYNVPAVAEEIQDEVDELLQKEQNYSDDVLANMISEPRISYGNDALMPSLTETKTTVELLPVNGEFSLDDLQPWHSFGADSVPANTENEVEPVDARPAADRGLTTRPGSGLTNIKTEEISEVKMDAEFRHDSGYEVHHQKLVFFAEDVGSNKGAIIGLMVGGVVIATVIVITLVMLKKKQYTSIHHGVVEVDAAVTPEERHLSKMQQNGYENPTYKFFEQMQN

SEQ ID NO: 1755 - protein, 702 aa, Artificial Sequence; identical to SEQ ID NO: 1754
  Synthetic polypeptide

SEQ ID NO: 1756 - protein, 701 aa, Artificial Sequence
  Synthetic polypeptide
PSSVAQTCSRSALSERIAWAQEYKVYPELQITNVVEANQPVTIQNWCKRGRKQCKTHPHFVIPYRCLVGEFVSDALLVPDKCKFLHQERMDVCETHLHWHTVAKETCSEKSTNLHDYGMLLPCGIDKFRGVEFVCCPLAEESDNVDSADAEEDDSDVWWGGADTDYADGSEDKVVEVAEEEEVAEVEEEEADDDEDDEDGDEVEEEAEEPYEEATERTTSIATTTTTTTESVEEVVREVCSEQAETGPCRAMISRWYFDVTEGKCAPFFYGGCGGNRNNFDTEEYCMAVCGSAMSQSLLKTTQEPLARDPVKLPTTAASTPDAVDKYLETPGDENEHAHFQKAKERLEAKHRERMSQVMREWEEAERQAKNLPKADKKAVIQHFQEKVESLEQEAANERQQLVETHMARVEAMLNDRRRLALENYITALQAVPPRPRHVFNMLKKYVRAEQKDRQHTLKHFEHVRMVDPKKAAQIRSQVMTHLRVIYERMNQSLSLLYNVPAVAEEIQDEVDELLQKEQNYSDDVLANMISEPRISYGNDALMPSLTETKTTVELLPVNGEFSLDDLQPWHSFGADSVPANTENEGSGLTNIKTEEISEVKMDAEFRHDSGYEVHHQKLVFFAEDVGSNKGAIIGLMVGGVVIATVIVITLVMLKKKQYTSIHHGVVEVDAAVTPEERHLSKMQQNGYENPTYKFFEQMQN

SEQ ID NO: 1757 - protein, 701 aa, Artificial Sequence
  Synthetic polypeptide
SLTGFHVIPTISSIVPESCLLIVVGLLVGGLIKGVGETPPFLQSDVFFLFLLPPIILDAGYFLPLRQFTENLGTILIFAVVGTLWNAFFLGGLMYAVCLVGGEQINNIGLLDNLLFGSIISAVDPVAVLAVFEEIHINELLHILVFGESLLNDAVTVVLYHLFEEFANYEHVGIVDIFLGFLSFFVVALGGVLVGVVYGVIAAFTSRFTSHIRVIEPLFVFLYSYMAYLSAELFHLSGIMALIASGVVMRPYVEANISHKSHTTIKYFLKMWSSVSETLIFIFLGVSTVAGSHHWNWTFVISTLLFCLIARVLGVLGLTWFINKFRIVKLTPKDQFIIAYGGLRGAIAFSLGYLLDKKHFPMCDLFLTAIITVIFFTVFVQGMTIRPLVDLLAVKKKQETKRSINEEIHTQFLDHLLTGIEDICGHYGHHHWKDKLNRFNKKYVKKCLIAGERSKEPQLIAFYHKMEMKQAIELVESGGMGKIPSAVSTVSMQNIHPKSLPSERILPALSKDKEEEIRKILRNNLQKTRQRLRSYNRHTLVADPYEEAWNQMLLRRQKARQLEQKINNYLTVPAHKLDSPTMSRARIGSDPLAYEPKEDLPVITIDPASPQSPESVDLVNEELKGKVLGLSRDPAKVAEEDEDDDGGIMMRSKETSSPGTDDVFTPAPSDSPSSQRIQRCLSDPGPHPEPGEGEPFFPKGQ

SEQ ID NO: 1758 - protein, 700 aa, Artificial Sequence
  Synthetic polypeptide
PSSVAQTCSRSALSERIAWAQEYKVYPELQITNVVEANQPVTIQNWCKRGRKQCKTHPHFVIPYRCLVGEFVSDALLVPDKCKFLHQERMDVCETHLHWHTVAKETCSEKSTNLHDYGMLLPCGIDKFRGVEFVCCPLAEESDNVDSADAEEDDSDVWWGGADTDYADGSEDKVVEVAEEEEVAEVEEEEADDDEDDEDGDEVEEEAEEPYEEATERTTSIATTTTTTTESVEEVVREVCSEQAETGPCRAMISRWYFDVTEGKCAPFFYGGCGGNRNNFDTEEYCMAVCGSAIPTTAASTPDAVDKYLETPGDENEHAHFQKAKERLEAKHRERMSQVMREWEEAERQAKNLPKADKKAVIQHFQEKVESLEQEAANERQQLVETHMARVEAMLNDRRRLALENYITALQAVPPRPRHVFNMLKKYVRAEQKDRQHTLKHFEHVRMVDPKKAAQIRSQVMTHLRVIYERMNQSLSLLYNVPAVAEEIQDEVDELLQKEQNYSDDVLANMISEPRISYGNDALMPSLTETKTTVELLPVNGEFSLDDLQPWHSFGADSVPANTENEVEPVDARPAADRGLTTRPGSGLTNIKTEEISEVKMDAEFRHDSGYEVHHQKLVFFAEDVGSNKGAIIGLMVGGVVIATVIVITLVMLKKKQYTSIHHGVVEVDAAVTPEERHLSKMQQNGYENPTYKFFEQMQN

SEQ ID NO: 1759 - protein, 700 aa, Artificial Sequence; identical to SEQ ID NO: 1758
  Synthetic polypeptide

SEQ ID NO: 1760 - protein, 700 aa, Artificial Sequence
  Synthetic polypeptide
GAPLLGRNPVWEASKGRTTIVVAHRLSTIRSADLIVTLKDGMLAEKGAHAELMAKRGLYYSLVMSQDIKKADEQMESMTYSTERKTNSLPLHSVKSIKSDFIDKAEESTQSKEISLPEVSLLKILKLNKPEWPFVVLGTLASVLNGTVHPVFSIIFAKIITMFGNNDKTTLKHDAEIYSMIFVILGVICFVSYFMQGLFYGRAGEILTMRLRHLAFKAMLYQDIAWFDEKENSTGGLTTILAIDIAQIQGATGSRIGVLTQNATNMGLSVIISFIYGWEMTFLILSIAPVLAVTGMIETAAMTGFANKDKQELKHAGKIATEALENIRTIVSLTREKAFEQMYEEMLQTQHRNTSKKAQIIGSCYAFSHAFIYFAYAAGFRFGAYLIQAGRMTPEGMFIVFTAIAYGAMAIGETLVLAPEYSKAKSGAAHLFALLEKKPNIDSRSQEGKKPDTCEGNLEFREVSFFYPCRPDVFILRGLSLSIERGKTVAFVGSSGCGKSTSVQLLQRLYDPVQGQVLFDGVDAKELNVQWLRSQIAIVPQEPVLFNCSIAENIAYGDNSRVVPLDEIKEAANAANIHSFIEGLPEKYNTQVGLKGAQLSGGQKQRLAIARALLQKPKILLLDEATSALDNDSEKVVQHALDKARTGRTCLVVTHRLSAIQNADLIVVLHNGKIKEQGTHQELLRNRDIYFKLVNAQSVQ

SEQ ID NO: 1761 - protein, 700 aa, Artificial Sequence; identical to SEQ ID NO: 1760
  Synthetic polypeptide

SEQ ID NO: 1762 - protein, 699 aa, Artificial Sequence
  Synthetic polypeptide
LPSLWIRQDMKLSMKNNIINTQQSFVTMPNVIVPDIEKEIRRMENGACSSFSEDDDSASTSEESENENPHARGSFSYKSLRKGGPSQREQYLPGAIALFNVNNSSNKDQEPEEKKKKKKEKKSKSDDKNENKNDPEKKKKKKDKEKKKKEEKSKDKKEEEKKEVVVIDPSGNTYYNWLFCITLPVMYNWTMVIARACFDELQSDYLEYWLILDYVSDIVYLIDMFVRTRTGYLEQGLLVKEELKLINKYKSNLQFKLDVLSLIPTDLLYFKLGWNYPEIRLNRLLRFSRMFEFFQRTETRTNYPNIFRISNLVMYIVIIIHWNACVFYSISKAIGFGNDTWVYPDINDPEFGRLARKYVYSLYWSTLTLTTIGETPPPVRDSEYVFVVVDFLIGVLIFATIVGNIGSMISNMNAARAEFQARIDAIKQYMHFRNVSKDMEKRVIKWFDYLWTNKKTVDEKEVLKYLPDKLRAEIAINVHLDTLKKVRIFADCEAGLLVELVLKLQPQVYSPGDYICKKGDIGREMYIIKEGKLAVVADDGVTQFVVLSDGSYFGEISILNIKGSKAGNRRTANIKSIGYSDLFCLSKDDLMEALTEYPDAKTMLEEKGKQILMKDGLLDLNIANAGSDPKDLEEKVTRMEGSVDLLQTRFARILAEYESMQQKLKQRLTKVEKFLKPLIDTEFSSIEGPGAESGPIDST

SEQ ID NO: 1763 - protein, 698 aa, Artificial Sequence
  Synthetic polypeptide
ARVCVCLNFLLLFTKMLFIFNFLFSPLPTPALICILTFGAAIFLWLITRPQPVLPLLDLNNQSVGIEGGARKGVSQKNNDLTSCCFSDAKTMYEVFQRGLAVSDNGPCLGYRKPNQPYRWLSYKQVSDRAEYLGSCLLHKGYKSSPDQFVGIFAQNRPEWIISELACYTYSMVAVPLYDTLGPEAIVHIVNKADIAMVICDTPQKALVLIGNVEKGFTPSLKVIILMDPFDDDLKQRGEKSGIEILSLYDAENLGKEHFRKPVPPSPEDLSVICFTSGTTGDPKGAMITHQNIVSNAAAFLKCVEHAYEPTPDDVAISYLPLAHMFERIVQAVVYSCGARVGFFQGDIRLLADDMKTLKPTLFPAVPRLLNRIYDKVQNEAKTPLKKFLLKLAVSSKFKELQKGIIRHDSFWDKLIFAKIQDSLGGRVRVIVTGAAPMSTSVMTFFRAAMGCQVYEAYGQTECTGGCTFTLPGDWTSGHVGVPLACNYVKLEDVADMNYFTVNNEGEVCIKGTNVFKGYLKDPEKTQEALDSDGWLHTGDIGRWLPNGTLKIIDRKKNIFKLAQGEYIAPEKIENIYNRSQPVLQIFVHGESLRSSLVGVVVPDTDVLPSFAAKLGVKGSFEELCQNQVVREAILEDLQKIGKESGLKTFEQVKAIFLHPEPFSIENGLLTPTLKAKRGELSKYFRTQIDSLYEHIQD

SEQ ID NO: 1764 - protein, 698 aa, Artificial Sequence
  Synthetic polypeptide
QACSTWDLWMHLWIRKEVDEVLEILEPPTKYQISQPEVYVAAPGESLEVRCLLKDAAVISWTKDGVHLGPNNRTVLIGEYLQIKGATPRDSGLYACTASRTVDSETWYFMVNVTDAISSGDDEDDTDGAEDFVSENSNNKRAPYWTNTEKMEKRLHAVPAANTVKFRCPAGGNPMPTMRWLKNGKEFKQEHRIGGYKVRNQHWSLIMESVVPSDKGNYTCVVENEYGSINHTYHLDVVAPGREKEITASPDYLEIAIYCIGVFLIACMVVTVILCRMKNTTKKPDFSSQPAVHKLTKRIPLRRQVTVSAESSSSMNSNTPLVRITTRLSSTADTPMLAGVSEYELPEDPKWEFPRDKLTLGKPLGEGCFGQVVMAEAVGIDKDKPKEAVTVAVKMLKDDATEKDLSDLVSEMEMMKMIGKHKNIINLLGACTQDGPLYVIVEYASKGNLREYLRARRPPGMEYSYDINRVPEEQMTFKDLVSCTYQLARGMEYLASQKCIHRDLAARNVLVTENNVMKIADFGLARDINNIDYYKKTTNGRLPVKWMAPEALFDRVYTHQSDVWSFGVLMWEIFTLGGSPYPGIPVEELFKLLKEGHRMDKPANCTNELYMMMRDCWHAVPSQRPTFKQLVEDLDRILTLTTNEEYLDLSQPLEQYSPSYPDTRSSCSSGDDSVFSPDPMPYEPCLPQYPHINGSVKT

SEQ ID NO: 1765 - protein, 697 aa, Artificial Sequence
  Synthetic polypeptide
LATAQDLNITCRFAGVFHVEKNGRYSISRTEAADLCKAFNSTLPTMAQMEKALSIGFETCRYGFIEGHVVIPRIHPNSICAANNTGVYILTSNTSQYDTYCFNASAPPEEDCTSVTDLPNAFDGPITITIVNRDGTRYVQKGEYRTNPEDIYPSNPTDDDVSSGSSSERSSTSGGYIFYTFSTVHPIPDEDSPWITDSTDRIPATTLMSTSATATETATKRQETWDWFSWLFLPSESKNHLHTTTQMAGTSSNTISAGWEPNEENEDERDRHLSFSGSGIDDDEDFISSTISTTPRAFDHTKQNQDWTQWNPSHSNPEVLLQTTTRMTADVDRNGTTAYEGNWNPEAHPPLIHHEHHEEEETPHSTSTIQATPSSTTEETATQKEQWFGNRWHEGYRQTPKEDSHSTTGTAAASAHTSHPMQGRTTPSPEDSSWTDFFNPISHPMGRGHQAGRRMDMDSSHSITLQPTANPNTGLVEDLDRTGPLSMTTRNRNDVTGGRRDPNHSEGSTTLLEGYTSHYPHTKESRTFIPVTSAKTGSFGVTAVTVGDSNSNVNRSLSGDQDTFHPSGGSHTTHGSESDGHSHGSQEGGANTTSGPIRTPQIPEWLIILASLLALALILAVCIAVNSRRRCGQKKKLVINSGNGAVEDRKPSGLNGEASKSQEMVHLVNKESSETPDQFMTADETRNLQNVDMKIGV

SEQ ID NO: 1766 - protein, 696 aa, Artificial Sequence
  Synthetic polypeptide
EQPGQRGLNKTSSFSCEAHNAKGVTTSRTATITVLPQQPRNLHLVSRQPTELEVAWTPGLSGIYPLTHCTLQAVLSNDGMGIQAGEPDPPEEPLTSQASVPPHQLRLGSLHPHTPYHIRVACTSSQGPSSWTHWLPVETPEGVPLGPPENISATRNGSQAFVHWQEPRAPLQGTLLGYRLAYQGQDTPEVLMDIGLRQEVTLELQGDGSVSNLTVCVAAYTAAGDGPWSLPVPLEAWRPVKEPSTPAFSWPWWYVLLGAVVAAACVLILALFLVHRRKKETRYGEVFEPTVERGELVVRYRVRKSYSRRTTEATLNSLGISEELKEKLRDVMVDRHKVALGKTLGEGEFGAVMEGQLNQDDSILKVAVKTMKIAICTRSELEDFLSEAVCMKEFDHPNVMRLIGVCFQGSERESFPAPVVILPFMKHGDLHSFLLYSRLGDQPVYLPTQMLVKFMADIASGMEYLSTKRFIHRDLAARNCMLNENMSVCVADFGLSKKIYNGDYYRQGRIAKMPVKWIAIESLADRVYTSKSDVWSFGVTMWEIATRGQTPYPGVENSEIYDYLRQGNRLKQPADCLDGLYALMSRCWELNPQDRPSFTELREDLENTLKALPPAQEPDEILYVNMDEGGGYPEPPGAAGGADPPTQPDPKDSCSCLTAAEVHPAGRYVLCPSTTPSPAQPADRGSPAAPGQEDGA

SEQ ID NO: 1767 - protein, 696 aa, Artificial Sequence
  Synthetic polypeptide
ALDRDLNITCRFAGVFHVEKNGRYSISRTEAADLCKAFNSTLPTMAQMEKALSIGFETCRYGFIEGHVVIPRIHPNSICAANNTGVYILTSNTSQYDTYCFNASAPPEEDCTSVTDLPNAFDGPITITIVNRDGTRYVQKGEYRTNPEDIYPSNPTDDDVSSGSSSERSSTSGGYIFYTFSTVHPIPDEDSPWITDSTDRIPATTLMSTSATATETATKRQETWDWFSWLFLPSESKNHLHTTTQMAGTSSNTISAGWEPNEENEDERDRHLSFSGSGIDDDEDFISSTISTTPRAFDHTKQNQDWTQWNPSHSNPEVLLQTTTRMTADVDRNGTTAYEGNWNPEAHPPLIHHEHHEEEETPHSTSTIQATPSSTTEETATQKEQWFGNRWHEGYRQTPKEDSHSTTGTAAASAHTSHPMQGRTTPSPEDSSWTDFFNPISHPMGRGHQAGRRMDMDSSHSITLQPTANPNTGLVEDLDRTGPLSMTTRNRNDVTGGRRDPNHSEGSTTLLEGYTSHYPHTKESRTFIPVTSAKTGSFGVTAVTVGDSNSNVNRSLSGDQDTFHPSGGSHTTHGSESDGHSHGSQEGGANTTSGPIRTPQIPEWLIILASLLALALILAVCIAVNSRRRCGQKKKLVINSGNGAVEDRKPSGLNGEASKSQEMVHLVNKESSETPDQFMTADETRNLQNVDMKIGV

SEQ ID NO: 1768 - protein, 695 aa, Artificial Sequence
  Synthetic polypeptide
PSSVAQTCSRSALSERIAWAQEYKITNVVEANQPVTIQNWCKRGRKQCKTHPHFVIPYRCLVGEFVSDALLVPDKCKFLHQERMDVCETHLHWHTVAKETCSEKSTNLHDYGMLLPCGIDKFRGVEFVCCPLAEESDNVDSADAEEDDSDVWWGGADTDYADGSEDKVVEVAEEEEVAEVEEEEADDDEDDEDGDEVEEEAEEPYEEATERTTSIATTTTTTTESVEEVVREVCSEQAETGPCRAMISRWYFDVTEGKCAPFFYGGCGGNRNNFDTEEYCMAVCGSAMSQSLLKTTQEPLARDPVKLPTTAASTPDAVDKYLETPGDENEHAHFQKAKERLEAKHRERMSQVMREWEEAERQAKNLPKADKKAVIQHFQEKVESLEQEAANERQQLVETHMARVEAMLNDRRRLALENYITALQAVPPRPRHVFNMLKKYVRAEQKDRQHTLKHFEHVRMVDPKKAAQIRSQVMTHLRVIYERMNQSLSLLYNVPAVAEEIQDEVDELLQKEQNYSDDVLANMISEPRISYGNDALMPSLTETKTTVELLPVNGEFSLDDLQPWHSFGADSVPANTENEGSGLTNIKTEEISEVKMDAEFRHDSGYEVHHQKLVFFAEDVGSNKGAIIGLMVGGVVIATVIVITLVMLKKKQYTSIHHGVVEVDAAVTPEERHLSKMQQNGYENPTYKFFEQMQN

SEQ ID NO: 1769 - protein, 695 aa, Artificial Sequence
  Synthetic polypeptide
KPLLNEIKEDTNKWKNIPCSWIGRINIVKMAILPKALAANAGTGFAVAEPQIAMFCGKLNMHVNIQTGKWEPDPTGTKSCFETKEEVLQYCQEMYPELQITNVMEANQRVSIDNWCRRDKKQCKSRFVTPFKCLVGEFVSDVLLVPEKCQFFHKERMEVCENHQHWHTVVKEACLTQGMTLYSYGMLLPCGVDQFHGTEYVCCPQTKIIGSVSKEEEEEDEEEEEEEDEEEDYDVYKSEFPTEADLEDFTEAAVDEDDEDEEEGEEVVEDRDYYYDTFKGDDYNEENPTEPGSDGTMSDKEITHDVKVPPTPLPTNDVDVYFETSADDNEHARFQKAKEQLEIRHRNRMDRVKKEWEEAELQAKNLPKAERQTLIQHFQAMVKALEKEAASEKQQLVETHLARVEAMLNDRRRMALENYLAALQSDPPRPHRILQALRRYVRAENKDRLHTIRHYQHVLAVDPEKAAQMKSQVMTHLHVIEERRNQSLSLLYKVPYVAQEIQEEIDELLQEQRADMDQFTASISETPVDVRVSSEESEEIPPFHPFHPFPALPENEGSGVGEQDGGLIGAEEKVINSKNKVDENMVIDETLDVKEMIFNAERVGGLEEERESVGPLREDFSLSSSALIGLLVIAVAIATVIVISLVMLRKRQYGTISHGIVEVDPMLTPEERHLNKMQNHGYENPTYKYLEQMQI

SEQ ID NO: 1770 - protein, 694 aa, Artificial Sequence
  Synthetic polypeptide
KTEQIQSEKIQISFLVLPGICYMALGMSITHLGLGFSCLPFGKCFQTAHFYLEDSTSPRVISTPPTPIFPISDDVGAIPIKHFPKHVADLHASSGFTEEFETLKEFYQEVQSCTVDLGITADSSNHPDNKHKNRYINIVAYDHSRVKLAQLAEKDGKLTDYINANYVDGYNRPKAYIAAQGPLKSTAEDFWRMIWEHNVEVIVMITNLVEKGRRKCDQYWPADGSEEYGNFLVTQKSVQVLAYYTVRNFTLRNTKIKKGSQKGRPSGRVVTQYHYTQWPDMGVPEYSLPVLTFVRKAAYAKRHAVGPVVVHCSAGVGRTGTYIVLDSMLQQIQHEGTVNIFGFLKHIRSQRNYLVQTEEQYVFIHDTLVEAILSKETEVLDSHIHAYVNALLIPGPAGKTKLEKQFQLLSQSNIQQSDYSAALKQCNREKNRTSSIIPVERSRVGISSLSGEGTDYINASYIMGYYQSNEFIITQHPLLHTIKDFWRMIWDHNAQLVVMIPDGQNMAEDEFVYWPNKDEPINCESFKVTLMAEEHKCLSNEEKLIIQDFILEATQDDYVLEVRHFQCPKWPNPDSPISKTFELISVIKEEAANRDGPMIVHDEHGGVTAGTFCALTTLMHQLEKENSVDVYQVAKMINLMRPGVFADIEQYQFLYKVILSLVSTRQEENPSTSLDSNGAALPDGNIAESLESLV

SEQ ID NO: 1771 - protein, 694 aa, Artificial Sequence
  Synthetic polypeptide
PSSVAQTCSRSALSERIAWAQEYKITNVVEANQPVTIQNWCKRGRKQCKTHPHFVIPYRCLVGEFVSDALLVPDKCKFLHQERMDVCETHLHWHTVAKETCSEKSTNLHDYGMLLPCGIDKFRGVEFVCCPLAEESDNVDSADAEEDDSDVWWGGADTDYADGSEDKVVEVAEEEEVAEVEEEEADDDEDDEDGDEVEEEAEEPYEEATERTTSIATTTTTTTESVEEVVREVCSEQAETGPCRAMISRWYFDVTEGKCAPFFYGGCGGNRNNFDTEEYCMAVCGSAIPTTAASTPDAVDKYLETPGDENEHAHFQKAKERLEAKHRERMSQVMREWEEAERQAKNLPKADKKAVIQHFQEKVESLEQEAANERQQLVETHMARVEAMLNDRRRLALENYITALQAVPPRPRHVFNMLKKYVRAEQKDRQHTLKHFEHVRMVDPKKAAQIRSQVMTHLRVIYERMNQSLSLLYNVPAVAEEIQDEVDELLQKEQNYSDDVLANMISEPRISYGNDALMPSLTETKTTVELLPVNGEFSLDDLQPWHSFGADSVPANTENEVEPVDARPAADRGLTTRPGSGLTNIKTEEISEVKMDAEFRHDSGYEVHHQKLVFFAEDVGSNKGAIIGLMVGGVVIATVIVITLVMLKKKQYTSIHHGVVEVDAAVTPEERHLSKMQQNGYENPTYKFFEQMQN

SEQ ID NO: 1772 - protein, 694 aa, Artificial Sequence; identical to SEQ ID NO: 1771
  Synthetic polypeptide

SEQ ID NO: 1773 - protein, 694 aa, Artificial Sequence
  Synthetic polypeptide
QACSTWDLWMHLWIRKEVDEVLEILEPPTKYQISQPEVYVAAPGESLEVRCLLKDAAVISWTKDGVHLGPNNRTVLIGEYLQIKGATPRDSGLYACTASRTVDSETWYFMVNVTDAISSGDDEDDTDGAEDFVSENSNNKRAPYWTNTEKMEKRLHAVPAANTVKFRCPAGGNPMPTMRWLKNGKEFKQEHRIGGYKVRNQHWSLIMESVVPSDKGNYTCVVENEYGSINHTYHLDVVERSPHRPILQAGLPANASTVVGGDVEFVCKVYSDAQPHIQWIKHVEKNGSKYGPDGLPYLKVLKVSAESSSSMNSNTPLVRITTRLSSTADTPMLAGVSEYELPEDPKWEFPRDKLTLGKPLGEGCFGQVVMAEAVGIDKDKPKEAVTVAVKMLKDDATEKDLSDLVSEMEMMKMIGKHKNIINLLGACTQDGPLYVIVEYASKGNLREYLRARRPPGMEYSYDINRVPEEQMTFKDLVSCTYQLARGMEYLASQKCIHRDLAARNVLVTENNVMKIADFGLARDINNIDYYKKTTNGRLPVKWMAPEALFDRVYTHQSDVWSFGVLMWEIFTLGGSPYPGIPVEELFKLLKEGHRMDKPANCTNELYMMMRDCWHAVPSQRPTFKQLVEDLDRILTLTTNEEYLDLSQPLEQYSPSYPDTRSSCSSGDDSVFSPDPMPYEPCLPQYPHINGSVKT

SEQ ID NO: 1774 - protein, 693 aa, Artificial Sequence
  Synthetic polypeptide
VLMRSDDFISVWKFLLHSSLSCQLVKKVPVSPSTMISLCAQYSADKREDEKMCDHLIRAAKYRDHVTATQLIQKIINILTDKHGAWGNSAVSRPLEFWRLDYWEDDLRRRRRFVRNPLGSTHPEATLKTAVEHATDEDILAKGKQSIRSQALGNQNSENEILLEGDDDTLSSVDEKDLENLAGPVSLSTPAQLVAPSVVVKGTLSVTSSELYFEVDEEDPNFKKIDPKILAYTEGLHGKWLFTEIRSIFSRRYLLQNTALEIFMANRVAVMFNFPDPATVKKVVNYLPRVGVGTSFGLPQTRRISLASPRQLFKASNMTQRWQHREISNFEYLMFLNTIAGRSYNDLNQYPVFPWVITNYESEELDLTLPTNFRDLSKPIGALNPKRAAFFAERYESWEDDQVPKFHYGTHYSTASFVLAWLLRIEPFTTYFLNLQGGKFDHADRTFSSISRAWRNSQRDTSDIKELIPEFYYLPEMFVNFNNYNLGVMDDGTVVSDVELPPWAKTSEEFVHINRLALESEFVSCQLHQWIDLIFGYKQQGPEAVRALNVFYYLTYEGAVNLNSITDPVLREAVEAQIRSFGQTPSQLLIEPHPPRGSAMQVSPLMFTDKAQQDVIMVLKFPSNSPVTHVAANTQPGLATPAVITVTANRLFAVNKWHNLPAHQGAVQDQPYQLPVEIDPLIGLSLPSLFAIH

SEQ ID NO: 1775 - protein, 691 aa, Artificial Sequence
  Synthetic polypeptide
AIHKNGWKTFFMFFDLVISFLGIYFKGIIMETHKAVHAGAAAGTAELLPSPSGSLNWTMGLPTDNGHDSDQVFEFNGTQAVRIPDGVVSVSPKEPFTISVWMRHGPFGRKKETILCSSDKTDMNRHHYSLYVHGCRLIFLFRQDPSEEKKYRPAEFHWKLNQVCDEEWHHYVLNVEFPSVTLYVDGTSHEPFSVTEDYPLHPSKIETQLVVGACWQEFSGVENDNETEPVTVASAGGDLHMTQFFRGNLAGLTLRSGKLADKKVIDCLYTCKEGLDLQVLEDSGRGVQIQAHPSQLVLTLEGEDLGELDKAMQHISYLNSRQFPTPGIRRLKITSTIKCFNEATCISVPPVDGYVMVLQPEEPKISLSGVHHFARAASEFESSEGVFLFPELRIISTITREVEPEGDGAEDPTVQESLVSEEIVHDLDTCEVTVEGEELNHEQESLEVDMARLQQKGIEVSSSELGMTFTGVDTMASYEEVLHLLRYRNWHARSLLDRKFKLICSELNGRYISNEFKVEVNVIHTANPMEHANHMAAQPQFVHPEHRSFVDLSGHNLANPHPFAVVPSTATVVIVVCVSFLVFMIILGVFRIRAAHRRTMRDQDTGKENEMDWDDSALTITVNPMETYEDQHSSEEEEEEEEEEESEDGEEEDDITSAESESSEEEEGEQGDPQNATRQQQLEWDDSTLSY

SEQ ID NO: 1776 - protein, 691 aa, Artificial Sequence; identical to SEQ ID NO: 1775
  Synthetic polypeptide

SEQ ID NO: 1777 - protein, 690 aa, Artificial Sequence
  Synthetic polypeptide
LQCCLHIGDAPILVGNPFTCSCDIMWIKTLQEAKSSPDTQDLYCLNESSKNIPLANLQIPNCGLPSANLAAPNLTVEEGKSITLSCSVAGDPVPNMYWDVGNLVSKHMNETSHTQGSLRITNISSDDSGKQISCVAENLVGEDQDSVNLTVHFAPTITFLESPTSDHHWCIPFTVKGNPKPALQWFYNGAILNESKYICTKIHVTNHTEYHGCLQLDNPTHMNNGDYTLIAKNEYGKDEKQISAHFMGWPGIDDGANPNYPDVIYEDYGTAANDIGDTTNRSNEIPSTDVTDKTGREHLSVYAVVVIASVVGFCLLVMLFLLKLARHSKFGMKGPASVISNDDDSASPLHHISNGSNTPSSSEGGPDAVIIGMTKIPVIENPQYFGITNSQLKPDTFVQHIKRHNIVLKRELGEGAFGKVFLAECYNLCPEQDKILVAVKTLKDASDNARKDFHREAELLTNLQHEHIVKFYGVCVEGDPLIMVFEYMKHGDLNKFLRAHGPDAVLMAEGNPPTELTQSQMLHIAQQIAAGMVYLASQHFVHRDLATRNCLVGENLLVKIGDFGMSRDVYSTDYYRVGGHTMLPIRWMPPESIMYRKFTTESDVWSLGVVLWEIFTYGKQPWYQLSNNEVIECITQGRVLQRPRTCPQEVYELMLGCWQREPHMRKNIKGIHTLLQNLAKASPVYLDILG

SEQ ID NO: 1778 - protein, 690 aa, Artificial Sequence; identical to SEQ ID NO: 1777
  Synthetic polypeptide

SEQ ID NO: 1779 - protein, 688 aa, Artificial Sequence
  Synthetic polypeptide
EVRSPSARQPPRLRSEERLRPAATSSGRECPEELKPMKDGSGCYDHSKGIDCSDGFNGGCEQLCLQQTLPLPYDATSSTIFMFCGCVEEYKLAPDGKSCLMLSDVCEGPKCLKPDSKFNDTLFGEMLHGYNNRTQHVNQGQVFQMTFRENNFIKDFPQLADGLLVIPLPVEEQCRGVLSEPLPDLQLLTGDIRYDEAMGYPMVQQWRVRSNLYRVKLSTITLAAGFTNVLKILTKESSREELLSFIQHYGSHYIAEALYGSELTCIIHFPSKKVQQQLWLQYQKETTELGSKKELKSMPFITYLSGLLTAQMLSDDQLISGVEIRCEEKGRCPSTCHLCRRPGKEQLSPTPVLLEINRVVPLYTLIQDNGTKEAFKSALMSSYWCSGKGDVIDDWCRCDLSAFDANGLPNCSPLLQPVLRLSPTVEPSSTVVSLEWVDVQPAIGTKVSDYILQHKKVDEYTDTDLYTGEFLSFADDLLSGLGTSCVAAGRSHGEVPEVSIYSVIFKCLEPDGLYKFTLYAVDTRGRHSELSTVTLRTACPLVDDNKAEEIADKIYNLYNGYTSGKEQQMAYNTLMEVSASMLFRVQHHYNSHYEKFGDFVWRSEDELGPRKAHLILRRLERVSSHCSSLLRSAYIQSRVETVPYLFCRSEEVRPAGMVWYSILKDTKITCEEKMVSMARNTYGESKGR

SEQ ID NO: 1780 - protein, 688 aa, Artificial Sequence; identical to SEQ ID NO: 1779
  Synthetic polypeptide

SEQ ID NO: 1781 - protein, 688 aa, Artificial Sequence; identical to SEQ ID NO: 1779
  Synthetic polypeptide

SEQ ID NO: 1782 - protein, 688 aa, Artificial Sequence; identical to SEQ ID NO: 1779
  Synthetic polypeptide

SEQ ID NO: 1783 - protein, 688 aa, Artificial Sequence
  Synthetic polypeptide
SAQFRFVAQPNCQQLLASRWYDEFPGWRRRHWAVKMVTCFIIGLLFPVFSVCYLIAPKSPLGLFIRKPFIKFICHTASYLTFLFLLLLASQHIDRSDLNRQGPPPTIVEWMILPWVLGFIWGEIKQMWDGGLQDYIHDWWNLMDFVMNSLYLATISLKIVAFVKYSALNPRESWDMWHPTLVAEALFAIANIFSSLRLISLFTANSHLGPLQISLGRMLLDILKFLFIYCLVLLAFANGLNQLYFYYEETKGLTCKGIRCEKQNNAFSTLFETLQSLFWSIFGLINLYVTNVKAQHEFTEFVGATMFGTYNVISLVVLLNMLIAMMNNSYQLIADHADIEWKFARTKLWMSYFEEGGTLPTPFNVIPSPKSLWYLIKWIWTHLCKKKMRRKPESFGTIGVRTQHRRAADNLRRHHQYQEVMRNLVKRYVAAMIRDAKTEEGLTEENFKELKQDISSFRFEVLGLLRGSKLSTIQSANASKESSNSADSDEKSDSEGNSKDKKKNFSLFDLTTLIHPRSAAIASERHNISNGSALVVQEPPREKQRKVNFVTDIKNFGLFHRRSKQNAAEQNANQIFSVSEEVARQQAAGPLERNIQLESRGLASRGDLSIPGLSEQCVLVDHRERNTDTLGLQVGKRVCPFKSEKVVVEDTVPIIPKEKHAKEEDSSIDYDLNLPDTVTHEDYVTTRL

SEQ ID NO: 1784 - protein, 687 aa, Artificial Sequence
  Synthetic polypeptide
KTEQIQSEKIQISFLVLPGICYMALGMSITHLGLGFSCLPFGKCFQTAHFYLEDSTSPRVISTPPTPIFPISDDVGAIPIKHFPKHVADLHASSGFTEEFEEVQSCTVDLGITADSSNHPDNKHKNRYINIVAYDHSRVKLAQLAEKDGKLTDYINANYVDGYNRPKAYIAAQGPLKSTAEDFWRMIWEHNVEVIVMITNLVEKGRRKCDQYWPADGSEEYGNFLVTQKSVQVLAYYTVRNFTLRNTKIKKGSQKGRPSGRVVTQYHYTQWPDMGVPEYSLPVLTFVRKAAYAKRHAVGPVVVHCSAGVGRTGTYIVLDSMLQQIQHEGTVNIFGFLKHIRSQRNYLVQTEEQYVFIHDTLVEAILSKETEVLDSHIHAYVNALLIPGPAGKTKLEKQFQLLSQSNIQQSDYSAALKQCNREKNRTSSIIPVERSRVGISSLSGEGTDYINASYIMGYYQSNEFIITQHPLLHTIKDFWRMIWDHNAQLVVMIPDGQNMAEDEFVYWPNKDEPINCESFKVTLMAEEHKCLSNEEKLIIQDFILEATQDDYVLEVRHFQCPKWPNPDSPISKTFELISVIKEEAANRDGPMIVHDEHGGVTAGTFCALTTLMHQLEKENSVDVYQVAKMINLMRPGVFADIEQYQFLYKVILSLVSTRQEENPSTSLDSNGAALPDGNIAESLESLV

SEQ ID NO: 1785 - protein, 687 aa, Artificial Sequence
  Synthetic polypeptide
GLHSHVELDDYHEDGFCQPYRGIACARFIGNRTIYVDSLQMQGEIENRITAAFTMIGTSTHLSDQCSQFAIPSFCHFVFPLCDARSRTPKPRELCRDECEVLESDLCRQEYTIARSNPLILMRLQLPKCEALPMPESPDAANCMRIGIPAERLGRYHQCYNGSGMDYRGTASTTKSGHQCQPWALQHPHSHHLSSTDFPELGGGHAYCRNPGGQMEGPWCFTQNKNVRMELCDVPSCSPRDSSKMGILYILVPSIAIPLVIACLFFLVCMCRNKQKASASTPQRRQLMASPSQDMEMPLINQHKQAKLKEISLSAVRFMEELGEDRFGKVYKGHLFGPAPGEQTQAVAIKTLKDKAEGPLREEFRHEAMLRARLQHPNVVCLLGVVTKDQPLSMIFSYCSHGDLHEFLVMRSPHSDVGSTDDDRTVKSALEPPDFVHLVAQIAAGMEYLSSHHVVHKDLATRNVLVYDKLNVKISDLGLFREVYAADYYKLLGNSLLPIRWMAPEAIMYGKFSIDSDIWSYGVVLWEVFSYGLQPYCGYSNQDVVEMIRNRQVLPCPDDCPAWVYALMIECWNEFPSRRPRFKDIHSRLRAWGNLSNYNSSAQTSGASNTTQTSSLSTSPVSNVVRMRGSGRQCWMTETPNALLWHNVSGVGSCRWVRGLADFKDEATDFRVMPRDPSLHCHVTSTA

SEQ ID NO: 1786 - protein, 686 aa, Artificial Sequence
  Synthetic polypeptide
VEYPKFKNPESEMLKNPKLFACQHDAQRKCSLEYFGFWTFRIPDAQPVYPELQITNVVEANQPVTIQNWCKRGRKQCKTHPHFVIPYRCLVGEFVSDALLVPDKCKFLHQERMDVCETHLHWHTVAKETCSEKSTNLHDYGMLLPCGIDKFRGVEFVCCPLAEESDNVDSADAEEDDSDVWWGGADTDYADGSEDKVVEVAEEEEVAEVEEEEADDDEDDEDGDEVEEEAEEPYEEATERTTSIATTTTTTTESVEEVVRVSQSLLKTTQEPLARDPVKLPTTAASTPDAVDKYLETPGDENEHAHFQKAKERLEAKHRERMSQVMREWEEAERQAKNLPKADKKAVIQHFQEKVESLEQEAANERQQLVETHMARVEAMLNDRRRLALENYITALQAVPPRPRHVFNMLKKYVRAEQKDRQHTLKHFEHVRMVDPKKAAQIRSQVMTHLRVIYERMNQSLSLLYNVPAVAEEIQDEVDELLQKEQNYSDDVLANMISEPRISYGNDALMPSLTETKTTVELLPVNGEFSLDDLQPWHSFGADSVPANTENEVEPVDARPAADRGLTTRPGSGLTNIKTEEISEVKMDAEFRHDSGYEVHHQKLVFFAEDVGSNKGAIIGLMVGGVVIATVIVITLVMLKKKQYTSIHHGVVEVDAAVTPEERHLSKMQQNGYENPTYKFFEQMQN

SEQ ID NO: 1787 - protein, 686 aa, Artificial Sequence
  Synthetic polypeptide
YYLQIIGWFIKSSNEATNITPKHNMKAFLDELKAENIKKFLYNFTQIPHLAGTEQNFQLAKQIQSQWKEFGLDSVELAHYDVLLSYPNKTHPNYISIINEDGNEIFNTSLFEPPPPGYENVSDIVPPFSAFSPQGMPEGDLVYVNYARTEDFFKLERDMKINCSGKIVIARYGKVFRGNKVKNAQLAGAKGVILYSDPADYFAPGVKSYPDGWNLPGGGVQRGNILNLNGAGDPLTPGYPANEYAYRRGIAEAVGLPSIPVHPIGYYDAQKLLEKMGGSAPPDSSWRGSLKVPYNVGPGFTGNFSTQKVKMHIHSTNEVTRIYNVIGTLRGAVEPDRYVILGGHRDSWVFGGIDPQSGAAVVHEIVRSFGTLKKEGWRPRRTILFASWDAEEFGLLGSTEWAEENSRLLQERGVAYINADSSIEGNYTLRVDCTPLMYSLVHNLTKELKSPDEGFEGKSLYESWTKKSPSPEFSGMPRISKLGSGNDFEVFFQRLGIASGRARYTKNWETNKFSGYPLYHSVYETYELVEKFYDPMFKYHLTVAQVRGGMVFELANSIVLPFDCRDYAVVLRKYADKIYSISMKHPQEMKTYSVSFDSLFSAVKNFTEIASKFSERLQDFDKSKHVIYAPSSHNKYAGESFPGIYDALFDIESKVDPSKAWGEVKRQIYVAAFTVQAAAETLSEVA

SEQ ID NO: 1788 - protein, 686 aa, Artificial Sequence; identical to SEQ ID NO: 1787
  Synthetic polypeptide

SEQ ID NO: 1789 - protein, 686 aa, Artificial Sequence
  Synthetic polypeptide
SCCSFWKPCNCSSYSEKDDLENVKSLGTDLMNEMRRITSDFRIGFGSFVEKTVMPYISTTPAKLRNPCTSEQNCTSPFSYKNVLSLTNKGEVFNELVGKQRISGNLDSPEGGFDAIMQVAVCGSLIGWRNVTRLLVFSTDAGFHFAGDGKLGGIVLPNDGQCHLENNMYTMSHYYDYPSIAHLVQKLSENNIQTIFAVTEEFQPVYKELKNLIPKSAVGTLSANSSNVIQLIIDAYNSLSSEVILENGKLSEGVTISYKSYCKNGVNGTGENGRKCSNISIGDEVQFEISITSNKCPKKDSDSFKIRPLGFTEEVEVILQYICECECQSEGIPESPKCHEGNGTFECGACRCNEGRVGRHCECSTDEVNSEDMDAYCRKENSSEICSNNGECVCGQCVCRKRDNTNEIYSGKFCECDNFNCDRSNGLICGGNGVCKCRVCECNPNYTGSACDCSLDTSTCEASNGQICNGRGICECGVCKCTDPKFQGQTCEMCQTCLGVCAEHKECVQCRAFNKGEKKDTCTQECSYFNITKVESRDKLPQPVQPDPVSHCKEKDVDDCWFYFTYSVNGNNEVMVHVVENPECPTGPDIIPIVAGVVAGIVLIGLALLLIWKLLMIIHDRREFAKFEKEKMNAKWDTSLSVAQPGVQWCDISSLQPLTSRFQQFSCLSLPSTWDYRVKILFIRVP

SEQ ID NO: 1790 - protein, 685 aa, Artificial Sequence
  Synthetic polypeptide
SPLTIPLPLPIFLNDEFGHSINDYSISPDGQFILLEYNYVKQWRHSYTASYDIYDLNKRQLITEERIPNNTQWVTWSPVGHKLAYVWNNDIYVKIEPNLPSYRITWTGKEDIIYNGITDWVYEEEVFSAYSALWWSPNGTFLAYAQFNDTEVPLIEYSFYSDESLQYPKTVRVPYPKAGAVNPTVKFFVVNTDSLSSVTNATSIQITAPASMLIGDHYLCDVTWATQERISLQWLRRIQNYSVMDICDYDESSGRWNCLVARQHIEMSTTGWVGRFRPSEPHFTLDGNSFYKIISNEEGYRHICYFQIDKKDCTFITKGTWEVIGIEALTSDYLYYISNEYKGMPGGRNLYKIQLSDYTKVTCLSCELNPERCQYYSVSFSKEAKYYQLRCSGPGLPLYTLHSSVNDKGLRVLEDNSALDKMLQNVQMPSKKLDFIILNETKFWYQMILPPHFDKSKKYPLLLDVYAGPCSQKADTVFRLNWATYLASTENIIVASFDGRGSGYQGDKIMHAINRRLGTFEVEDQIEAARQFSKMGFVDNKRIAIWGWSYGGYVTSMVLGSGSGVFKCGIAVAPVSRWEYYDSVYTERYMGLPTPEDNLDHYRNSTVMSRAENFKQVEYLLIHGTADDNVHFQQSAQISKALVDVGVDFQAMWYTDEDHGIASSTAHQHIYTHMSHFIKQCFSLP

SEQ ID NO: 1791 - protein, 685 aa, Artificial Sequence
  Synthetic polypeptide
RPKIDIAVGAPFEGLGKVYIYHSSSKGLLRQPQQVIHGEKLGLPGLATFGYSLSGQMDVDENFYPDLLVGSLSDHIVLLRARPVINIVHKTLVPRPAVLDPALCTATSCVQVELCFAYNQSAGNPNYRRNITLAYTLEADRDRRPPRLRFAGSESAVFHGFFSMPEMRCQKLELLLMDNLRDKLRPIIISMNYSLPLRMPDRPRLGLRSLDAYPILNQAQALENHTEVQFQKECGPDNKCESNLQMRAAFVSEQQQKLSRLQYSRDVRKLLLSINVTNTRTSERSGEDAHEALLTLVVPPALLLSSVRPPGACQANETIFCELGNPFKRNQRMELLIAFEVIGVTLHTRDLQVQLQLSTSSHQDNLWPMILTLLVDYTLQTSLSMVNHRLQSFFGGTVMGESGMKTVEDVGSPLKYEFQVGPMGEGLVGLGTLVLGLEWPYEVSNGKWLLYPTEITVHGNGSWPCRPPGDLINPLNLTLSDPGDRPSSPQRRRRQLDPGGGQGPPPVTLAAAKKAKSETVLTCATGRAHCVWLECPIPDAPVVTNVTVKARVWNSTFIEDYRDFDRVRVNGWATLFLRTSIPTINMENKTTWFSVDIDSELVEELPAEIELWLVLVAVGAGLLLLGLIILLLWKCDFFKRTRYYQIMPKYHAVRIREEERYPPPGSTLPTKKHWVTSWQTRDQYY

SEQ ID NO: 1792 - protein, 683 aa, Artificial Sequence
  Synthetic polypeptide
SAQFRFVAQPNCQQLLASRWYDEFPGWRRRHWAVKMVTCFIIGLLFPVFSVCYLIAPKSPLGLFIRKPFIKFICHTASYLTFLFLLLLASQHIDRSDLNRQGPPPTIVEWMILPWVLGFIWGEIKQMWDGGLQDYIHDWWNLMDFVMNSLYLATISLKIVAFVKYSALNPRESWDMWHPTLVAEALFAIANIFSSLRLISLFTANSHLGPLQISLGRMLLDILKFLFIYCLVLLAFANGLNQLYFYYEETKGLTCKGIRCEKQNNAFSTLFETLQSLFWSIFGLINLYVTNVKAQHEFTEFVGATMFGTYNVISLVVLLNMLIAMMNNSYQLIADHADIEWKFARTKLWMSYFEEGGTLPTPFNVIPSPKSLWYLIKWIWTHLCKKKMRRKPESFGTIGRRAADNLRRHHQYQEVMRNLVKRYVAAMIRDAKTEEGLTEENFKELKQDISSFRFEVLGLLRGSKLSTIQSANASKESSNSADSDEKSDSEGNSKDKKKNFSLFDLTTLIHPRSAAIASERHNISNGSALVVQEPPREKQRKVNFVTDIKNFGLFHRRSKQNAAEQNANQIFSVSEEVARQQAAGPLERNIQLESRGLASRGDLSIPGLSEQCVLVDHRERNTDTLGLQVGKRVCPFKSEKVVVEDTVPIIPKEKHAKEEDSSIDYDLNLPDTVTHEDYVTTRL

SEQ ID NO: 1793 - protein, 683 aa, Artificial Sequence; identical to SEQ ID NO: 1792
  Synthetic polypeptide

SEQ ID NO: 1794 - protein, 683 aa, Artificial Sequence; identical to SEQ ID NO: 1792
  Synthetic polypeptide

SEQ ID NO: 1795 - protein, 682 aa, Artificial Sequence
  Synthetic polypeptide
RSFCGLHQTAEIRVETACAQGTFKPLSGEGSCQPCPANSHSNTIGSAVCQCRVGYFRARTDPRGAPCTTPPSAPRSVVSRLNGSSLHLEWSAPLESGGREDLTYALRCRECRPGGSCAPCGGDLTFDPGPRDLVEPWVVVRGLRPDFTYTFEVTALNGVSSLATGPVPFEPVNVTTDREVPPAVSDIRVTRSSPSSLSLAWAVPRAPSGAVLDYEVKYHEKGAEGPSSVRFLKTSENRAELRGLKRGASYLVQVRARSEAGYGPFGQEHHSQTQLDESEGWREQLALIAGTAVVGVVLVLVVIVVAVLCLRKQSNGREAEYSDKHGQYLIGHGTKVYIDPFTYEDPNEAVREFAKEIDVSYVKIEEVIGAGEFGEVCRGRLKAPGKKESCVAIKTLKGGYTERQRREFLSEASIMGQFEHPNIIRLEGVVTNSMPVMILTEFMENGALDSFLRLNDGQFTVIQLVGMLRGIASGMRYLAEMSYVHRDLAARNILVNSNLVCKVSDFGLSRFLEENSSDPTYTSSLGGKIPIRWTAPEAIAFRKFTSASDAWSYGIVMWEVMSFGERPYWDMSNQDVINAIEQDYRLPPPPDCPTSLHQLMLDCWQKDRNARPRFPQVVSALDKMIRNPASLKIVARENGGDLLRIGVTLAGHQKKILASVQHMKSQAKPGTPGGTGGPAPQY

SEQ ID NO: 1796 - protein, 682 aa, Artificial Sequence
  Synthetic polypeptide
LATAQDLNITCRFAGVFHVEKNGRYSISRTEAADLCKAFNSTLPTMAQMEKALSIGFETCRYGFIEGHVVIPRIHPNSICAANNTGVYILTSNTSQYDTYCFNASAPPEEDCTSVTDLPNAFDGPITITIVNRDGTRYVQKGEYRTNPEDIYPSNPTDDDVSSGSSSERSSTSGGYIFYTFSTVHPIPDEDSPWITDSTDRIPATSTSSNTISAGWEPNEENEDERDRHLSFSGSGIDDDEDFISSTISTTPRAFDHTKQNQDWTQWNPSHSNPEVLLQTTTRMTDVDRNGTTAYEGNWNPEAHPPLIHHEHHEEEETPHSTSTIQATPSSTTEETATQKEQWFGNRWHEGYRQTPKEDSHSTTGTAAASAHTSHPMQGRTTPSPEDSSWTDFFNPISHPMGRGHQAGRRMDMDSSHSITLQPTANPNTGLVEDLDRTGPLSMTTQQSNSQSFSTSHEGLEEDKDHPTTSTLTSSNRNDVTGGRRDPNHSEGSTTLLEGYTSHYPHTKESRTFIPVTSAKTGSFGVTAVTVGDSNSNVNRSLSGDQDTFHPSGGSHTTHGSESDGHSHGSQEGGANTTSGPIRTPQIPEWLIILASLLALALILAVCIAVNSRRRCGQKKKLVINSGNGAVEDRKPSGLNGEASKSQEMVHLVNKESSETPDQFMTADETRNLQNVDMKIGV

SEQ ID NO: 1797 - protein, 682 aa, Artificial Sequence
  Synthetic polypeptide
LATAQDLNITCRFAGVFHVEKNGRYSISRTEAADLCKAFNSTLPTMAQMEKALSIGFETCRYGFIEGHVVIPRIHPNSICAANNTGVYILTSNTSQYDTYCFNASAPPEEDCTSVTDLPNAFDGPITITIVNRDGTRYVQKGEYRTNPEDIYPSNPTDDDVSSGSSSERSSTSGGYIFYTFSTVHPIPDEDSPWITDSTDRIPATTLMSTSATATETATKRQETWDWFSWLFLPSESKNHLHTTTQMAGTSSNTISAGWEPNEENEDERDRHLSFSGSGIDDDEDFISSTISTTPRAFDHTKQNQDWTQWNPSHSNPEVLLQTTTRMTDVDRNGTTAYEGNWNPEAHPPLIHHEHHEEEETPHSTSTTASAHTSHPMQGRTTPSPEDSSWTDFFNPISHPMGRGHQAGRRMDMDSSHSITLQPTANPNTGLVEDLDRTGPLSMTTQQSNSQSFSTSHEGLEEDKDHPTTSTLTSSNRNDVTGGRRDPNHSEGSTTLLEGYTSHYPHTKESRTFIPVTSAKTGSFGVTAVTVGDSNSNVNRSLSGDQDTFHPSGGSHTTHGSESDGHSHGSQEGGANTTSGPIRTPQIPEWLIILASLLALALILAVCIAVNSRRRCGQKKKLVINSGNGAVEDRKPSGLNGEASKSQEMVHLVNKESSETPDQFMTADETRNLQNVDMKIGV

SEQ ID NO: 1798 - protein, 681 aa, Artificial Sequence
  Synthetic polypeptide
ALDRDLNITCRFAGVFHVEKNGRYSISRTEAADLCKAFNSTLPTMAQMEKALSIGFETCRYGFIEGHVVIPRIHPNSICAANNTGVYILTSNTSQYDTYCFNASAPPEEDCTSVTDLPNAFDGPITITIVNRDGTRYVQKGEYRTNPEDIYPSNPTDDDVSSGSSSERSSTSGGYIFYTFSTVHPIPDEDSPWITDSTDRIPATSTSSNTISAGWEPNEENEDERDRHLSFSGSGIDDDEDFISSTISTTPRAFDHTKQNQDWTQWNPSHSNPEVLLQTTTRMTDVDRNGTTAYEGNWNPEAHPPLIHHEHHEEEETPHSTSTIQATPSSTTEETATQKEQWFGNRWHEGYRQTPKEDSHSTTGTAAASAHTSHPMQGRTTPSPEDSSWTDFFNPISHPMGRGHQAGRRMDMDSSHSITLQPTANPNTGLVEDLDRTGPLSMTTQQSNSQSFSTSHEGLEEDKDHPTTSTLTSSNRNDVTGGRRDPNHSEGSTTLLEGYTSHYPHTKESRTFIPVTSAKTGSFGVTAVTVGDSNSNVNRSLSGDQDTFHPSGGSHTTHGSESDGHSHGSQEGGANTTSGPIRTPQIPEWLIILASLLALALILAVCIAVNSRRRCGQKKKLVINSGNGAVEDRKPSGLNGEASKSQEMVHLVNKESSETPDQFMTADETRNLQNVDMKIGV

SEQ ID NO: 1799 - protein, 681 aa, Artificial Sequence
  Synthetic polypeptide
ALDRDLNITCRFAGVFHVEKNGRYSISRTEAADLCKAFNSTLPTMAQMEKALSIGFETCRYGFIEGHVVIPRIHPNSICAANNTGVYILTSNTSQYDTYCFNASAPPEEDCTSVTDLPNAFDGPITITIVNRDGTRYVQKGEYRTNPEDIYPSNPTDDDVSSGSSSERSSTSGGYIFYTFSTVHPIPDEDSPWITDSTDRIPATTLMSTSATATETATKRQETWDWFSWLFLPSESKNHLHTTTQMAGTSSNTISAGWEPNEENEDERDRHLSFSGSGIDDDEDFISSTISTTPRAFDHTKQNQDWTQWNPSHSNPEVLLQTTTRMTDVDRNGTTAYEGNWNPEAHPPLIHHEHHEEEETPHSTSTTASAHTSHPMQGRTTPSPEDSSWTDFFNPISHPMGRGHQAGRRMDMDSSHSITLQPTANPNTGLVEDLDRTGPLSMTTQQSNSQSFSTSHEGLEEDKDHPTTSTLTSSNRNDVTGGRRDPNHSEGSTTLLEGYTSHYPHTKESRTFIPVTSAKTGSFGVTAVTVGDSNSNVNRSLSGDQDTFHPSGGSHTTHGSESDGHSHGSQEGGANTTSGPIRTPQIPEWLIILASLLALALILAVCIAVNSRRRCGQKKKLVINSGNGAVEDRKPSGLNGEASKSQEMVHLVNKESSETPDQFMTADETRNLQNVDMKIGV

SEQ ID NO: 1800 - protein, 679 aa, Artificial Sequence
  Synthetic polypeptide
SQHFGRLRQVDYLRKYFGEKIGLYFAWLGVYTQMLIPASIVGIIVFLYGCATMDENIPSMEMCDQRHNITMCPLCDKTCSYWKMSSACATARASHLFDNPATVFFSVFMALWAATFMEHWKRKQMRLNYRWDLTGFEEEEEAVKDHPRAEYEARVLEKSLKKESRNKEKRRHIPEESTNKWKQRVKTAMAGVKLTDKVKLTWRDRFPAYLTNLVSIIFMIAVTFAIVLGVIIYRISMAAALAMNSSPSVRSNIRVTVTATAVIINLVVIILLDEVYGCIARWLTKIEVPKTEKSFEERLIFKAFLLKFVNSYTPIFYVAFFKGRFVGRPGDYVYIFRSFRMEECAPGGCLMELCIQLSIIMLGKQLIQNNLFEIGIPKMKKLIRYLKLKQQSPPDHEECVKRKQRYEVDYNLEPFAGLTPEYMEMIIQFGFVTLFVASFPLAPLFALLNNIIEIRLDAKKFVTELRRPVAVRAKDIGIWYNILRGIGKLAVIINAFVISFTSDFIPRLVYLYMYSKNGTMHGFVNHTLSSFNVSDFQNGTAPNDPLDLGYEVQICRYKDYREPPWSENKYDISKDFWAVLAARLAFVIVFQNLVMFMSDFVDWVIPDIPKDISQQIHKEKVLMVELFMREEQDKQQLLETWMEKERQKDEPPCNHHNTKACPDSLGSPAPSHAYHGGVL

SEQ ID NO: 1801 - protein, 679 aa, Artificial Sequence
  Synthetic polypeptide
SQHFGRLRQVDYLRKYFGEKIGLYFAWLGVYTQMLIPASIVGIIVFLYGCATMDENIPSMEMCDQRHNITMCPLCDKTCSYWKMSSACATARASHLFDNPATVFFSVFMALWAATFMEHWKRKQMRLNYRWDLTGFEEEEKALLDHPRAEYEARVLEKSLKKESRNKEKRRHIPEESTNKWKQRVKTAMAGVKLTDKVKLTWRDRFPAYLTNLVSIIFMIAVTFAIVLGVIIYRISMAAALAMNSSPSVRSNIRVTVTATAVIINLVVIILLDEVYGCIARWLTKIEVPKTEKSFEERLIFKAFLLKFVNSYTPIFYVAFFKGRFVGRPGDYVYIFRSFRMEECAPGGCLMELCIQLSIIMLGKQLIQNNLFEIGIPKMKKLIRYLKLKQQSPPDHEECVKRKQRYEVDYNLEPFAGLTPEYMEMIIQFGFVTLFVASFPLAPLFALLNNIIEIRLDAKKFVTELRRPVAVRAKDIGIWYNILRGIGKLAVIINAFVISFTSDFIPRLVYLYMYSKNGTMHGFVNHTLSSFNVSDFQNGTAPNDPLDLGYEVQICRYKDYREPPWSENKYDISKDFWAVLAARLAFVIVFQNLVMFMSDFVDWVIPDIPKDISQQIHKEKVLMVELFMREEQDKQQLLETWMEKERQKDEPPCNHHNTKACPDSLGSPAPSHAYHGGVL

SEQ ID NO: 1802 - protein, 672 aa, Artificial Sequence
  Synthetic polypeptide
GQAQWLTPVIPALWEAEAGGSPEYLVDCDEVIFMKEGCITERGTHEELMNLNGDYATIFNNLLLGETPPVEINSKKETSGSQKKSQDKGPKTGSVKKEKAVKPEEGQLVQLEEKGQGSVPWSVYGVYIQAAGGPLAFLVIMALFMLNVGSTAFSTWWLSYWIKQGSGNTTVTRGNETSVSDSMKDNPHMQYYASIYALSMAVMLILKAIRGVVFVKGTLRASSRLHDELFRRILRSPMKFFDTTPTGRILNRFSKDMDEVDVRLPFQAEMFIQNVILVFFCVGMIAGVFPWFLVAVGPLVILFSVLHIVSRYQELLDDNQAPFFLFTCAMRWLAVRLDLISIALITTTGLMIVLMHGQIPPAYAGLAISYAVQLTGLFQFTVRLASETEARFTSVERINHYIKTLSLEAPARIKNKAPSPDWPQEGEVTFENAEMRYRENLPLVLKKVSFTIKPKEKIGIVGRTGSGKSSLGMALFRLVELSGGCIKIDGVRISDIGLADLRSKLSIIPQEPVLFSGTVRSNLDPFNQYTEDQIWDALERTHMKECIAQLPLKLESEVMENGDNFSVGERQLLCIARALLRHCKILILDEATAAMDTETDLLIQETIREAFADCTMLTIAHRLHTVLGSDRIMVLAQGQVVEFDTPSVLLSNDSSRFYAMFAAAENKVAVKG

SEQ ID NO: 1803 - protein, 672 aa, Artificial Sequence
  Synthetic polypeptide
DVPASPSAMIVSFLRPPQPCGTVSVLTTLERRFNLQSADVGVIASSFEIGNLALILFVSYFGARGHRPRLIGCGGIVMALGALLSALPEFLTHQYKYEAGEIRWGAEGRDVCAANGSGGDEGPDPDLICRNRTATNMMYLLLIGAQVLLGIGATPVQPLGVSYIDDHVRRKDSSLYIGILFTMLVFGPACGFILGSFCTKIYVDAVFIDTSNLDITPDDPRWIGAWWGGFLLCGALLFFSSLLMFGFPQSLPPHSEPAMESEQAMLSEREYERPKPSNGVLRHPLEPDSSASCFQQLRVIPKVTKHLLSNPVFTCIILAACMEIAVVAGFAAFLGKYLEQQFNLTTSSANQLLGMTAIPCACLGIFLGGLLVKKLSLSALGAIRMAMLVNLVSTACYVSFLFLGCDTGPVAGVTVPYGNSTAPGSALDPYSPCNNNCECQTDSFTPVCGADGITYLSACFAGCNSTNLTGCACLTTVPAENATVVPGKCPSPGCQEAFLTFLCVMCICSLIGAMAQTPSVIILIRTVSPELKSYALGVLFLLLRLLGFIPPPLIFGAGIDSTCLFWSTFCGEQGACVLYDNVVYRYLYVSIAIALKSFAFILYTTTWQCLRKNYKRYIKNHEGGLSTSEFFASTLTLDNLGRDPVPANQTHRTKFIYNLEDHEWCENMESVL

SEQ ID NO: 1804 - protein, 672 aa, Artificial Sequence
  Synthetic polypeptide
AIHKNGWKTFFMFFDLVISFLGIYFKGIIMETHKAVHAGAAAGTAELLPSPSGSLNWTMGLPTDNGHDSDQVFEFNGTQAVRIPDGVVSVSPKEPFTISVWMRHGPFGRKKETILCSSDKTDMNRHHYSLYVHGCRLIFLFRQDPSEEKKYRPAEFHWKLNQVCDEEWHHYVLNVEFPSVTLYVDGTSHEPFSVTEDYPLHPSKIETQLVVGACWQGGDLHMTQFFRGNLAGLTLRSGKLADKKVIDCLYTCKEGLDLQVLEDSGRGVQIQAHPSQLVLTLEGEDLGELDKAMQHISYLNSRQFPTPGIRRLKITSTIKCFNEATCISVPPVDGYVMVLQPEEPKISLSGVHHFARAASEFESSEGVFLFPELRIISTITREVEPEGDGAEDPTVQESLVSEEIVHDLDTCEVTVEGEELNHEQESLEVDMARLQQKGIEVSSSELGMTFTGVDTMASYEEVLHLLRYRNWHARSLLDRKFKLICSELNGRYISNEFKVEVNVIHTANPMEHANHMAAQPQFVHPEHRSFVDLSGHNLANPHPFAVVPSTATVVIVVCVSFLVFMIILGVFRIRAAHRRTMRDQDTGKENEMDWDDSALTITVNPMETYEDQHSSEEEEEEEEEEESEDGEEEDDITSAESESSEEEEGEQGDPQNATRQQQLEWDDSTLSY

SEQ ID NO: 1805 - protein, 672 aa, Artificial Sequence; identical to SEQ ID NO: 1804
  Synthetic polypeptide

SEQ ID NO: 1806 - protein, 670 aa, Artificial Sequence
  Synthetic polypeptide
RPKIDIAVGAPFEGLGKVYIYHSSSKGLLRQPQQVIHGEKLGLPGLATFGYSLSGQMDVDENFYPDLLVGSLSDHIVLLRARPVINIVHKTLVPRPAVLDPALCTATSCVQVELCFAYNQSAGNPNYRRNITLAYTLEADRDRRPPRLRFAGSESAVFHGFFSMPEMRCQKLELLLMDNLRDKLRPIIISMNYSLPLRMPDRPRLGLRSLDAYPILNQAQALENHTEVQFQKECGPDNKCESNLQMRAAFVSEQQQKLSRLQYSRDVRKLLLSINVTNTRTSERSGEDAHEALLTLVVPPALLLSSVRPPGACQANETIFCELGNPFKRNQRMELLIAFEVIGVTLHTRDLQVQLQLSTSSHQDNLWPMILTLLVDYTLQTSLSMVNHRLQSFFGGTVMGESGMKTVEDVGSPLKYEFQVGPMGEGLVGLGTLVLGLEWPYEVSNGKWLLYPTEITVHGNGSWPCRPPGDLINPLNLTLSDPGDRPSSPQRRRRQLDPGGGQGPPPVTLAAAKKAKSETVLTCATGRAHCVWLECPIPDAPVVTNVTVKARVWNSTFIEDYRDFDRVRVNGWATLFLRTSIPTINMENKTTWFSVDIDSELVEELPAEIELWLVLVAVGAGLLLLGLIILLLWKCGFFKRARTRALYEAKRQKAEMKSQPSETERLTDDY

SEQ ID NO: 1807 - protein, 667 aa, Artificial Sequence
  Synthetic polypeptide
VEYPKFKNPESEMLKNPKLFACQHDAQRKCSLEYFGFWTFRIPDAQPVYPELQITNVVEANQPVTIQNWCKRGRKQCKTHPHFVIPYRCLVGEFVSDALLVPDKCKFLHQERMDVCETHLHWHTVAKETCSEKSTNLHDYGMLLPCGIDKFRGVEFVCCPLAEESDNVDSADAEEDDSDVWWGGADTDYADGSEDKVVEVAEEEEVAEVEEEEADDDEDDEDGDEVEEEAEEPYEEATERTTSIATTTTTTTESVEEVVRVPTTAASTPDAVDKYLETPGDENEHAHFQKAKERLEAKHRERMSQVMREWEEAERQAKNLPKADKKAVIQHFQEKVESLEQEAANERQQLVETHMARVEAMLNDRRRLALENYITALQAVPPRPRHVFNMLKKYVRAEQKDRQHTLKHFEHVRMVDPKKAAQIRSQVMTHLRVIYERMNQSLSLLYNVPAVAEEIQDEVDELLQKEQNYSDDVLANMISEPRISYGNDALMPSLTETKTTVELLPVNGEFSLDDLQPWHSFGADSVPANTENEVEPVDARPAADRGLTTRPGSGLTNIKTEEISEVKMDAEFRHDSGYEVHHQKLVFFAEDVGSNKGAIIGLMVGGVVIATVIVITLVMLKKKQYTSIHHGVVEVDAAVTPEERHLSKMQQNGYENPTYKFFEQMQN

SEQ ID NO: 1808 - protein, 667 aa, Artificial Sequence; identical to SEQ ID NO: 1807
  Synthetic polypeptide

SEQ ID NO: 1809 - protein, 667 aa, Artificial Sequence; identical to SEQ ID NO: 1807
  Synthetic polypeptide

SEQ ID NO: 1810 - protein, 665 aa, Artificial Sequence
  Synthetic polypeptide
PSSVAQTCSRSALSERIAWAQEYKVTVYPELQITNVVEANQPVTIQNWCKRGRKQCKTHPHFVIPYRCLVGEFVSDALLVPDKCKFLHQERMDVCETHLHWHTVAKETCSEKSTNLHDYGMLLPCGIDKFRGVEFVCCPLAEESDNVDSADAEEDDSDVWWGGADTDYADGSEDKVVEVAEEEEVAEVEEEEADDDEDDEDGDEVEEEAEEPYEEATERTTSIATTTTTTTESVEEVVRVSQSLLKTTQEPLARDPVKLPTTAASTPDAVDKYLETPGDENEHAHFQKAKERLEAKHRERMSQVMREWEEAERQAKNLPKADKKAVIQHFQEKVESLEQEAANERQQLVETHMARVEAMLNDRRRLALENYITALQAVPPRPRHVFNMLKKYVRAEQKDRQHTLKHFEHVRMVDPKKAAQIRSQVMTHLRVIYERMNQSLSLLYNVPAVAEEIQDEVDELLQKEQNYSDDVLANMISEPRISYGNDALMPSLTETKTTVELLPVNGEFSLDDLQPWHSFGADSVPANTENEVEPVDARPAADRGLTTRPGSGLTNIKTEEISEVKMDAEFRHDSGYEVHHQKLVFFAEDVGSNKGAIIGLMVGGVVIATVIVITLVMLKKKQYTSIHHGVVEVDAAVTPEERHLSKMQQNGYENPTYKFFEQMQN

SEQ ID NO: 1811 - protein, 665 aa, Artificial Sequence
  Synthetic polypeptide
VMTLSCEIPSSGSSWLKNSPTEHPVTPTPAPQRTTPFDCNFPLPTRILQNGPTPSPFPDSFSDSACLHPVGEFVSDALLVPDKCKFLHQERMDVCETHLHWHTVAKETCSEKSTNLHDYGMLLPCGIDKFRGVEFVCCPLAEESDNVDSADAEEDDSDVWWGGADTDYADGSEDKVVEVAEEEEVAEVEEEEADDDEDDEDGDEVEEEAEEPYEEATERTTSIATTTTTTTESVEEVVRVSQSLLKTTQEPLARDPVKLPTTAASTPDAVDKYLETPGDENEHAHFQKAKERLEAKHRERMSQVMREWEEAERQAKNLPKADKKAVIQHFQEKVESLEQEAANERQQLVETHMARVEAMLNDRRRLALENYITALQAVPPRPRHVFNMLKKYVRAEQKDRQHTLKHFEHVRMVDPKKAAQIRSQVMTHLRVIYERMNQSLSLLYNVPAVAEEIQDEVDELLQKEQNYSDDVLANMISEPRISYGNDALMPSLTETKTTVELLPVNGEFSLDDLQPWHSFGADSVPANTENEVEPVDARPAADRGLTTRPGSGLTNIKTEEISEVKMDAEFRHDSGYEVHHQKLVFFAEDVGSNKGAIIGLMVGGVVIATVIVITLVMLKKKQYTSIHHGVVEVDAAVTPEERHLSKMQQNGYENPTYKFFEQMQN

SEQ ID NO: 1812 - protein, 663 aa, Artificial Sequence
  Synthetic polypeptide
PSSVAQTCSRSALSERIAWAQEYKVYPELQITNVVEANQPVTIQNWCKRGRKQCKTHPHFVIPYRCLVGEFVSDALLVPDKCKFLHQERMDVCETHLHWHTVAKETCSEKSTNLHDYGMLLPCGIDKFRGVEFVCCPLAEESDNVDSADAEEDDSDVWWGGADTDYADGSEDKVVEVAEEEEVAEVEEEEADDDEDDEDGDEVEEEAEEPYEEATERTTSIATTTTTTTESVEEVVRVSQSLLKTTQEPLARDPVKLPTTAASTPDAVDKYLETPGDENEHAHFQKAKERLEAKHRERMSQVMREWEEAERQAKNLPKADKKAVIQHFQEKVESLEQEAANERQQLVETHMARVEAMLNDRRRLALENYITALQAVPPRPRHVFNMLKKYVRAEQKDRQHTLKHFEHVRMVDPKKAAQIRSQVMTHLRVIYERMNQSLSLLYNVPAVAEEIQDEVDELLQKEQNYSDDVLANMISEPRISYGNDALMPSLTETKTTVELLPVNGEFSLDDLQPWHSFGADSVPANTENEVEPVDARPAADRGLTTRPGSGLTNIKTEEISEVKMDAEFRHDSGYEVHHQKLVFFAEDVGSNKGAIIGLMVGGVVIATVIVITLVMLKKKQYTSIHHGVVEVDAAVTPEERHLSKMQQNGYENPTYKFFEQMQN

SEQ ID NO: 1813 - protein, 662 aa, Artificial Sequence
  Synthetic polypeptide
STKLEIRNTRNLTYIDPDALKELPLLKFLGIFNTGLKMFPDLTKVYSTDIFFILEITDNPYMTSIPVNAFQGLCNETLTLKLYNNGFTSVQGYAFNGTKLDAVYLNKNKYLTVIDKDAFGGVYSGPSLLDVSQTSVTALPSKGLEHLKELIARNTWTLKKLPLSLSFLHLTRADLSYPSHCCAFKNQKKIRGILESLMCNESSMQSLRQRKSVNALNSPLHQEYEENLGDSIVGYKEKSKFQDTHNNAHYYVFFEEQEDEIIGFGQELKNPQEETLQAFDSHYDYTICGDSEDMVCTPKSDEFNPCEDIMGYKFLRIVVWFVSLLALLGNVFVLLILLTSHYKLNVPRFLMCNLAFADFCMGMYLLLIASVDLYTHSEYYNHAIDWQTGPGCNTAGFFTVFASELSVYTLTVITLERWYAITFAMRLDRKIRLRHACAIMVGGWVCCFLLALLPLVGISSYAKVSICLPMDTETPLALAYIVFVLTLNIVAFVIVCCCYVKIYITVRNPQYNPGDKDTKIAKRMAVLIFTDFICMAPISFYALSAILNKPLITVSNSKILLVLFYPLNSCANPFLYAIFTKAFQRDVFILLSKFGICKRQAQAYRGQRVPPKNSTDIQVQKVTHEMRQGLHNMEDVYELIENSHLTPKKQGQISEEYMQTVL

SEQ ID NO: 1814 - protein, 662 aa, Artificial Sequence; identical to SEQ ID NO: 1813
  Synthetic polypeptide

SEQ ID NO: 1815 - protein, 662 aa, Artificial Sequence
  Synthetic polypeptide
SCCSFWKPCNCSSYSEKDDLENVKSLGTDLMNEMRRITSDFRIGFGSFVEKTVMPYISTTPAKLRNPCTSEQNCTSPFSYKNVLSLTNKGEVFNELVGKQRISGNLDSPEGGFDAIMQVAVCGSLIGWRNVTRLLVFSTDAGFHFAGDGKLGGIVLPNDGQCHLENNMYTMSHYYDYPSIAHLVQKLSENNIQTIFAVTEEFQPVYKELKNLIPKSAVGTLSANSSNVIQLIIDAYNSLSSEVILENGKLSEGVTISYKSYCKNGVNGTGENGRKCSNISIGDEVQFEISITSNKCPKKDSDSFKIRPLGFTEEVEVILQYICECECQSEGIPESPKCHEGNGTFECGACRCNEGRVGRHCECSTDEVNSEDMDAYCRKENSSEICSNNGECVCGQCVCRKRDNTNEIYSGKFCECDNFNCDRSNGLICGGNGVCKCRVCECNPNYTGSACDCSLDTSTCEASNGQICNGRGICECGVCKCTDPKFQGQTCEMCQTCLGVCAEHKECVQCRAFNKGEKKDTCTQECSYFNITKVESRDKLPQPVQPDPVSHCKEKDVDDCWFYFTYSVNGNNEVMVHVVENPECPTGPDIIPIVAGVVAGIVLIGLALLLIWKLLMIIHDRREFAKFEKEKMNAKWDTQENPIYKSPINNFKNPNYGRKAGL

SEQ ID NO: 1816 - protein, 660 aa, Artificial Sequence
  Synthetic polypeptide
ICRLIRIPVGEFVSDALLVPDKCKFLHQERMDVCETHLHWHTVAKETCSEKSTNLHDYGMLLPCGIDKFRGVEFVCCPLAEESDNVDSADAEEDDSDVWWGGADTDYADGSEDKVVEVAEEEEVAEVEEEEADDDEDDEDGDEVEEEAEEPYEEATERTTSIATTTTTTTESVEEVVREVCSEQAETGPCRAMISRWYFDVTEGKCAPFFYGGCGGNRNNFDTEEYCMAVCGSAMSQSLLKTTQEPLARDPVKLPTTAASTPDAVDKYLETPGDENEHAHFQKAKERLEAKHRERMSQVMREWEEAERQAKNLPKADKKAVIQHFQEKVESLEQEAANERQQLVETHMARVEAMLNDRRRLALENYITALQAVPPRPRHVFNMLKKYVRAEQKDRQHTLKHFEHVRMVDPKKAAQIRSQVMTHLRVIYERMNQSLSLLYNVPAVAEEIQDEVDELLQKEQNYSDDVLANMISEPRISYGNDALMPSLTETKTTVELLPVNGEFSLDDLQPWHSFGADSVPANTENEVEPVDARPAADRGLTTRPGSGLTNIKTEEISEVKMDAEFRHDSGYEVHHQKLVFFAEDVGSNKGAIIGLMVGGVVIATVIVITLVMLKKKQYTSIHHGVVEVDAAVTPEERHLSKMQQNGYENPTYKFFEQMQN

SEQ ID NO: 1817 - protein, 660 aa, Artificial Sequence; identical to SEQ ID NO: 1816
  Synthetic polypeptide

SEQ ID NO: 1818 - protein, 659 aa, Artificial Sequence
  Synthetic polypeptide
SSNPSSGKCFQTAHFYLEDSTSPRVISTPPTPIFPISDDVGAIPIKHFPKHVADLHASSGFTEEFETLKEFYQEVQSCTVDLGITADSSNHPDNKHKNRYINIVAYDHSRVKLAQLAEKDGKLTDYINANYVDGYNRPKAYIAAQGPLKSTAEDFWRMIWEHNVEVIVMITNLVEKGRRKCDQYWPADGSEEYGNFLVTQKSVQVLAYYTVRNFTLRNTKIKKGSQKGRPSGRVVTQYHYTQWPDMGVPEYSLPVLTFVRKAAYAKRHAVGPVVVHCSAGVGRTGTYIVLDSMLQQIQHEGTVNIFGFLKHIRSQRNYLVQTEEQYVFIHDTLVEAILSKETEVLDSHIHAYVNALLIPGPAGKTKLEKQFQLLSQSNIQQSDYSAALKQCNREKNRTSSIIPVERSRVGISSLSGEGTDYINASYIMGYYQSNEFIITQHPLLHTIKDFWRMIWDHNAQLVVMIPDGQNMAEDEFVYWPNKDEPINCESFKVTLMAEEHKCLSNEEKLIIQDFILEATQDDYVLEVRHFQCPKWPNPDSPISKTFELISVIKEEAANRDGPMIVHDEHGGVTAGTFCALTTLMHQLEKENSVDVYQVAKMINLMRPGVFADIEQYQFLYKVILSLVSTRQEENPSTSLDSNGAALPDGNIAESLESLV

SEQ ID NO: 1819 - protein, 659 aa, Artificial Sequence
  Synthetic polypeptide
TVSSIRAETVGISTAHTGPGTHPGLSEHLLNVCQGTSNKLTQLGTFEDHFLSLQRMFNNCEVVLGNLEITYVQRNYDLSFLKTIQEVAGYVLIALNTVERIPLENLQIIRGNMYYENSYALAVLSNYDANKTGLKELPMRNLQEILHGAVRFSNNPALCNVESIQWRDIVSSDFLSNMSMDFQNHLGSCQKCDPSCPNGSCWGAGEENCQKLTKIICAQQCSGRCRGKSPSDCCHNQCAAGCTGPRESDCLVCRKFRDEATCKDTCPPLMLYNPTTYQMDVNPEGKYSFGATCVKKCPRNYVVTDHGSCVRACGADSYEMEEDGVRKCKKCEGPCRKVCNGIGIGEFKDSLSINATNIKHFKNCTSISGDLHILPVAFRGDSFTHTPPLDPQELDILKTVKEITGFLLIQAWPENRTDLHAFENLEIIRGRTKQHGQFSLAVVSLNITSLGLRSLKEISDGDVIISGNKNLCYANTINWKKLFGTSGQKTKIISNRGENSCKATGQVCHALCSPEGCWGPEPRDCVSCRNVSRGRECVDKCNLLEGEPREFVENSECIQCHPECLPQAMNITCTGRGPDNCIQCAHYIDGPHCVKTCPAGVMGENNTLVWKYADAGHVCHLCHPNCTYGCTGPGLEGCPTNGSYIVSHFPRSFYKMSVH

SEQ ID NO: 1820 - protein, 659 aa, Artificial Sequence
  Synthetic polypeptide
SCCSFWKPCNCSSYSEKDDLENVKSLGTDLMNEMRRITSDFRIGFGSFVEKTVMPYISTTPAKLRNPCTSEQNCTSPFSYKNVLSLTNKGEVFNELVGKQRISGNLDSPEGGFDAIMQVAVCGSLIGWRNVTRLLVFSTDAGFHFAGDGKLGGIVLPNDGQCHLENNMYTMSHYYDYPSIAHLVQKLSENNIQTIFAVTEEFQPVYKELKNLIPKSAVGTLSANSSNVIQLIIDAYNSLSSEVILENGKLSEGVTISYKSYCKNGVNGTGENGRKCSNISIGDEVQFEISITSNKCPKKDSDSFKIRPLGFTEEVEVILQYICECECQSEGIPESPKCHEGNGTFECGACRCNEGRVGRHCECSTDEVNSEDMDAYCRKENSSEICSNNGECVCGQCVCRKRDNTNEIYSGKFCECDNFNCDRSNGLICGGNGVCKCRVCECNPNYTGSACDCSLDTSTCEASNGQICNGRGICECGVCKCTDPKFQGQTCEMCQTCLGVCAEHKECVQCRAFNKGEKKDTCTQECSYFNITKVESRDKLPQPVQPDPVSHCKEKDVDDCWFYFTYSVNGNNEVMVHVVENPECPTGPDIIPIVAGVVAGIVLIGLALLLIWKLLMIIHDRREFAKFEKEKMNAKWDTGENPIYKSAVTTVVNPKYEGK

SEQ ID NO: 1821 - protein, 659 aa, Artificial Sequence; identical to SEQ ID NO: 1820
  Synthetic polypeptide

SEQ ID NO: 1822 - protein, 658 aa, Artificial Sequence
  Synthetic polypeptide
AMLSWELITAAHELGVAHPPGYPLFTLVAKLAITLFPFGSIAYRVNLLCGLFGAVAASLLFFTVFRLSGSSAGGILAAGVFSFSRLTWQWSIAAEVFSLNNLFVGLLMALTVHFEEAATAKERSKVAKIGAFCCGLSLCNQHTIILYVLCIIPWILFQLLKKKELSLGSLLKLSLYFSAGLLPYVHLPISSYLNHARWTWGDQTTLQGFLTHFLREEYGTFSLAKSEIGSSMSEILLSQVTNMRTELSFNIQALAVCANICLATKDRQNPSLVWLFTGMFCIYSLFFAWRANLDISKPLFMGVVERFWMQSNAVVAVLAGIGLAAVVSETNRVLNSNGLQCLEWLSATLFVVYQIYSNYSVCDQRTNYVIDKFAKNLLTSMPHDAIILLRGDLPGNSLRYMHYCEGLRPDISLVDQEMMTYEWYLPKMAKHLPGVNFPGNRWNPVEGILPSGMVTFNLYHFLEVNKQKETFVCIGIHEGDPTWKKNYSLWPWGSCDKLVPLEIVFNPEEWIKLTKSIYNWTEEYGRFDPSSWESVANEEMWQARMKTPFFIFNLAETAHMPSKVKAQLYAQAYDLYKEIVYLQKEHPVNWHKNYAIACERMLRLQARDADPEVLLSETIRHFRLYSQKAPNDPQQADILGALKHLRKELQSLRNRKNV

SEQ ID NO: 1823 - protein, 657 aa, Artificial Sequence
  Synthetic polypeptide
PSSVAQTCSRSALSERIAWAQEYKITNVVEANQPVTIQNWCKRGRKQCKTHPHFVIPYRCLVGEFVSDALLVPDKCKFLHQERMDVCETHLHWHTVAKETCSEKSTNLHDYGMLLPCGIDKFRGVEFVCCPLAEESDNVDSADAEEDDSDVWWGGADTDYADGSEDKVVEVAEEEEVAEVEEEEADDDEDDEDGDEVEEEAEEPYEEATERTTSIATTTTTTTESVEEVVRVSQSLLKTTQEPLARDPVKLPTTAASTPDAVDKYLETPGDENEHAHFQKAKERLEAKHRERMSQVMREWEEAERQAKNLPKADKKAVIQHFQEKVESLEQEAANERQQLVETHMARVEAMLNDRRRLALENYITALQAVPPRPRHVFNMLKKYVRAEQKDRQHTLKHFEHVRMVDPKKAAQIRSQVMTHLRVIYERMNQSLSLLYNVPAVAEEIQDEVDELLQKEQNYSDDVLANMISEPRISYGNDALMPSLTETKTTVELLPVNGEFSLDDLQPWHSFGADSVPANTENEVEPVDARPAADRGLTTRPGSGLTNIKTEEISEVKMDAEFRHDSGYEVHHQKLVFFAEDVGSNKGAIIGLMVGGVVIATVIVITLVMLKKKQYTSIHHGVVEVDAAVTPEERHLSKMQQNGYENPTYKFFEQMQN

SEQ ID NO: 1824 - protein, 657 aa, Artificial Sequence
  Synthetic polypeptide
AKITPLHSSLGEEETPKESLTEAEVATEKEGEDGDQPTTPPKPLKTSKAETPTESVSEPEVATKQELQEEEEQTKPPRRAPKTLSSFFTPRKPAVKKEVKEEEPGAPGKEGAAEGPLDPSGYNPAKNNYHPVEDACWKPGQKVPYLAVARTFEKIEEVSARLRMVETLSNLLRSVVALSPPDLLPVLYLSLNHLGPPQQGLELGVGDGVLLKAVAQATGRQLESVRAEAAEKGDVGLVAENSRSTQRLMLPPPPLTASGVFSKFRDIARLTGSASTAKKIDIIKGLFVACRHSEARFIARSLSGRLRLGLAEQSVLAALSQAVSLTPPGQEFPPAMVDAGKGKTAEARKTWLEEQGMILKQTFCEVPDLDRIIPVLLEHGLERLPEHCKLSPGIPLKPMLAHPTRGISEVLKRFEEAAFTCEYKYDGQRAQIHALEGGEVKIFSRNQEDNTGKYPDIISRIPKIKLPSVTSFILDTEAVAWDREKKQIQPFQVLTTRKRKEVDASEIQVQVCLYAFDLIYLNGESLVREPLSRRRQLLRENFVETEGEFVFATSLDTKDIEQIAEFLEQSVKDSCEGLMVKTLDVDATYEIAKRSHNWLKLKKDYLDGVGDTLDLVVIGAYLGRGKRAGRYGGFLLASYDEDSEELQAICKVLGNWG

SEQ ID NO: 1825 - protein, 657 aa, Artificial Sequence
  Synthetic polypeptide
LATAQDLNITCRFAGVFHVEKNGRYSISRTEAADLCKAFNSTLPTMAQMEKALSIGFETCRYGFIEGHVVIPRIHPNSICAANNTGVYILTSNTSQYDTYCFNASAPPEEDCTSVTDLPNAFDGPITITIVNRDGTRYVQKGEYRTNPEDIYPSNPTDDDVSSGSSSERSSTSGGYIFYTFSTVHPIPDEDSPWITDSTDRIPATTLMSTSATATETATKRQETWDWFSWLFLPSESKNHLHTTTQMAGTSSNTISAGWEPNEENEDERDRHLSFSGSGIDDDEDFISSTISTTPRAFDHTKQNQDWTQWNPSHSNPEVLLQTTTRMTDVDRNGTTAYEGNWNPEAHPPLIHHEHHEEEETPHSTSTIQATPSSTTEETATQKEQWFGNRWHEGYRQTPKEDSHSTTGTAAASAHTSHPMQGRTTPSPEDSSWTDFFNPISHPMGRGHQAGRRMDMDSSHSITLQPTANPNTGLVEDLDRTGPLSMTTQQSNSQSFSTSHEGLEEDKDHPTTSTLTSSRDQDTFHPSGGSHTTHGSESDGHSHGSQEGGANTTSGPIRTPQIPEWLIILASLLALALILAVCIAVNSRRRCGQKKKLVINSGNGAVEDRKPSGLNGEASKSQEMVHLVNKESSETPDQFMTADETRNLQNVDMKIGV

SEQ ID NO: 1826 - protein, 657 aa, Artificial Sequence
  Synthetic polypeptide
WLRLVIPALWEAKAGGSPEIRSSRPAWPTRFRPHQDANPEKPRVAALIDRLIAFKNNDNGAWVRGGDIIVQNSAFADNGIGLTFASDGSFPSDEGSSQEVSESLFVGESRNYGFQGGQNKYVGTGGIDQKPRTLPRNRTFPIRGFQIYDGPIHLTRSTFKKYVPTPDRYSSAIGFLMKNSWQITPRNNISLVKFGPHVSLNVFFGKPGPWFEDCEMDGDKNSIFHDIDGSVTGYKDAYVGRMDNYLIRHPSCVNVSKWNAVICSGTYAQVYVQTWSTQNLSMTITRDEYPSNPMVLRGINQKAAFPQYQPVVMLEKGYTIHWNGPAPRTTFLYLVNFNKNDWIRVGLCYPSNTSFQVTFGYLQRQNGSLSKIEEYEPVHSLEELQRKQSERKFYFDSSTGLLFLYLKAKSHRHGHSYCSSQGCERVKIQAATDSKDISNCMAKAYPQYYRKPSVVKRMPAMLTGLCQGCGTRQVVFTSDPHKSYLPVQFQSPDKAETQRGDPSVISVNGTDFTFRSAGVLLLVVDPCSVPFRLTEKTVFPLADVSRIEEYLKTGIPPRSIVLLSTRGEIKQLNISHLLVPLGLAKPAHLYDKGSTIFLGFSGNFKPSWTKLFTSPAGQGLGVLEQFIPLQLDEYGCPRATTVRRRDLELLKQASKAH

SEQ ID NO: 1827 - protein, 657 aa, Artificial Sequence; identical to SEQ ID NO: 1826
  Synthetic polypeptide

SEQ ID NO: 1828 - protein, 656 aa, Artificial Sequence
  Synthetic polypeptide
GRERWLTPVIPALWEAKAGGSREKGSSSCNVRPACTDKDYFYTHTACDANGETQLMYKWAKPKICSEDLEGAVKLPASGVKTHCPPCNPGFFKTNNSTCQPCPYGSYSNGSDCTRCPAGTEPAVGFEYKWWNTLPTNMETTVLSGINFEYKGMTGWEVAGDHIYTAAGASDNDFMILTLVVPGFRPPQSVMADTENKEVARITFVFETLCSVNCELYFMVGVNSRTNTPVETWKGSKGKQSYTYIIEENTTTSFTWAFQRTTFHEASRKYTNDVAKIYSINVTNVMNGVASYCRPCALEASDVGSSCTSCPAGYYIDRDSGTCHSCPTNTILKAHQPYGVQACVPCGPGTKNNKIHSLCYNDCTFSRNTPTRTFNYNFSALANTVTLAGGPSFTSKGLKYFHHFTLSLCGNQGRKMSVCTDNVTDLRIPEGESGFSKSITAYVCQAVIIPPEVTGYKAGVSSQPVSLADRLIGVTTDMTLDGITSPAELFHLESLGIPDVIFFYRSNDVTQSCSSGRSTTIRVRCSPQKTVPGSLLLPGTCSDGTCDGCNFHFLWESAAACPLCSVADYHAIVSSCVAGIQKTTYVWREPKLCSGGISLPEQRVTICKTIDFWLKVGISAGTCTAILLTVLTCYFWKKNQKLEYKYSKLVMNATLK

SEQ ID NO: 1829 - protein, 656 aa, Artificial Sequence
  Synthetic polypeptide
GAGAEGVSVLTTLERRFNLQSADVGVIASSFEIGNLALILFVSYFGARGHRPRLIGCGGIVMALGALLSALPEFLTHQYKYEAGEIRWGAEGRDVCAANGSGGDEGPDPDLICRNRTATNMMYLLLIGAQVLLGIGATPVQPLGVSYIDDHVRRKDSSLYIGILFTMLVFGPACGFILGSFCTKIYVDAVFIDTSNLDITPDDPRWIGAWWGGFLLCGALLFFSSLLMFGFPQSLPPHSEPAMESEQAMLSEREYERPKPSNGVLRHPLEPDSSASCFQQLRVIPKVTKHLLSNPVFTCIILAACMEIAVVAGFAAFLGKYLEQQFNLTTSSANQLLGMTAIPCACLGIFLGGLLVKKLSLSALGAIRMAMLVNLVSTACYVSFLFLGCDTGPVAGVTVPYGNSTAPGSALDPYSPCNNNCECQTDSFTPVCGADGITYLSACFAGCNSTNLTGCACLTTVPAENATVVPGKCPSPGCQEAFLTFLCVMCICSLIGAMAQTPSVIILIRTVSPELKSYALGVLFLLLRLLGFIPPPLIFGAGIDSTCLFWSTFCGEQGACVLYDNVVYRYLYVSIAIALKSFAFILYTTTWQCLRKNYKRYIKNHEGGLSTSEFFASTLTLDNLGRDPVPANQTHRTKFIYNLEDHEWCENMESVL

SEQ ID NO: 1830 - protein, 656 aa, Artificial Sequence
  Synthetic polypeptide
AKITPLHSSLGEETPKESLTEAEVATEKEGEDGDQPTTPPKPLKTSKAETPTESVSEPEVATKQELQEEEEQTKPPRRAPKTLSSFFTPRKPAVKKEVKEEEPGAPGKEGAAEGPLDPSGYNPAKNNYHPVEDACWKPGQKVPYLAVARTFEKIEEVSARLRMVETLSNLLRSVVALSPPDLLPVLYLSLNHLGPPQQGLELGVGDGVLLKAVAQATGRQLESVRAEAAEKGDVGLVAENSRSTQRLMLPPPPLTASGVFSKFRDIARLTGSASTAKKIDIIKGLFVACRHSEARFIARSLSGRLRLGLAEQSVLAALSQAVSLTPPGQEFPPAMVDAGKGKTAEARKTWLEEQGMILKQTFCEVPDLDRIIPVLLEHGLERLPEHCKLSPGIPLKPMLAHPTRGISEVLKRFEEAAFTCEYKYDGQRAQIHALEGGEVKIFSRNQEDNTGKYPDIISRIPKIKLPSVTSFILDTEAVAWDREKKQIQPFQVLTTRKRKEVDASEIQVQVCLYAFDLIYLNGESLVREPLSRRRQLLRENFVETEGEFVFATSLDTKDIEQIAEFLEQSVKDSCEGLMVKTLDVDATYEIAKRSHNWLKLKKDYLDGVGDTLDLVVIGAYLGRGKRAGRYGGFLLASYDEDSEELQAICKVLGNWG

SEQ ID NO: 1831 - protein, 656 aa, Artificial Sequence; identical to SEQ ID NO: 1830
  Synthetic polypeptide

SEQ ID NO: 1832 - protein, 656 aa, Artificial Sequence
  Synthetic polypeptide
ALDRDLNITCRFAGVFHVEKNGRYSISRTEAADLCKAFNSTLPTMAQMEKALSIGFETCRYGFIEGHVVIPRIHPNSICAANNTGVYILTSNTSQYDTYCFNASAPPEEDCTSVTDLPNAFDGPITITIVNRDGTRYVQKGEYRTNPEDIYPSNPTDDDVSSGSSSERSSTSGGYIFYTFSTVHPIPDEDSPWITDSTDRIPATTLMSTSATATETATKRQETWDWFSWLFLPSESKNHLHTTTQMAGTSSNTISAGWEPNEENEDERDRHLSFSGSGIDDDEDFISSTISTTPRAFDHTKQNQDWTQWNPSHSNPEVLLQTTTRMTDVDRNGTTAYEGNWNPEAHPPLIHHEHHEEEETPHSTSTIQATPSSTTEETATQKEQWFGNRWHEGYRQTPKEDSHSTTGTAAASAHTSHPMQGRTTPSPEDSSWTDFFNPISHPMGRGHQAGRRMDMDSSHSITLQPTANPNTGLVEDLDRTGPLSMTTQQSNSQSFSTSHEGLEEDKDHPTTSTLTSSRDQDTFHPSGGSHTTHGSESDGHSHGSQEGGANTTSGPIRTPQIPEWLIILASLLALALILAVCIAVNSRRRCGQKKKLVINSGNGAVEDRKPSGLNGEASKSQEMVHLVNKESSETPDQFMTADETRNLQNVDMKIGV

SEQ ID NO: 1833 - protein, 656 aa, Artificial Sequence
  Synthetic polypeptide
AWRGGSHLNPSTLGGQAEEDEDKEDDFRAPLYKTVEIKGIQVRMKWCATCRFYRPPRCSHCSVCDNCVEEFDHHCPWVNNCIGRRNYRYFFLFLLSLTAHIMGVFGFGLLYVLYHIEELSGVRTAVTMAVMCVAGLFFIPVAGLTGFHVVLVARGRTTNEQVTGKFRGGVNPFTNGCCNNVSRVLCSSPAPRYLGRPKKEKTIVIRPPFLRPEVSDGQITVKIMDNGIQGELRRTKSKGSLEITESQSADAEPPPPPKPDLSRYTGLRTHLGLATNEDSSLLAKDSPPTPTMYKYRPGYSSSSTSAAMPHSSSAKLSRGDSLKEPTSIAESSRHPSYRSEPSLEPESFRSPTFGKSFHFDPLSSGSRSSSLKSAQGTGFELGQLQSIRSEGTTSTSYKSLANQTRNGSLSYDSLLTPSDSPDFESVQAGPEPDPPLGYTSPFLSARLAQQREAERHPRLVPTGPTHREPSPVRYDNLSRHIVASLQEREKLLRQSPPLPGREEEPGLGDSGIQSTPGSGHAPRTSSSSDDSKRSPLGKTPLGRPAVPRFGKPDGLRGRGVGSPEPGPTAPYLGRSMSYSSQKAQPGVSETEEVALQPLLTPKDEVQLKTTYSKSNGQPKSLGSASPGPGQPPLSSPTRGGVKKVSGVGGTTYEISV

SEQ ID NO: 1834 - protein, 656 aa, Artificial Sequence; identical to SEQ ID NO: 1833
  Synthetic polypeptide

SEQ ID NO: 1835 - protein, 655 aa, Artificial Sequence
  Synthetic polypeptide
PRPLTQDPKCAPLKPLSSLLTDRSGIQWILNTSSLLCDCHLKWLLQWLVDNNFQHSVNVSCAHPEWLAGQSILNVDLKDFVCDDFLKPQIRTHPETIIALRGMNVTLTCTAVSSSDSPMSTVWRKDSEILYDVDTENFVRYWQQAGEALEYTSILHLFNVNFTDEGKYQCIVTNHFGSNYSQKAKLTVNEMPSFLKTPMDLTIRTGAMARLECAAEGHPAPQISWQKDGGTDFPAARERRMHVMPEDDVFFIANVKIEDMGIYSCMAQNTAGGLSANASLTVLETPSFIRPLEDKTVTRGETAVLQCIAGGSPAPRLNWTKDDGPLLVTERHFFAAANQLLIIVDAGLEDAGKYTCIMSNTLGTERGHIYLNVISSPNCDSSQSSIGHEDDGWTTVGIVIIVVVCCVVGTSLIWVIVIYHMRRKNEDYSITNTEELNLPADIPSYLSSQGTLSEPQEGYSNSEAGSHQQLMPPANGYIHKGTDGGTGTRVICSDCYDNANIYSRTREYCPYTYIAEEDVLDQTLSSLMVQMPKETYLVHPPQDTTALESLIPSANREPSAFPTNHERISEKKLPSTQMSGETLQRPVWNINRELGLPHPPFSQQPVHESPQLHQNEGLAGREPDCSASSMSCHRLQDHAFDFSRTRNIQDGSEGT

SEQ ID NO: 1836 - protein, 655 aa, Artificial Sequence
  Synthetic polypeptide
EAEADKSPEFAQGPLLDSLYWTKWYNNQSLGHGSHSFIYYENMLLGVPRLRQLKVRNDSCVVHEDFREDILSCYDVYSPDKEEQLPFGPFNGTAWTYHSQDELGGFSHWGRLTSYSGGGYYLDLPGSRQGSAEALRALQEGLWLDRGTRVVFIDFSVYNANINLFCVLRLVVEFPATGGAIPSWQIRTVKLIRYVSNWDFFIVGCEVIFCVFIFYYVVEEILELHIHRLRYLSSIWNILDLVVILLSIVAVGFHIFRTLEVNRLMGKLLQQPNTYADFEFLAFWQTQYNNMNAVNLFFAWIKIFKYISFNKTMTQLSSTLARCAKDILGFAVMFFIVFFAYAQLGYLLFGTQVENFSTFIKCIFTQFRIILGDFDYNAIDNANRILGPAYFVTYVFFVFFVLLNMFLAIINDTYSEVKEELAGQKDELQLSDLLKQGYNKTLLRLRLRKERVSDVQKVLQGGEQEIQFEDFTNTLRELGHAEHEITELTATFTKFDRDGNRILDEKEQEKMRQDLEEERVALNTEIEKLGRSIVSSPQGKSGPEAARAGGWVSGEEFYMLTRRVLQLETVLEGVVSQIDAVGSKLKMLERKGWLAPSPGVKEQAIWKHPQPAPAVTPDPWGVQGGQESEVPYKREEEALEERRLSRGEIPTLQRS

SEQ ID NO: 1837 - protein, 654 aa, Artificial Sequence
  Synthetic polypeptide
DVPASPSAMIVSFLRPPQPCGTVSVLTTLERRFNLQSADVGVIASSFEIGNLALILFVSYFGARGHRPRLIGCGGIVMALGALLSALPEFLTHQYKYEAGEIRWGAEGRDVCAANGSGGDEGPDPDLICRNRTATNMMYLLLIGAQVLLGIGATPVQPLGVSYIDDHVRRKDSSLYIGILFTMLVFGPACGFILGSFCTKIYVDAVFIDTSNLDITPDDPRWIGAWWGGFLLCGALLFFSSLLMFGFPQSLPPHSEPAMESEQAMLSEREYERPKPSNGVLRHPLEPDSSASCFQQLRVIPKVTKHLLSNPVFTCIILAACMEIAVVAGFAAFLGKYLEQQFNLTTSSANQLLGMTAIPCACLGIFLGGLLVKKLSLSALGAIRMAMLVNLVSTACYVSFLFLGCDTGPVAGVTVPYGNSTAPGSALDPYSPCNNNCECQTDSFTPVCGADGITYLSACFAGCNSTNLTGCACLTTVPAENATVVPGKCPSPGCQEAFLTFLCVMCICSLIGAMAQTPSVIILIRTVSPELKSYALGVLFLLLRLLGFIPPPLIFGAGIDSTCLFWSTFCGEQGACVLYDNVVYRYLYVSIAIALKSFAFILYTTTWQCLRKNYKRYIKNHEGGLSTSTEYQDIETEKTCPESHSPSEDSFVRS

SEQ ID NO: 1838 - protein, 653 aa, Artificial Sequence
  Synthetic polypeptide
SQHFGRLRQVDYLRKYFGEKIGLYFAWLGVYTQMLIPASIVGIIVFLYGCATMDENIPSMEMCDQRHNITMCPLCDKTCSYWKMSSACATARASHLFDNPATVFFSVFMALWAATFMEHWKRKQMRLNYRWDLTGFEEEEEAVKDHPRAEYEARVLEKSLKKESRNKETDKVKLTWRDRFPAYLTNLVSIIFMIAVTFAIVLGVIIYRISMAAALAMNSSPSVRSNIRVTVTATAVIINLVVIILLDEVYGCIARWLTKIEVPKTEKSFEERLIFKAFLLKFVNSYTPIFYVAFFKGRFVGRPGDYVYIFRSFRMEECAPGGCLMELCIQLSIIMLGKQLIQNNLFEIGIPKMKKLIRYLKLKQQSPPDHEECVKRKQRYEVDYNLEPFAGLTPEYMEMIIQFGFVTLFVASFPLAPLFALLNNIIEIRLDAKKFVTELRRPVAVRAKDIGIWYNILRGIGKLAVIINAFVISFTSDFIPRLVYLYMYSKNGTMHGFVNHTLSSFNVSDFQNGTAPNDPLDLGYEVQICRYKDYREPPWSENKYDISKDFWAVLAARLAFVIVFQNLVMFMSDFVDWVIPDIPKDISQQIHKEKVLMVELFMREEQDKQQLLETWMEKERQKDEPPCNHHNTKACPDSLGSPAPSHAYHGGVL

SEQ ID NO: 1839 - protein, 652 aa, Artificial Sequence
  Synthetic polypeptide
SSNPSSGKCFQTAHFYLEDSTSPRVISTPPTPIFPISDDVGAIPIKHFPKHVADLHASSGFTEEFEEVQSCTVDLGITADSSNHPDNKHKNRYINIVAYDHSRVKLAQLAEKDGKLTDYINANYVDGYNRPKAYIAAQGPLKSTAEDFWRMIWEHNVEVIVMITNLVEKGRRKCDQYWPADGSEEYGNFLVTQKSVQVLAYYTVRNFTLRNTKIKKGSQKGRPSGRVVTQYHYTQWPDMGVPEYSLPVLTFVRKAAYAKRHAVGPVVVHCSAGVGRTGTYIVLDSMLQQIQHEGTVNIFGFLKHIRSQRNYLVQTEEQYVFIHDTLVEAILSKETEVLDSHIHAYVNALLIPGPAGKTKLEKQFQLLSQSNIQQSDYSAALKQCNREKNRTSSIIPVERSRVGISSLSGEGTDYINASYIMGYYQSNEFIITQHPLLHTIKDFWRMIWDHNAQLVVMIPDGQNMAEDEFVYWPNKDEPINCESFKVTLMAEEHKCLSNEEKLIIQDFILEATQDDYVLEVRHFQCPKWPNPDSPISKTFELISVIKEEAANRDGPMIVHDEHGGVTAGTFCALTTLMHQLEKENSVDVYQVAKMINLMRPGVFADIEQYQFLYKVILSLVSTRQEENPSTSLDSNGAALPDGNIAESLESLV

SEQ ID NO: 1840 - protein, 652 aa, Artificial Sequence
  Synthetic polypeptide
PQEAEEAALIEFHRSYRELFEFFCNNTTIHGAIRLVCSQHNRMKTAFWAVLWLCTFGMMYWQFGLLFGEYFSYPVSLNINLNSDKLVFPAVTICTLNPYRYPEIKEELEELDRITEQTLFDLYKYSSFTTLVAGSRSRRDLRGTLPHPLQRLRVPPPPHGARRARSVASSLRDNNPQVDWKDWKIGFQLCNQNKSDCFYQTYSSGVDAVREWYRFHYINILSRLPETLPSLEEDTLGNFIFACRFNQVSCNQANYSHFHHPMYGNCYTFNDKNNSNLWMSSMPGINNGLSLMLRAEQNDFIPLLSTVTGARVMVHGQDEPAFMDDGGFNLRPGVETSISMRKETLDRLGGDYGDCTKNGSDVPVENLYPSKYTQQVCIHSCFQESMIKECGCAYIFYPRPQNVEYCDYRKHSSWGQVRSLTPVIPALWEAEAGRSRGYCYYKLQVDFSSDHLGCFTKCRKPCSVTSYQLSAGYSRWPSVTSQEWVFQMLSRQNNYTVNNKRNGVAKVNIFFKELNYKTNSESPSVTMVTLLSNLGSQWSLWFGSSVLSVVEMAELVFDLLVIMFLMLLRRFRSRYWSPGRGGRGAQEVASTLASSPPSHFCPHPMSLSLSQPGPAPSPALTAPPPAYATLGPRPSPGGSAGASSSTCPLGGP

SEQ ID NO: 1841 - protein, 649 aa, Artificial Sequence
  Synthetic polypeptide
SQHFGRLRQVDYLRKYFGEKIGLYFAWLGVYTQMLIPASIVGIIVFLYGCATMDENIPSMEMCDQRHNITMCPLCDKTCSYWKMSSACATARASHLFDNPATVFFSVFMALWAATFMEHWKRKQMRLNYRWDLTGFEEEEDHPRAEYEARVLEKSLKKESRNKETDKVKLTWRDRFPAYLTNLVSIIFMIAVTFAIVLGVIIYRISMAAALAMNSSPSVRSNIRVTVTATAVIINLVVIILLDEVYGCIARWLTKIEVPKTEKSFEERLIFKAFLLKFVNSYTPIFYVAFFKGRFVGRPGDYVYIFRSFRMEECAPGGCLMELCIQLSIIMLGKQLIQNNLFEIGIPKMKKLIRYLKLKQQSPPDHEECVKRKQRYEVDYNLEPFAGLTPEYMEMIIQFGFVTLFVASFPLAPLFALLNNIIEIRLDAKKFVTELRRPVAVRAKDIGIWYNILRGIGKLAVIINAFVISFTSDFIPRLVYLYMYSKNGTMHGFVNHTLSSFNVSDFQNGTAPNDPLDLGYEVQICRYKDYREPPWSENKYDISKDFWAVLAARLAFVIVFQNLVMFMSDFVDWVIPDIPKDISQQIHKEKVLMVELFMREEQDKQQLLETWMEKERQKDEPPCNHHNTKACPDSLGSPAPSHAYHGGVL

SEQ ID NO: 1842 - protein, 649 aa, Artificial Sequence; identical to SEQ ID NO: 1841
  Synthetic polypeptide

SEQ ID NO: 1843 - protein, 648 aa, Artificial Sequence
  Synthetic polypeptide
LTMTVGATMHVKKYLLKGLHRLQKGPGYTYKELLVWYCDNTNTHGPKRIICEGPKKKAMWFLLTLLFAALVCWQWGIFIRTYLSWEVSVSLSVGFKTMDFPAVTICNASPFKYSKIKHLLKDLDELMEAVLERILAPELSHANATRNLNFSIWNHTPLVLIDERNPHHPMVLDLFGDNHNGLTSSSASEKICNAHGCKMAMRLCSLNRTQCTFRNFTSATQALTEWYILQATNIFAQVPQQELVEMSYPGEQMILACLFGAEPCNYRNFTSIFYPHYGNCYIFNWGMTEKALPSANPGTEFGLKLILDIGQEDYVPFLASTAGVRLMLHEQRSYPFIRDEGIYAMSGTETSIGVLVDKLQRMGEPYSPCTVNGSEVPVQNFYSDYNTTYSIQACLRSCFQDHMIRNCNCGHYLYPLPRGEKYCNNRDFPDWAHCYSDLQMSVAQRETCIGMCKESCNDTQYKMTISMADWPSEASEDWIFHVLSQERDQSTNITLSRKGIVKLNIYFQEFNYRTIEESAANNIVWLLSNLGGQFGFWMGGSVLCLIEFGEIIIDFVWITIIKLVALAKSLRQRRAQASYAGPPPTVAELVEAHTNFGFQPDTAPRSPNTGPYPSEQALPIPGTPPPNYDSLRLQPLDVIESDSEGDAI

SEQ ID NO: 1844 - protein, 646 aa, Artificial Sequence
  Synthetic polypeptide
PRCPSQEGLEQRPTHDHQCYNGSGMDYRGTASTTKSGHQCQPWALQHPHSHHLSSTDFPELGGGHAYCRNPGGQMEGPWCFTQNKNVRMELCDVPSCSPRDSSKMGILYILVPSIAIPLVIACLFFLVCMCRNKQKASASTPQRRQLMASPSQDMEMPLINQHKQAKLKEISLSAVRFMEELGEDRFGKVYKGHLFGPAPGEQTQAVAIKTLKDKAEGPLREEFRHEAMLRARLQHPNVVCLLGVVTKDQPLSMIFSYCSHGDLHEFLVMRSPHSDVGSTDDDRTVKSALEPPDFVHLVAQIAAGMEYLSSHHVVHKDLATRNVLVYDKLNVKISDLGLFREVYAADYYKLLGNSLLPIRWMAPEAIMYGKFSIDSDIWSYGVVLWEVFSYGLQPYCGYSNQDVVEMIRNRQVLPCPDDCPAWVYALMIECWNEFPSRRPRFKDIHSRLRAWGNLSNYNSSAQTSGASNTTQTSSLSTSPVSNVSNARYVGPKQKAPPFPQPQFIPMKGQIRPMVPPPQLYVPVNGYQPVPAYGAYLPNFYPVQIPMQMAPQQVPPQMVPKPSSHHSGSGSTSTGYVTTAPSNTSMADRAALLSEGADDTQNAPEDGAQSTVQEAEEEEEGSVPETELLGDCDTLQVDEAQVQLEA

SEQ ID NO: 1845 - protein, 646 aa, Artificial Sequence
  Synthetic polypeptide
PSSVAQTCSRSALSERIAWAQEYKVTVYPELQITNVVEANQPVTIQNWCKRGRKQCKTHPHFVIPYRCLVGEFVSDALLVPDKCKFLHQERMDVCETHLHWHTVAKETCSEKSTNLHDYGMLLPCGIDKFRGVEFVCCPLAEESDNVDSADAEEDDSDVWWGGADTDYADGSEDKVVEVAEEEEVAEVEEEEADDDEDDEDGDEVEEEAEEPYEEATERTTSIATTTTTTTESVEEVVRVPTTAASTPDAVDKYLETPGDENEHAHFQKAKERLEAKHRERMSQVMREWEEAERQAKNLPKADKKAVIQHFQEKVESLEQEAANERQQLVETHMARVEAMLNDRRRLALENYITALQAVPPRPRHVFNMLKKYVRAEQKDRQHTLKHFEHVRMVDPKKAAQIRSQVMTHLRVIYERMNQSLSLLYNVPAVAEEIQDEVDELLQKEQNYSDDVLANMISEPRISYGNDALMPSLTETKTTVELLPVNGEFSLDDLQPWHSFGADSVPANTENEVEPVDARPAADRGLTTRPGSGLTNIKTEEISEVKMDAEFRHDSGYEVHHQKLVFFAEDVGSNKGAIIGLMVGGVVIATVIVITLVMLKKKQYTSIHHGVVEVDAAVTPEERHLSKMQQNGYENPTYKFFEQMQN

SEQ ID NO: 1846 - protein, 646 aa, Artificial Sequence; identical to SEQ ID NO: 1845
  Synthetic polypeptide

SEQ ID NO: 1847 - protein, 646 aa, Artificial Sequence; identical to SEQ ID NO: 1845
  Synthetic polypeptide

SEQ ID NO: 1848 - protein, 646 aa, Artificial Sequence
  Synthetic polypeptide
VMTLSCEIPSSGSSWLKNSPTEHPVTPTPAPQRTTPFDCNFPLPTRILQNGPTPSPFPDSFSDSACLHPVGEFVSDALLVPDKCKFLHQERMDVCETHLHWHTVAKETCSEKSTNLHDYGMLLPCGIDKFRGVEFVCCPLAEESDNVDSADAEEDDSDVWWGGADTDYADGSEDKVVEVAEEEEVAEVEEEEADDDEDDEDGDEVEEEAEEPYEEATERTTSIATTTTTTTESVEEVVRVPTTAASTPDAVDKYLETPGDENEHAHFQKAKERLEAKHRERMSQVMREWEEAERQAKNLPKADKKAVIQHFQEKVESLEQEAANERQQLVETHMARVEAMLNDRRRLALENYITALQAVPPRPRHVFNMLKKYVRAEQKDRQHTLKHFEHVRMVDPKKAAQIRSQVMTHLRVIYERMNQSLSLLYNVPAVAEEIQDEVDELLQKEQNYSDDVLANMISEPRISYGNDALMPSLTETKTTVELLPVNGEFSLDDLQPWHSFGADSVPANTENEVEPVDARPAADRGLTTRPGSGLTNIKTEEISEVKMDAEFRHDSGYEVHHQKLVFFAEDVGSNKGAIIGLMVGGVVIATVIVITLVMLKKKQYTSIHHGVVEVDAAVTPEERHLSKMQQNGYENPTYKFFEQMQN

SEQ ID NO: 1849 - protein, 646 aa, Artificial Sequence; identical to SEQ ID NO: 1848
  Synthetic polypeptide

SEQ ID NO: 1850 - protein, 646 aa, Artificial Sequence; identical to SEQ ID NO: 1848
  Synthetic polypeptide

SEQ ID NO: 1851 - protein, 644 aa, Artificial Sequence
  Synthetic polypeptide
PSSVAQTCSRSALSERIAWAQEYKVYPELQITNVVEANQPVTIQNWCKRGRKQCKTHPHFVIPYRCLVGEFVSDALLVPDKCKFLHQERMDVCETHLHWHTVAKETCSEKSTNLHDYGMLLPCGIDKFRGVEFVCCPLAEESDNVDSADAEEDDSDVWWGGADTDYADGSEDKVVEVAEEEEVAEVEEEEADDDEDDEDGDEVEEEAEEPYEEATERTTSIATTTTTTTESVEEVVRVPTTAASTPDAVDKYLETPGDENEHAHFQKAKERLEAKHRERMSQVMREWEEAERQAKNLPKADKKAVIQHFQEKVESLEQEAANERQQLVETHMARVEAMLNDRRRLALENYITALQAVPPRPRHVFNMLKKYVRAEQKDRQHTLKHFEHVRMVDPKKAAQIRSQVMTHLRVIYERMNQSLSLLYNVPAVAEEIQDEVDELLQKEQNYSDDVLANMISEPRISYGNDALMPSLTETKTTVELLPVNGEFSLDDLQPWHSFGADSVPANTENEVEPVDARPAADRGLTTRPGSGLTNIKTEEISEVKMDAEFRHDSGYEVHHQKLVFFAEDVGSNKGAIIGLMVGGVVIATVIVITLVMLKKKQYTSIHHGVVEVDAAVTPEERHLSKMQQNGYENPTYKFFEQMQN

SEQ ID NO: 1852 - protein, 644 aa, Artificial Sequence; identical to SEQ ID NO: 1851
  Synthetic polypeptide

SEQ ID NO: 1853 - protein, 644 aa, Artificial Sequence; identical to SEQ ID NO: 1851
  Synthetic polypeptide

SEQ ID NO: 1854 - protein, 644 aa, Artificial Sequence
  Synthetic polypeptide
GLLELRNPRPAWATWEVPSCHTSIPPGLYHACLASLSILVLLLLAMLVRRRQLWPDCVRGRPGLPSPVDFLAGDRPRAVPAAVFMVLLSSLCLLLPDEDALPFLTLASAPSQDGKTEAPRGAWKILGLFYYAALYYPLAACATAGHTAAHLLGSTLSWAHLGVQVWQRAECPQVPKIYKYYSLLASLPLLLGLGFLSLWYPVQLVRSFSRRTGAGSKGLQSSYSEEYLRNLLCRKKLGSSYHTSKHGFLSWARVCLRHCIYTPQPGFHLPLKLVLSATLTGTAIYQVALLLLVGVVPTIQKVRAGVTTDVSYLLAGFGIVLSEDKQEVVELVKHHLWALEVCYISALVLSCLLTFLVLMRSLVTHRTNLRALHRGAALDLSPLHRSPHPSRQAIFCWMSFSAYQTAFICLGLLVQQIIFFLGTTALAFLVLMPVLHGRNLLLFRSLESSWPFWLTLALAVILQNMAAHWVFLETHDGHPQLTNRRVLYAATFLLFPLNVLVGAMVATWRVLLSALYNAIHLGQMDLSLLPPRAATLDPGYYTYRNFLKIEVSQSHPAMTAFCSLLLQAQSLLPRTMAAPQDSLRPGEEDEGMQLLQTKDSMAKGARPGASRGRARWGLAYTLLHNPTLQVFRKTALLGANGAQP

SEQ ID NO: 1855 - protein, 644 aa, Artificial Sequence; identical to SEQ ID NO: 1854
  Synthetic polypeptide

SEQ ID NO: 1856 - protein, 644 aa, Artificial Sequence; identical to SEQ ID NO: 1854
  Synthetic polypeptide

SEQ ID NO: 1857 - protein, 644 aa, Artificial Sequence; identical to SEQ ID NO: 1854
  Synthetic polypeptide

SEQ ID NO: 1858 - protein, 644 aa, Artificial Sequence; identical to SEQ ID NO: 1854
  Synthetic polypeptide

SEQ ID NO: 1859 - protein, 644 aa, Artificial Sequence; identical to SEQ ID NO: 1854
  Synthetic polypeptide

SEQ ID NO: 1860 - protein, 643 aa, Artificial Sequence
  Synthetic polypeptide
RQGLLLCSQLLNSLSVDPDAECKYGLYFRDGRRKVDYILVYHHKRPSGNRTLVRRVQHSDTPSGARSVKQDHPLPGKGASLDAGSGEPPMDYHEDDKRFRREEYEGNLLEAGLELERDEDTKIHGVGFVKIHAPWNVLCREAEFLKLKMPTKKMYHINETRGLLKKINSVLQKITDPIQPKVAEHRPQTMKRLSYPFSREKQHLFDLSDKDSFFDSKTRSTIVYEILKRTTCTKAKYSMGITSLLANGVYAAAYPLHDGDYNGENVEFNDRKLLYEEWARYGVFYKYQPIDLVRKYFGEKIGLYFAWLGVYTQMLIPASIVGIIVFLYGCATMDENIPSMEMCDQRHNITMCPLCDKTCSYWKMSSACATARASHLFDNPATVFFSVFMALWAATFMEHWKRKQMRLNYRWDLTGFEEEEDHPRAEYEARVLEKSLKKESRNKETDKVKLTWRDRFPAYLTNLVSIIFMIAVTFAIVLGVIIYRISMAAALAMNSSPSVRSNIRVTVTATAVIINLVVIILLDEVYGCIARWLTKIEVPKTEKSFEERLIFKAFLLKFVNSYTPIFYVAFFKGRFVGRPGDYVYIFRSFRMEEVTEILFISGSPFCLAYDLSTPCTWEKQLQHICSAKSSRFLSFLLETFLFP

SEQ ID NO: 1861 - protein, 643 aa, Artificial Sequence
  Synthetic polypeptide
SVKLENNLNTHDEIKSTIIEPFIDWPLKPLQRRDNDMKILRSDWERKQDNGPCLGYRKPNQPYRWLSYKQVSDRAEYLGSCLLHKGYKSSPDQFVGIFAQNRPEWIISELACYTYSMVAVPLYDTLGPEAIVHIVNKADIAMVICDTPQKALVLIGNVEKGFTPSLKVIILMDPFDDDLKQRGEKSGIEILSLYDAENLGKEHFRKPVPPSPEDLSVICFTSGTTGDPKGAMITHQNIVSNAAAFLKCVEHAYEPTPDDVAISYLPLAHMFERIVQAVVYSCGARVGFFQGDIRLLADDMKTLKPTLFPAVPRLLNRIYDKVQNEAKTPLKKFLLKLAVSSKFKELQKGIIRHDSFWDKLIFAKIQDSLGGRVRVIVTGAAPMSTSVMTFFRAAMGCQVYEAYGQTECTGGCTFTLPGDWTSGHVGVPLACNYVKLEDVADMNYFTVNNEGEVCIKGTNVFKGYLKDPEKTQEALDSDGWLHTGDIGRWLPNGTLKIIDRKKNIFKLAQGEYIAPEKIENIYNRSQPVLQIFVHGESLRSSLVGVVVPDTDVLPSFAAKLGVKGSFEELCQNQVVREAILEDLQKIGKESGLKTFEQVKAIFLHPEPFSIENGLLTPTLKAKRGELSKYFRTQIDSLYEHIQD

SEQ ID NO: 1862 - protein, 643 aa, Artificial Sequence; identical to SEQ ID NO: 1861
  Synthetic polypeptide

SEQ ID NO: 1863 - protein, 643 aa, Artificial Sequence; identical to SEQ ID NO: 1861
  Synthetic polypeptide

SEQ ID NO: 1864 - protein, 643 aa, Artificial Sequence; identical to SEQ ID NO: 1861
  Synthetic polypeptide

SEQ ID NO: 1865 - protein, 642 aa, Artificial Sequence
  Synthetic polypeptide
ICRLIRIPVGEFVSDALLVPDKCKFLHQERMDVCETHLHWHTVAKETCSEKSTNLHDYGMLLPCGIDKFRGVEFVCCPLAEESDNVDSADAEEDDSDVWWGGADTDYADGSEDKVVEVAEEEEVAEVEEEEADDDEDDEDGDEVEEEAEEPYEEATERTTSIATTTTTTTESVEEVVREVCSEQAETGPCRAMISRWYFDVTEGKCAPFFYGGCGGNRNNFDTEEYCMAVCGSAMSQSLLKTTQEPLARDPVKLPTTAASTPDAVDKYLETPGDENEHAHFQKAKERLEAKHRERMSQVMREWEEAERQAKNLPKADKKAVIQHFQEKVESLEQEAANERQQLVETHMARVEAMLNDRRRLALENYITALQAVPPRPRHVFNMLKKYVRAEQKDRQHTLKHFEHVRMVDPKKAAQIRSQVMTHLRVIYERMNQSLSLLYNVPAVAEEIQDEVDELLQKEQNYSDDVLANMISEPRISYGNDALMPSLTETKTTVELLPVNGEFSLDDLQPWHSFGADSVPANTENEGSGLTNIKTEEISEVKMDAEFRHDSGYEVHHQKLVFFAEDVGSNKGAIIGLMVGGVVIATVIVITLVMLKKKQYTSIHHGVVEVDAAVTPEERHLSKMQQNGYENPTYKFFEQMQN

SEQ ID NO: 1866 - protein, 641 aa, Artificial Sequence
  Synthetic polypeptide
VFHKGTQTRFSQEPADQTVVAGQRAVLPCVLLNYSGIVQWTKDGLALGMGQGLKAWPRYRVVGSADAGQYNLEITDAELSDDASYECQATEAALRSRRAKLTVLNPPTVTLSIEPQTVQEGERVVFTCQATANPEILGYRWAKGGFLIEDAHESRYETNVDYSFFTEPVSCEVHNKVGSTNVSTLVNVHFAPRIVVDPKPTTTDIGSDVTLTCVWVGNPPLTLTWTKKDSNMVLSNSNQLLLKSVTQADAGTYTCRAIVPRIGVAEREVPLYVNGPPIISSEAVQYAVRGDGGKVECFIGSTPPPDRIAWAWKENFLEVGTLERYTVERTNSGSGVLSTLTINNVMEADFQTHYNCTAWNSFGPGTAIIQLEEREVLPVGIIAGATIGASILLIFFFIALVFFLYRRRKGSRKDVTLRKLDIKVETVNREPLTMHSDREDDTASVSTATRVMKAIYSSFKDDVDLKQDLRCDTIDTREEYEMKDPTNGYYNVRAHEDRPSSRAVLYADYRAPGPARFDGRPSSRLSHSSGYAQLNTYSRGPASDYGPEPTPPGPAAPAGTDTTSQLSYENYEKFNSHPFPGAAGYPTYRLGYPQAPPSGLERTPYEAYDPIGKYATATRFSYTSQHSDYGQRFQQRMQTHV

SEQ ID NO: 1867 - protein, 641 aa, Artificial Sequence
  Synthetic polypeptide
ICRLIRIPVGEFVSDALLVPDKCKFLHQERMDVCETHLHWHTVAKETCSEKSTNLHDYGMLLPCGIDKFRGVEFVCCPLAEESDNVDSADAEEDDSDVWWGGADTDYADGSEDKVVEVAEEEEVAEVEEEEADDDEDDEDGDEVEEEAEEPYEEATERTTSIATTTTTTTESVEEVVREVCSEQAETGPCRAMISRWYFDVTEGKCAPFFYGGCGGNRNNFDTEEYCMAVCGSAIPTTAASTPDAVDKYLETPGDENEHAHFQKAKERLEAKHRERMSQVMREWEEAERQAKNLPKADKKAVIQHFQEKVESLEQEAANERQQLVETHMARVEAMLNDRRRLALENYITALQAVPPRPRHVFNMLKKYVRAEQKDRQHTLKHFEHVRMVDPKKAAQIRSQVMTHLRVIYERMNQSLSLLYNVPAVAEEIQDEVDELLQKEQNYSDDVLANMISEPRISYGNDALMPSLTETKTTVELLPVNGEFSLDDLQPWHSFGADSVPANTENEVEPVDARPAADRGLTTRPGSGLTNIKTEEISEVKMDAEFRHDSGYEVHHQKLVFFAEDVGSNKGAIIGLMVGGVVIATVIVITLVMLKKKQYTSIHHGVVEVDAAVTPEERHLSKMQQNGYENPTYKFFEQMQN

SEQ ID NO: 1868 - protein, 641 aa, Artificial Sequence; identical to SEQ ID NO: 1867
  Synthetic polypeptide

SEQ ID NO: 1869 - protein, 638 aa, Artificial Sequence
  Synthetic polypeptide
PSSVAQTCSRSALSERIAWAQEYKITNVVEANQPVTIQNWCKRGRKQCKTHPHFVIPYRCLVGEFVSDALLVPDKCKFLHQERMDVCETHLHWHTVAKETCSEKSTNLHDYGMLLPCGIDKFRGVEFVCCPLAEESDNVDSADAEEDDSDVWWGGADTDYADGSEDKVVEVAEEEEVAEVEEEEADDDEDDEDGDEVEEEAEEPYEEATERTTSIATTTTTTTESVEEVVRVPTTAASTPDAVDKYLETPGDENEHAHFQKAKERLEAKHRERMSQVMREWEEAERQAKNLPKADKKAVIQHFQEKVESLEQEAANERQQLVETHMARVEAMLNDRRRLALENYITALQAVPPRPRHVFNMLKKYVRAEQKDRQHTLKHFEHVRMVDPKKAAQIRSQVMTHLRVIYERMNQSLSLLYNVPAVAEEIQDEVDELLQKEQNYSDDVLANMISEPRISYGNDALMPSLTETKTTVELLPVNGEFSLDDLQPWHSFGADSVPANTENEVEPVDARPAADRGLTTRPGSGLTNIKTEEISEVKMDAEFRHDSGYEVHHQKLVFFAEDVGSNKGAIIGLMVGGVVIATVIVITLVMLKKKQYTSIHHGVVEVDAAVTPEERHLSKMQQNGYENPTYKFFEQMQN

SEQ ID NO: 1870 - protein, 638 aa, Artificial Sequence; identical to SEQ ID NO: 1869
  Synthetic polypeptide

SEQ ID NO: 1871 - protein, 638 aa, Artificial Sequence; identical to SEQ ID NO: 1869
  Synthetic polypeptide

SEQ ID NO: 1872 - protein, 638 aa, Artificial Sequence
  Synthetic polypeptide
GAGAEGVSVLTTLERRFNLQSADVGVIASSFEIGNLALILFVSYFGARGHRPRLIGCGGIVMALGALLSALPEFLTHQYKYEAGEIRWGAEGRDVCAANGSGGDEGPDPDLICRNRTATNMMYLLLIGAQVLLGIGATPVQPLGVSYIDDHVRRKDSSLYIGILFTMLVFGPACGFILGSFCTKIYVDAVFIDTSNLDITPDDPRWIGAWWGGFLLCGALLFFSSLLMFGFPQSLPPHSEPAMESEQAMLSEREYERPKPSNGVLRHPLEPDSSASCFQQLRVIPKVTKHLLSNPVFTCIILAACMEIAVVAGFAAFLGKYLEQQFNLTTSSANQLLGMTAIPCACLGIFLGGLLVKKLSLSALGAIRMAMLVNLVSTACYVSFLFLGCDTGPVAGVTVPYGNSTAPGSALDPYSPCNNNCECQTDSFTPVCGADGITYLSACFAGCNSTNLTGCACLTTVPAENATVVPGKCPSPGCQEAFLTFLCVMCICSLIGAMAQTPSVIILIRTVSPELKSYALGVLFLLLRLLGFIPPPLIFGAGIDSTCLFWSTFCGEQGACVLYDNVVYRYLYVSIAIALKSFAFILYTTTWQCLRKNYKRYIKNHEGGLSTSTEYQDIETEKTCPESHSPSEDSFVRS

SEQ ID NO: 1873 - protein, 636 aa, Artificial Sequence
  Synthetic polypeptide
GLLELRNPRPAWATWEVPSCHTSIPPGLYHACLASLSILVLLLLAMLVRRRQLWPDCVRGRPGLPSPVDFLAGDRPRAVPAAVFMVLLSSLCLLLPDEDALPFLTLASAPSQGAWKILGLFYYAALYYPLAACATAGHTAAHLLGSTLSWAHLGVQVWQRAECPQVPKIYKYYSLLASLPLLLGLGFLSLWYPVQLVRSFSRRTGAGSKGLQSSYSEEYLRNLLCRKKLGSSYHTSKHGFLSWARVCLRHCIYTPQPGFHLPLKLVLSATLTGTAIYQVALLLLVGVVPTIQKVRAGVTTDVSYLLAGFGIVLSEDKQEVVELVKHHLWALEVCYISALVLSCLLTFLVLMRSLVTHRTNLRALHRGAALDLSPLHRSPHPSRQAIFCWMSFSAYQTAFICLGLLVQQIIFFLGTTALAFLVLMPVLHGRNLLLFRSLESSWPFWLTLALAVILQNMAAHWVFLETHDGHPQLTNRRVLYAATFLLFPLNVLVGAMVATWRVLLSALYNAIHLGQMDLSLLPPRAATLDPGYYTYRNFLKIEVSQSHPAMTAFCSLLLQAQSLLPRTMAAPQDSLRPGEEDEGMQLLQTKDSMAKGARPGASRGRARWGLAYTLLHNPTLQVFRKTALLGANGAQP

SEQ ID NO: 1874 - protein, 635 aa, Artificial Sequence
  Synthetic polypeptide
GLLELRNPRPAWATWEVPSCHTSIPPGLYHACLASLSILVLLLLAMLVRRRQLWPDCVRGRPGLPRPRAVPAAVFMVLLSSLCLLLPDEDALPFLTLASAPSQDGKTEAPRGAWKILGLFYYAALYYPLAACATAGHTAAHLLGSTLSWAHLGVQVWQRAECPQVPKIYKYYSLLASLPLLLGLGFLSLWYPVQLVRSFSRRTGAGSKGLQSSYSEEYLRNLLCRKKLGSSYHTSKHGFLSWARVCLRHCIYTPQPGFHLPLKLVLSATLTGTAIYQVALLLLVGVVPTIQKVRAGVTTDVSYLLAGFGIVLSEDKQEVVELVKHHLWALEVCYISALVLSCLLTFLVLMRSLVTHRTNLRALHRGAALDLSPLHRSPHPSRQAIFCWMSFSAYQTAFICLGLLVQQIIFFLGTTALAFLVLMPVLHGRNLLLFRSLESSWPFWLTLALAVILQNMAAHWVFLETHDGHPQLTNRRVLYAATFLLFPLNVLVGAMVATWRVLLSALYNAIHLGQMDLSLLPPRAATLDPGYYTYRNFLKIEVSQSHPAMTAFCSLLLQAQSLLPRTMAAPQDSLRPGEEDEGMQLLQTKDSMAKGARPGASRGRARWGLAYTLLHNPTLQVFRKTALLGANGAQP

SEQ ID NO: 1875 - protein, 633 aa, Artificial Sequence
  Synthetic polypeptide
RIMLPVEFKDKTLSGRELLLPLELTLELCEVLLDSINTWTVHYEQLLIDSGAVWLTDSSSNVNGHQPVSKVTTLIRQGQVYSFSQQPQDQVVVSGQPVTLLCAIPEYDGFVLWIKDGLALGVGRDLSSYPQYLVVGNHLSGEHHLKILRAELQDDAVYECQAIQAAIRSRPARLTVLVPPDDPVILGGPVISLRAGDPLNLTCHADNAKPAASIIWLRKGEVINGATYSKTLLRDGKRESIVSTLFISPGDVENGQSIVCRATNKAIPGGKETSVTIDIQHPPLVNLSVEPQPVLEDNVVTFHCSAKANPAVTQYRWAKRGQIIKEASGEVYRTTVDYTYFSEPVSCEVTNALGSTNLSRTVDVYFGPRMTTEPQSLLVDLGSDAIFSCAWTGNPSLTIVWMKRGSGVVLSNEKTLTLKSVRQEDAGKYVCRAVVPRVGAGEREVTLTVNGPPIISSTQTQHALHGEKGQIKCFIRSTPPPDRIAWSWKENVLESGTSGRYTVETISTEEGVISTLTISNIVRADFQTIYNCTAWNSFGSDTEIIRLKEQGSEMKSGAGLEAESVPMAVIIGVAVGAGVAFLVLMATIVAFCCARSQRSTGGRSGISGRGTEKKARLRLPRRASKQECNEQGS

SEQ ID NO: 1876 - protein, 632 aa, Artificial Sequence
  Synthetic polypeptide
MRKEQGSCGRSWDVDECSSGQHQCDSSTVCFNTVGSYSCRCRPGWKPRHGIPNNQKDTVCEDMTFSTWTPPPGVHSQTLSRFFDKVQDLGRDYKPGLANNTIQSILQALDELLEAPGDLETLPRLQQHCVASHLLDGLEDVLRGLSKNLSNGLLNFSYPAGTELSLEVQKQVDRSVTLRQNQAVMQLDWNQAQKSGDPGMGKLLAEAPLVLEPEKQMLLHETHQGLLQDGSPILLSDVISAFLSNNDTQNLSSPVTFTFSHRSVIPRQKVLCVFWEHGQNGCGHWATTGCSTIGTRDTSTICRCTHLSSFAVLMAHYDVQEEDPVLTVITYMGLSVSLLCLLLAALTFLLCKAIQNTSTSLHLQLSLCLFLAHLLFLVAIDQTGHKVLCSIIAGTLHYLYLATLTWMLLEALYLFLTARNLTVVNYSSINRFMKKLMFPVGYGVPAVTVAISAASRPHLYGTPSRCWLQPEKGFIWGFLGPVCAIFSVNLVLFLVTLWILKNRLSSLNSEVSTLRNTRMLAFKATAQLFILGCTWCLGILQVGPAARVMAYLFTIINSLQGVFIFLVYCLLSQQVREQYGKWSKGIRKLKTESEMHTLSSSAKADTSKPSTPGTVVQACNASTLGGQSRKIT

SEQ ID NO: 1877 - protein, 630 aa, Artificial Sequence
  Synthetic polypeptide
PQEAEEAALIEFHRSYRELFEFFCNNTTIHGAIRLVCSQHNRMKTAFWAVLWLCTFGMMYWQFGLLFGEYFSYPVSLNINLNSDKLVFPAVTICTLNPYRYPEIKEELEELDRITEQTLFDLYKYSSFTTLVAGSRSRRDLRGTLPHPLQRLRVPPPPHGARRARSVASSLRDNNPQVDWKDWKIGFQLCNQNKSDCFYQTYSSGVDAVREWYRFHYINILSRLPETLPSLEEDTLGNFIFACRFNQVSCNQANYSHFHHPMYGNCYTFNDKNNSNLWMSSMPGINNGLSLMLRAEQNDFIPLLSTVTGARVMVHGQDEPAFMDDGGFNLRPGVETSISMRKETLDRLGGDYGDCTKNGSDVPVENLYPSKYTQQVCIHSCFQESMIKECGCAYIFYPRPQNVEYCDYRKHSSWGYCYYKLQVDFSSDHLGCFTKCRKPCSVTSYQLSAGYSRWPSVTSQEWVFQMLSRQNNYTVNNKRNGVAKVNIFFKELNYKTNSESPSVTMVTLLSNLGSQWSLWFGSSVLSVVEMAELVFDLLVIMFLMLLRRFRSRYWSPGRGGRGAQEVASTLASSPPSHFCPHPMSLSLSQPGPAPSPALTAPPPAYATLGPRPSPGGSAGASSSTCPLGGP

SEQ ID NO: 1878 - protein, 630 aa, Artificial Sequence; identical to SEQ ID NO: 1877
  Synthetic polypeptide

SEQ ID NO: 1879 - protein, 630 aa, Artificial Sequence; identical to SEQ ID NO: 1877
  Synthetic polypeptide

SEQ ID NO: 1880 - protein, 630 aa, Artificial Sequence
  Synthetic polypeptide
LHALYATLVPFAPAELKVQAKMESLVVSWQPPPHPTQISGYKLYWREVGAEEEANGDRLPGGRGDQAWDVGPVRLKKKVKQYELTQLVPGRLYEVKLVAFNKHEDGYAAVWKGKTEKAPAPDMPIQRGPPLPPAHVHAESNSSTSIWLRWKKPDFTTVKIVNYTVRFSPWGLRNASLVTYYTSSGEDILIGGLKPFTKYEFAVQSHGVDMDGPFGSVVERSTLPDRPSTPPSDLRLSPLTPSTVRLHWCPPTEPNGEIVEYLILYSSNHTQPEHQWTLLTTQGNIFSAEVHGLESDTRYFFKMGARTEVGPGPFSRLQDVITLQEKLSDSLDMHSVTGIIVGVCLGLLCLLACMCAGLRRSPHRESLPGLSSTATPGNPALYSRARLGPPSPPAAHELESLVHPHPQDWSPPPSDVEDRAEVHSLMGGGVSEGRSHSKRKISWAQPSGLSWAGSWAGCELPQAGPRPALTRALLPPAGTGQTLLLQALVYDAIKGNGRKKSPPACRNQVEAEVIVHSDFSASNGNPDLHLQDLEPEDPLPPEAPDLISGVGDPGQGAAWLDRELGGCELAAPGPDRLTCLPEAASASCSYPDLQPGEVLEETPGDSCQLKSPCPLGASPGLPRSPVSSSA

SEQ ID NO: 1881 - protein, 630 aa, Artificial Sequence
  Synthetic polypeptide
TVSSIRAETVGISTAHTGPGTHPGLSEHLLNVCQGTSNKLTQLGTFEDHFLSLQRMFNNCEVVLGNLEITYVQRNYDLSFLKTIQEVAGYVLIALNTVERIPLENLQIIRGNMYYENSYALAVLSNYDANKTGLKELPMRNLQEILHGAVRFSNNPALCNVESIQWRDIVSSDFLSNMSMDFQNHLGSCQKCDPSCPNGSCWGAGEENCQKLTKIICAQQCSGRCRGKSPSDCCHNQCAAGCTGPRESDCLVCRKFRDEATCKDTCPPLMLYNPTTYQMDVNPEGKYSFGATCVKKCPRNYVVTDHGSCVRACGADSYEMEEDGVRKCKKCEGPCRKVCNGIGIGEFKDSLSINATNIKHFKNCTSISGDLHILPVAFRGDSFTHTPPLDPQELDILKTVKEITGFLLIQAWPENRTDLHAFENLEIIRGRTKQHGQFSLAVVSLNITSLGLRSLKEISDGDVIISGNKNLCYANTINWKKLFGTSGQKTKIISNRGENSCKATGQVCHALCSPEGCWGPEPRDCVSCRNVSRGRECVDKCNLLEGEPREFVENSECIQCHPECLPQAMNITCTGRGPDNCIQCAHYIDGPHCVKTCPAGVMGENNTLVWKYADAGHVCHLCHPNCTYGS

SEQ ID NO: 1882 - protein, 624 aa, Artificial Sequence
  Synthetic polypeptide
MRKEQGSCGRSWDVDECSSGQHQCDSSTVCFNTVGSYSCRCRPGWKPRHGIPNNQKDTVCEDMTFSTWTPPPGVHSQTLSRFFDKVQDLGRDYKPGLANNTIQSILQALDELLEAPGDLETLPRLQQHCVASHLLDGLEDVLRGLSKNLSNGLLNFSYPAGTELSLEVQKQVDRSVTLRQNQAVMQLDWNQAQKSGDPGPSVVGLVSIPGMGKLLAEAPLVLEPEKQMLLHETHQGLLQDGSPILLSDVISAFLSNNDTQNLSSPVTFTFSHRSVIPRQKVLCVFWEHGQNGCGHWATTGCSTIGTRDTSTICRCTHLSSFAVLMAHYDVQEEDPVLTVITYMGLSVSLLCLLLAALTFLLCKAIQNTSTSLHLQLSLCLFLAHLLFLVAIDQTGHKVLCSIIAGTLHYLYLATLTWMLLEALYLFLTARNLTVVNYSSINRFMKKLMFPVGYGVPAVTVAISAASRPHLYGTPSRCWLQPEKGFIWGFLGPVCAIFSVNLVLFLVTLWILKNRLSSLNSEVSTLRNTRMLAFKATAQLFILGCTWCLGILQVGPAARVMAYLFTIINSLQGVFIFLVYCLLSQQVREQYGKWSKGIRKLKTESEMHTLSSSAKADTSKPSTVN

SEQ ID NO: 1883 - protein, 624 aa, Artificial Sequence; identical to SEQ ID NO: 1882
  Synthetic polypeptide

SEQ ID NO: 1884 - protein, 624 aa, Artificial Sequence; identical to SEQ ID NO: 1882
  Synthetic polypeptide

SEQ ID NO: 1885 - protein, 624 aa, Artificial Sequence; identical to SEQ ID NO: 1882
  Synthetic polypeptide

SEQ ID NO: 1886 - protein, 624 aa, Artificial Sequence; identical to SEQ ID NO: 1882
  Synthetic polypeptide

SEQ ID NO: 1887 - protein, 623 aa, Artificial Sequence
  Synthetic polypeptide
PSTRYLAFPCLCLLIYKTGVIRTAVPDLDRESQERYEVVIQATDMAGQLGGLSGSTTVTIVVTDVNDNPPRFPQKMYQFSIQESAPIGTAVGRVKAEDSDVGENTDMTYHLKDESSSGGDVFKVTTDSDTQEAIIVVQKRLDFESQPVHTVILEALNKFVDPRFADLGTFRDQAIVRVAVTDVDEPPEFRPPSGLLEVQEDAQVGSLVGVVTARDPDAANRPVRYAIDRESDLDQIFDIDADTGAIVTGKGLDRETAGWHNITVLAMEADNHAQLSRASLRIRILDVNDNPPELATPYEAAVCEDAKPGQLIQTISVVDRDEPQGGHRFYFRLVPEAPSNPHFSLLDIQDNTAAVHTQHVGFNRQEQDVFFLPILVVDSGPPTLSSTGTLTIRICGCDSSGTIQSCNTTAFVMAASLSPGALIALLVCVLILVVLVLLILTLRRHHKSHLSSDEDEDMRDNVIKYNDEGGGEQDTEAYDMSALRSLYDFGELKGGDGGGSAGGGAGGGSGGGAGSPPQAHLPSERHSLPQGPPSPEPDFSVFRDFISRKVALADGDLSVPPYDAFQTYAFEGADSPAASLSSLHSGSSGSEQDFAYLSSWGPRFRPLAALYAGHRGDDEAQAS

SEQ ID NO: 1888 - protein, 623 aa, Artificial Sequence; identical to SEQ ID NO: 1887
  Synthetic polypeptide

SEQ ID NO: 1889 - protein, 619 aa, Artificial Sequence
  Synthetic polypeptide
SVKLENNLNTHDEIKSTIIEPFIDWPLKPLQRRDNDMKILRSDWERKQDNGPCLGYRKPNQPYRWLSYKQVSDRAEYLGSCLLHKGYKSSPDQFVGIFAQNRPEWIISELACYTYSMVAVPLYDTLGPEAIVHIVNKADIAMVICDTPQKALVLIGNVEKGFTPSLKVIILMDPFDDDLKQRGEKSGIEILSLYDAENLGKEHFRKPVPPSPEDLSVICFTSGTTGDPKGAMITHQNIVSNAAAFLKCVEHAYEPTPDDVAISYLPLAHMFERIVQAVVYSCGARVGFFQGDIRLLADDMKTLKPTLFPAVPRLLNRIYDKVQNEAKTPLKKFLLKLAVSSKFKELQKGIIRHDSFWDKLIFAKIQDSLGGRVRVIVTGAAPMSTSVMTFFRAAMGCQVYEAYGQTECTGGCTFTLPGDWTSGHVGVPLACNYVKLEDVADMNYFTVNNEGEVCIKGTNVFKGYLKDPEKTQEALDSDGWLHTGDIGRWLPNGTLKIIDRKKNIFKLAQGEYIAPEKIENIYNRSQPVLQIFVHGESLRSSLVGVVVPDTDVLPSFAAKLGVKGSFEELCQNQVKAIFLHPEPFSIENGLLTPTLKAKRGELSKYFRTQIDSLYEHIQD

SEQ ID NO: 1890 - protein, 613 aa, Artificial Sequence
  Synthetic polypeptide
MRKEQGSCGRSWDVDECSSGQHQCDSSTVCFNTVGSYSCRCRPGWKPRHGIPNNQKDTVCEDMTFSTWTPPPGVHSQTLSRFFDKVQDLGRDYKPGLANNTIQSILQALDELLEAPGDLETLPRLQQHCVASHLLDGLEDVLRGLSKNLSNGLLNFSYPAGTELSLEVQKQVDRSVTLRQNQAVMQLDWNQAQKSGDPGMGKLLAEAPLVLEPEKQMLLHETHQGLLQDGSPILLSDVISAFLSNNDTQNLSSPVTFTFSHRSVIPRQKVLCVFWEHGQNGCGHWATTGCSTIGTRDTSTICRCTHLSSFAVLMAHYDVQEEDPVLTVITYMGLSVSLLCLLLAALTFLLCKAIQNTSTSLHLQLSLCLFLAHLLFLVAIDQTGHKVLCSIIAGTLHYLYLATLTWMLLEALYLFLTARNLTVVNYSSINRFMKKLMFPVGYGVPAVTVAISAASRPHLYGTPSRCWLQPEKGFIWGFLGPVCAIFSVNLVLFLVTLWILKNRLSSLNSEVSTLRNTRMLAFKATAQLFILGCTWCLGILQVGPAARVMAYLFTIINSLQGVFIFLVYCLLSQQVREQYGKWSKGIRKLKTESEMHTLSSSAKADTSKPSTVN

SEQ ID NO: 1891 - protein, 613 aa, Artificial Sequence; identical to SEQ ID NO: 1890
  Synthetic polypeptide

SEQ ID NO: 1892 - protein, 610 aa, Artificial Sequence
  Synthetic polypeptide
EAEADKSPEFAQGPLLDSLYWTKWYNNQSLGHGSHSFIYYENMLLGVPRLRQLKVRNDSCVVHEDFREDILSCYDVYSPDKEEQLPFGPFNGTAWTYHSQDELGGFSHWGRLTSYSGGGYYLDLPGSRQGSAEALRALQEGLWLDRGTRVVFIDFSVYNANINLFCVLRLVVEFPATGGAIPSWQIRTVKLIRYVSNWDFFIVGCEVIFCVFIFYYVVEEILELHIHRLRYLSSIWNILDLVVILLSIVAVGFHIFRTLEVNRLMGKLLQQPNTYADFEFLAFWQTQYNNMNAVNLFFAWIKIFKYISFNKTMTQLSSTLARCAKDILGFAVMFFIVFFAYAQLGYLLFGTQVENFSTFIKCIFTQFRIILGDFDYNAIDNANRILGPAYFVTYVFFVFFVLLNMFLAIINDTYSEVKEELAGQKDELQLSDLLKQGYNKTLLRLRLRKERVSDVQKVLQGGEQEIQFEDFTNTLRELGHAEHEITELTATFTKFDRDGNRILDEKEQEKMRQDLEEERVALNTEIEKLGRSIVSSPQGKSGPEAARAGGWVSGEEFYMLTRRVLQLETVLEGVVSQIDAVGSKLKMLERKGWLAPSPGVRFPIKEKRKP

SEQ ID NO: 1893 - protein, 606 aa, Artificial Sequence
  Synthetic polypeptide
RDTVAHTCNPSTLGSRGTICNPGPRKSMSKLLYIRLALFFPEMVWASLGAAWVADGVQCDRTVVNGIIATVVVSWIIIAATVVSIIIVFDPLGGKMAPYSSAGPSHLDSHDSSQLLNGLKTAATSVWETRIKLLCCCIGKDDHTRVAFSSTAELFSTYFSDTDLVPSDIAAGLALLHQQQDNIRNNQEPAQVVCHAPGSSQEADLDAELENCHHYMQFAAAAYGWPLYIYRNPLTGLCRIGGDCCRSRTTDYDLVGGDQLNCHFGSILHTTGLQYRDFIHVSFHDKVYELPFLVALDHRKESVVVAVRGTMSLQDVLTDLSAESEVLDVECEVQDRLAHKGISQAARYVYQRLINDGILSQAFSIAPEYRLVIVGHSLGGGAAALLATMLRAAYPQVRCYAFSPPRGLWSKALQEYSQSFIVSLVLGKDVIPRLSVTNLEDLKRRILRVVAHCNKPKYKILLHGLWYELFGGNPNNLPTELDGGDQEVLTQPLLGEQSLLTRWSPAYSFSSDSPLDSSPKYPPLYPPGRIIHLQEEGASGRFGCCSAAHYSAKWSHEAEFSKILIGPKMLTDHMPDILMRALDSVVSDRAACVSCPAQGVSSVDVA

SEQ ID NO: 1894 - protein, 606 aa, Artificial Sequence; identical to SEQ ID NO: 1893
  Synthetic polypeptide

SEQ ID NO: 1895 - protein, 604 aa, Artificial Sequence
  Synthetic polypeptide
ICRLIRIPVGEFVSDALLVPDKCKFLHQERMDVCETHLHWHTVAKETCSEKSTNLHDYGMLLPCGIDKFRGVEFVCCPLAEESDNVDSADAEEDDSDVWWGGADTDYADGSEDKVVEVAEEEEVAEVEEEEADDDEDDEDGDEVEEEAEEPYEEATERTTSIATTTTTTTESVEEVVRVSQSLLKTTQEPLARDPVKLPTTAASTPDAVDKYLETPGDENEHAHFQKAKERLEAKHRERMSQVMREWEEAERQAKNLPKADKKAVIQHFQEKVESLEQEAANERQQLVETHMARVEAMLNDRRRLALENYITALQAVPPRPRHVFNMLKKYVRAEQKDRQHTLKHFEHVRMVDPKKAAQIRSQVMTHLRVIYERMNQSLSLLYNVPAVAEEIQDEVDELLQKEQNYSDDVLANMISEPRISYGNDALMPSLTETKTTVELLPVNGEFSLDDLQPWHSFGADSVPANTENEVEPVDARPAADRGLTTRPGSGLTNIKTEEISEVKMDAEFRHDSGYEVHHQKLVFFAEDVGSNKGAIIGLMVGGVVIATVIVITLVMLKKKQYTSIHHGVVEVDAAVTPEERHLSKMQQNGYENPTYKFFEQMQN

SEQ ID NO: 1896 - protein, 600 aa, Artificial Sequence
  Synthetic polypeptide
VSEEVAERLRGRVELCRHMRLRMKILFRICPEELLVGTLKDYSLRIRIPQEEHAANGPELLRKKRTTSAEKNTCQLYIQTDHLFFKYYGTREAVIAQISSHVKAIDTIYQTTDFSGIRNISFMVKRIRINTTADEKDPTNPFRFPNIGVEKFLELNSEQNHDDYCLAYVFTDRDFDDGVLGLAWVGAPSGSSGGICEKSKLYSDGKKKSLNTGIITVQNYGSHVPPKVSHITFAHEVGHNFGSPHDSGTECTPGESKNLGQKENGNYIMYARATSGDKLNNNKFSLCSIRNISQVLEKKRNNCFVESGQPICGNGMVEQGEECDCGYSDQCKDECCFDANQPEGRKCKLKPGKQCSPSQGPCCTAQCAFKSKSEKCRDDSDCAREGICNGFTALCPASDPKPNFTDCNRHTQVCINGQCAGSICEKYGLEECTCASSDGKDDKELCHVCCMKKMDPSTCASTGSVQWSRHFSGRTITLQPGSPCNDFRGYCDVFMRCRLVDADGPLARLKKAIFSPELYENIAEWIVAHWWAVLLMGIALIMLMAGFIKICSVHTPSSNPKLPPPKPLPGTLKRRRPPQPIQQPQRQRPRESYQMGHMRR

SEQ ID NO: 1897 - protein, 599 aa, Artificial Sequence
  Synthetic polypeptide
THWLSCIWYAIGNMEQPHMDSRIGWLHNLGDQIGKPYNSSGLGGPSIKDKYVTALYFTFSSLTSVGFGNVSPNTNSEKIFSICVMLIGSLMYASIFGNVSAIIQRLYSGTARYHTQMLRVREFIRFHQIPNPLRQRLEEYFQHAWSYTNGIDMNAVLKGFPECLQADICLHLNRSLLQHCKPFRGATKGCLRALAMKFKTTHAPPGDTLVHAGDLLTALYFISRGSIEILRGDVVVAILGKNDIFGEPLNLYARPGKSNGDVRALTYCDLHKIHRDDLLEVLDMYPEFSDHFWSSLEITFNLRDTNMIPGSPGSTELEGGFSRQRKRKLSFRRRTDKDTEQPGEVSALGPGRAGAGPSSRGRPGGPWGESPSSGPSSPESSEDEGPGRSSSPLRLVPFSSPRPPGEPPGGEPLMEDCEKSSDTCNPLSGAFSGVSNIFSFWGDSRGRQYQELPRCPAPTPSLLNIPLSSPGRRPRGDVESRLDALQRQLNRLETRLSADMATVLQLLQRQMTLVPPAYSAVTTPGPGPTSTSPLLPVSPLPTLTLDSLSQVSQFMACEELPPGAPELPQEGPTRRLSLPGQLGALTSQPLHRHGSDPGS

SEQ ID NO: 1898 - protein, 599 aa, Artificial Sequence; identical to SEQ ID NO: 1897
  Synthetic polypeptide

SEQ ID NO: 1899 - protein, 599 aa, Artificial Sequence; identical to SEQ ID NO: 1897
  Synthetic polypeptide

SEQ ID NO: 1900 - protein, 599 aa, Artificial Sequence
  Synthetic polypeptide
SAQFRFVAQPNCQQLLASRWYDEFPGWRRRHWAVKMVTCFIIGLLFPVFSVCYLIAPKSPLGLFIRKPFIKFICHTASYLTFLFLLLLASQHIDRSDLNRQGPPPTIVEWMILPWVLGFIWGEIKQMWDGGLQDYIHDWWNLMDFVMNSLYLATISLKIVAFVKYSALNPRESWDMWHPTLVAEALFAIANIFSSLRLISLFTANSHLGPLQISLGRMLLDILKFLFIYCLVLLAFANGLNQLYFYYEETKGLTCKGIRCEKQNNAFSTLFETLQSLFWSIFGLINLYVTNVKAQHEFTEFVGATMFGTYNVISLVVLLNMLIAMMNNSYQLIADHADIEWKFARTKLWMSYFEEGGTLPTPFNVIPSPKSLWYLIKWIWTHLCKKKMRRKPESFGTIGRRAADNLRRHHQYQEVMRNLVKRYVAAMIRDAKTEEGLTEENFKELKQDISSFRFEVLGLLRGSKLSTIQSANASKESSNSADSDEKSDSEEEVARQQAAGPLERNIQLESRGLASRGDLSIPGLSEQCVLVDHRERNTDTLGLQVGKRVCPFKSEKVVVEDTVPIIPKEKHAKEEDSSIDYDLNLPDTVTHEDYVTTRL

SEQ ID NO: 1901 - protein, 596 aa, Artificial Sequence
  Synthetic polypeptide
LHHFTPAWVEEPGMGAEEAVDCRQWTQHHLVAADIRVAPAMALTPPQGDADADGMDVNVRGPDGFTPLMLASFCGGALEPMPTEEDEADDTSASIISDLICQGAQLGARTDRTGETALHLAARYARADAAKRLLDAGADTNAQDHSGRTPLHTAVTADAQGVFQILIRNRSTDLDARMADGSTALILAARLAVEGMVEELIASHADVNAVDELGKSALHWAAAVNNVEATLALLKNGANKDMQDSKEETPLFLAAREGSYEAAKLLLDHFANREITDHLDRLPRDVAQERLHQDIVRLLDQPSGPRSPPGPHGLGPLLCPPGAFLPGLKAAQSGSKKSRRPPGKAGLGPQGPRGRGKKLTLACPGPLADSSVTLSPVDSLDSPRPFGGPPASPGGFPLEGPYAAATATAVSLAQLGGPGRAGLGRQPPGGCVLSLGLLNPVAVPLDWARLPPPAPPGPSFLLPLAPGPQLLNPGTPVSPQERPPPYLAVPGHGEEYPAAGAHSSPPKARFLRVPSEHPYLTPSPESPEHWASPSPPSLSDWSESTPSPATATGAMATTTGALPAQPLPLSVPSSLAQAQTQLGPQPEVTPKRQVLA

SEQ ID NO: 1902 - protein, 595 aa, Artificial Sequence
  Synthetic polypeptide
PRGHLEISGDIFGCHILGRRYWHLVGDGAGDLFIINENTGDIQATKRLDREEKPVYILRAQAINRRTGRPVEPESEFIIKIHDINDNEPIFTKEVYTATVPEMSDVGTFVVQVTATDADDPTYGNSAKVVYSILQGQPYFSVESETGIIKTALLNMDRENREQYQVVIQAKDMGGQMGGLSGTTTVNITLTDVNDNPPRFPQSTYQFKTPESSPPGTPIGRIKASDADVGENAEIEYSITDGEGLDMFDVITDQETQEGIITVKKLLDFEKKKVYTLKVEASNPYVEPRFLYLGPFKDSATVRIVVEDVDEPPVFSKLAYILQIREDAQINTTIGSVTAQDPDAARNPVKYSVDRHTDMDRIFNIDSGNGSIFTSKLLDRETLLWHNITVIATEINNPKQSSRVPLYIKVLDVNDNAPEFAEFYETFVCEKAKADQLIQTLHAVDKDDPYSGHQFSFSLAPEAASGSNFTIQDNKDNTAGILTRKNGYNRHEMSTYLLPVVISDNDYPVQSSTGTVTVRVCACDHHGNMQSCHAEALIHPTGLSTGALVAILLCIVILLGKLVLPASYLPMVRGSHCYCDTLDLSASPIKAYSLI

SEQ ID NO: 1903 - protein, 585 aa, Artificial Sequence
  Synthetic polypeptide
ICRLIRIPVGEFVSDALLVPDKCKFLHQERMDVCETHLHWHTVAKETCSEKSTNLHDYGMLLPCGIDKFRGVEFVCCPLAEESDNVDSADAEEDDSDVWWGGADTDYADGSEDKVVEVAEEEEVAEVEEEEADDDEDDEDGDEVEEEAEEPYEEATERTTSIATTTTTTTESVEEVVRVPTTAASTPDAVDKYLETPGDENEHAHFQKAKERLEAKHRERMSQVMREWEEAERQAKNLPKADKKAVIQHFQEKVESLEQEAANERQQLVETHMARVEAMLNDRRRLALENYITALQAVPPRPRHVFNMLKKYVRAEQKDRQHTLKHFEHVRMVDPKKAAQIRSQVMTHLRVIYERMNQSLSLLYNVPAVAEEIQDEVDELLQKEQNYSDDVLANMISEPRISYGNDALMPSLTETKTTVELLPVNGEFSLDDLQPWHSFGADSVPANTENEVEPVDARPAADRGLTTRPGSGLTNIKTEEISEVKMDAEFRHDSGYEVHHQKLVFFAEDVGSNKGAIIGLMVGGVVIATVIVITLVMLKKKQYTSIHHGVVEVDAAVTPEERHLSKMQQNGYENPTYKFFEQMQN

SEQ ID NO: 1904 - protein, 585 aa, Artificial Sequence; identical to SEQ ID NO: 1903
  Synthetic polypeptide

SEQ ID NO: 1905 - protein, 585 aa, Artificial Sequence; identical to SEQ ID NO: 1903
  Synthetic polypeptide

SEQ ID NO: 1906 - protein, 584 aa, Artificial Sequence
  Synthetic polypeptide
IIIYKMKILARTPRPIIFLQPPWTTVFQGERVTLTCKGFRFYSPQKTKWYHRYLGKEILRETPDNILEVQESGEYRCQAQGSPLSSPVHLDFSSASLILQAPLSVFEGDSVVLRCRAKAEVTLNNTIYKNDNVLAFLNKRTDFHIPHACLKDNGAYRCTGYKESCCPVSSNTVKIQVQEPFTRPVLRASSFQPISGNPVTLTCETQLSLERSDVPLRFRFFRDDQTLGLGWSLSPNFQITAMWSKDSGFYWCKAATMPYSVISDSPRSWIQVQIPASHPVLTLSPEKALNFEGTKVTLHCETQEDSLRTLYRFYHEGVPLRHKSVRCERGASISFSLTTENSGNYYCTADNGLGAKPSKAVSLSVTVPVSHPVLNLSSPEDLIFEGAKVTLHCEAQRGSLPILYQFHHEGAALERRSANSAGGVAISFSLTAEHSGNYYCTADNGFGPQRSKAVSLSVTVPVSHPVLTLSSAEALTFEGATVTLHCEVQRGSPQILYQFYHEDMPLWSSSTPSVGRVSFSFSLTEGHSGNYYCTADNGFGPQRSEVVSLFVTGKCWVLASHPPLAEFSLTHSFKNLFALSSFLP

SEQ ID NO: 1907 - protein, 582 aa, Artificial Sequence
  Synthetic polypeptide
NYISQSPYHPMVPDSSWPAKGSCSISARRKERCHSPLEAAPSRHVGDMREHNQLNGWSSDENDWNEKLYPVWKRGDMRWKNSWKGGRVQAVLTSDSPALVGSNITFAVNLIFPRCQKEDANGNIVYEKNCRNEAGLSADPYVYNWTAWSEDSDGENGTGQSHHNVFPDGKPFPHHPGWRRWNFIYVFHTLGQYFQKLGRCSVRVSVNTANVTLGPQLMEVTVYRRHGRAYVPIAQVKDVYVVTDQIPVFVTMFQKNDRNSSDETFLKDLPIMFDVLIHDPSHFLNYSTINYKWSFGDNTGLFVSTNHTVNHTYVLNGTFSLNLTVKAAAPGPCPPPPPPPRPSKPTPSLATTLKSYDSNTPGPAGDNPLELSRIPDENCQINRYGHFQATITIVEGILEVNIIQMTDVLMPVPWPESSLIDFVVTCQGSIPTEVCTIISDPTCEITQNTVCSPVDVDEMCLLTVRRTFNGSGTYCVNLTLGDDTSLALTSTLISVPDRDPASPLRMANSALISVGCLAIFVTVISLLVYKKHKEYNPIENSPGNVVRSKGLSVFLNRAKAVFFPGNQEKDPLLKNQEFKGVS

SEQ ID NO: 1908 - protein, 580 aa, Artificial Sequence
  Synthetic polypeptide
EAEADKSPEFAQGPLLDSLYWTKWYNNQSLGHGSHSFIYYENMLLGVPRLRQLKVRNDSCVVHEDFREDILSCYDVYSPDKEEQLPFGPFNGTALVVEFPATGGAIPSWQIRTVKLIRYVSNWDFFIVGCEVIFCVFIFYYVVEEILELHIHRLRYLSSIWNILDLVVILLSIVAVGFHIFRTLEVNRLMGKLLQQPNTYADFEFLAFWQTQYNNMNAVNLFFAWIKIFKYISFNKTMTQLSSTLARCAKDILGFAVMFFIVFFAYAQLGYLLFGTQVENFSTFIKCIFTQFRIILGDFDYNAIDNANRILGPAYFVTYVFFVFFVLLNMFLAIINDTYSEVKEELAGQKDELQLSDLLKQGYNKTLLRLRLRKERVSDVQKVLQGGEQEIQFEDFTNTLRELGHAEHEITELTATFTKFDRDGNRILDEKEQEKMRQDLEEERVALNTEIEKLGRSIVSSPQGKSGPEAARAGGWVSGEEFYMLTRRVLQLETVLEGVVSQIDAVGSKLKMLERKGWLAPSPGVKEQAIWKHPQPAPAVTPDPWGVQGGQESEVPYKREEEALEERRLSRGEIPTLQRS

SEQ ID NO: 1909 - protein, 578 aa, Artificial Sequence
  Synthetic polypeptide
VLMRSDGLKVCGTSPFTHCLSCRHVKMCLLPLCPSTVIVSFLRPHQPCLLYSLWNCESIQPLFFINHAFSANFLDNMLLRSAGKLNVGTKKEDGESTAPTPRPKVLRCKCHHHCPEDSVNNICSTDGYCFTMIEEDDSGLPVVTSGCLGLEGSDFQCRDTPIPHQRRSIECCTERNECNKDLHPTLPPLKNRDFVDGPIHHRALLISVTVCSLLLVLIILFCYFRYKRQETRPRYSIGLEQDETYIPPGESLRDLIEQSQSSGSGSGLPLLVQRTIAKQIQMVKQIGKGRYGEVWMGKWRGEKVAVKVFFTTEEASWFRETEIYQTVLMRHENILGFIAADIKGTGSWTQLYLITDYHENGSLYDYLKSTTLDAKSMLKLAYSSVSGLCHLHTEIFSTQGKPAIAHRDLKSKNILVKKNGTCCIADLGLAVKFISDTNEVDIPPNTRVGTKRYMPPEVLDESLNRNHFQSYIMADMYSFGLILWEVARRCVSGGIVEEYQLPYHDLVPSDPSYEDMREIVCIKKLRPSFPNRWSSDECLRQMGKLMTECWAHNPASRLTALRVKKTLAKMSESQDIKL

SEQ ID NO: 1910 - protein, 577 aa, Artificial Sequence
  Synthetic polypeptide
GRARWLTPVIAALGEAEAGGSPEMYPELQIARVEQATQAIPMERWCGGSRSGSCAHPHHQVVPFRCLPGEFVSEALLVPEGCRFLHQERMDQCESSTRRHQEAQEACSSQGLILHGSGMLLPCGSDRFRGVEYVCCPPPGTPDPSGTAVGDPSTRSWPPGSRVEGAEDEEEEESFPQPVDDYFVEPPQAEEEEETVPPPSSHTLAVVGKVTPTPRPTDGVDIYFGMPGEISEHEGFLRAKMDLEERRMRQINEVMREWAMADNQSKNLPKADRQALNEHFQSILQTLEEQVSGERQRLVETHATRVIALINDQRRAALEGFLAALQADPPQAERVLLALRRYLRAEQKEQRHTLRHYQHVAAVDPEKAQQMRFQVHTHLQVIEERVNQSLGLLDQNPHLAQELRPQIQELLHSEHLGPSELEAPAPGGSSEDKGGLQPPDSKDADTPMTLPKGSTEQDAASPEKEKMNPLEQYERKVNASVPRGFPFHSSEIQRDELAPAGTGVSREAVSGLLIMGAGGGSLIVLSMLLLRRKKPYGAISHGVVEVDPMLTLEEQQLRELQRHGYENPTYRFLEERP

SEQ ID NO: 1911 - protein, 576 aa, Artificial Sequence
  Synthetic polypeptide
GRARWLTPVIAALGEAEAGGSPEMYPELQIARVEQATQAIPMERWCGGSRSGSCAHPHHQVVPFRCLPGEFVSEALLVPEGCRFLHQERMDQCESSTRRHQEAQEACSSQGLILHGSGMLLPCGSDRFRGVEYVCCPPPGTPDPSGTAVGDPSTRSWPPGSRVEGAEDEEEEESFPQPVDDYFVEPPQAEEEEETVPPPSSHTLAVVGKVTPTPRPTDGVDIYFGMPGEISEHEGFLRAKMDLEERRMRQINEVMREWAMADNQSKNLPKADRQALNEHFQSILQTLEEQVSGERQRLVETHATRVIALINDQRRAALEGFLAALQADPPQAERVLLALRRYLRAEQKEQRHTLRHYQHVAAVDPEKAQQMRFQVHTHLQVIEERVNQSLGLLDQNPHLAQELRPQIQELLHSEHLGPSELEAPAPGGSSEDKGGLQPPDSKDDTPMTLPKGSTEQDAASPEKEKMNPLEQYERKVNASVPRGFPFHSSEIQRDELAPAGTGVSREAVSGLLIMGAGGGSLIVLSMLLLRRKKPYGAISHGVVEVDPMLTLEEQQLRELQRHGYENPTYRFLEERP

SEQ ID NO: 1912 - protein, 576 aa, Artificial Sequence; identical to SEQ ID NO: 1911
  Synthetic polypeptide

SEQ ID NO: 1913 - protein, 574 aa, Artificial Sequence
  Synthetic polypeptide
GAPLPGRPYWEVRSPSARPAAPSGREVGGSAPRPASRPVREGGWGGSAPNPASRPVREVRGASARPPLLGSEEPLCQASRPIREGGGGVSPRLASRPAREGGGGVSPPPGQPPRPGGNFMVLWSTCRTTVFKSVTNRFIKNLACSGICASLVCVPFDIILSTSPHCCWWIYTMLFCKVVKFLHKVFCSVTILSFPAIALDRYYSVLYPLERKISDAKSRELVMYIWAHAVVASVPVFAVTNVADIYATSTCTEVWSNSLGHLVYVLVYNITTVIVPVVVVFLFLILIRRALSASQKKKVIIAALRTPQNTISIPYASQREAELHATLLSMVMVFILCSVPYATLVVYQTVLNVPDTSVFLLLTAVWLPKVSLLANPVLFLTVNKSVRKCLIGTLVQLHHRYSRRNVVSTGSGMAEASLEPSIRSGSQLLEMFHIGQQQIFKPTEDEEESEAKYIGSADFQAKEIFSTCLEGEQGPQFAPSAPPLSTVDSVSQVAPAAPVEPETFPDKYSLQFGFGPFELPPQWLSETRNSKKRLLPPLGNTPEELIQTKVPKVGRVERKMSRNNKVSIFPKVDS

SEQ ID NO: 1914 - protein, 574 aa, Artificial Sequence; identical to SEQ ID NO: 1913
  Synthetic polypeptide

SEQ ID NO: 1915 - protein, 572 aa, Artificial Sequence
  Synthetic polypeptide
GWNELRQEGRCLFVILLMAVYWCTEALPLSVTALLPIVLFPFMGILPSNKVCPQYFLDTNFLFLSGLIMASAIEEWNLHRRIALKILMLVGVQPARLILGMMVTTSFLSMWLSNTASTAMMLPIANAILKSLFGQKEVRKDPSQESEENTAAVRRNGLHTVPTEMQFLASTEAKDHPGETEVPLDLPADSRKEDEYRRNIWKGFLISIPYSASIGGTATLTGTAPNLILLGQLKSFFPQCDVVNFGSWFIFAFPLMLLFLLAGWLWISFLYGGLSFRGWRKNKSEIRTNAEDRARAVIREEYQNLGPIKFAEQAVFILFCMFAILLFTRDPKFIPGWASLFNPGFLSDAVTGVAIVTILFFFPSQRPSLKWWFDFKAPNTETEPLLTWKKAQETVPWNIILLLGGGFAMAKGCEESGLSVWIGGQLHPLENVPPALAVLLITVVIAFFTEFASNTATIIIFLPVLAELAIRLRVHPLYLMIPGTVGCSFAFMLPVSTPPNSIAFASGHLLVKDMVRTGLLMNLMGVLLLSLAMNTWAQTIFQLGTFPDWADMYSVNVTALPPTLANDTFRTL

SEQ ID NO: 1916 - protein, 571 aa, Artificial Sequence
  Synthetic polypeptide
LMPVIQHFGRPSSRPVVDMVTLMSFSPAEIPVHEVECSYSTSNKMKEGVNITICFQIKSLIPQFQGRLVANLTYTLQLDGHRTRRRGLFPGGRHELRRNIAVTTSMSCTDFSFHFPVCVQDLISPINVSLNFSLWEEEGTPRDQRAQGKDIPPILRPSLHSETWEIPFEKNCGEDKKCEANLRVSFSPARSRALRLTAFASLSVELSLSNLEEDAYWVQLDLHFPPGLSFRKVEMLKPHSQIPVSCEELPEESRLLSRALSCNVSSPIFKAGHSVALQMMFNTLVNSSWGDSVELHANVTCNNEDSDLLEDNSATTIIPILYPINILIQDQEDSTLYVSFTPKGPKIHQVKHMYQVRIQPSIHDHNIPTLEAVVGVPQPPSEGPITHQWSVQMEPPVPCHYEDLERLPDAAEPCLPGALFRCPVVFRQEILVQVIGTLELVGEIEASSMFSLCSSLSISFNSSKHFHLYGSNASLAQVVMKVDVVYEKQMLYLYVLSGIGGLLLLLLIFIVLYKVGFFKRNLKEKMEAGRGVPNGIPAEDSEQLASGQEAGDPGCLKPLHEKDSESGGGKD

SEQ ID NO: 1917 - protein, 570 aa, Artificial Sequence
  Synthetic polypeptide
NYISQSPYHPMVPDSSWPAKGSCSISARRKERCHSPLEAAPSRHVGDMREHNQLNGWSSDENDWNEKLYPVWKRGDMRWKNSWKGGRVQAVLTSDSPALVGSNITFAVNLIFPRCQKEDANGNIVYEKNCRNEAGLSADPYVYNWTAWSEDSDGENGTGQSHHNVFPDGKPFPHHPGWRRWNFIYVFHTLGQYFQKLGRCSVRVSVNTANVTLGPQLMEVTVYRRHGRAYVPIAQVKDVYVVTDQIPVFVTMFQKNDRNSSDETFLKDLPIMFDVLIHDPSHFLNYSTINYKWSFGDNTGLFVSTNHTVNHTYVLNGTFSLNLTVKAAAPGPCPPPPPPPRPSKPTPSLGPAGDNPLELSRIPDENCQINRYGHFQATITIVEGILEVNIIQMTDVLMPVPWPESSLIDFVVTCQGSIPTEVCTIISDPTCEITQNTVCSPVDVDEMCLLTVRRTFNGSGTYCVNLTLGDDTSLALTSTLISVPDRDPASPLRMANSALISVGCLAIFVTVISLLVYKKHKEYNPIENSPGNVVRSKGLSVFLNRAKAVFFPGNQEKDPLLKNQEFKGVS

SEQ ID NO: 1918 - protein, 570 aa, Artificial Sequence
  Synthetic polypeptide
LMPVIQHFGRPSSRPVVDMVTLMSFSPAEIPVHEVECSYSTSNKMKEGVNITICFQIKSLIPQFQGRLVANLTYTLQLDGHRTRRRGLFPGGRHELRRNIAVTTSMSCTDFSFHFPVCVQDLISPINVSLNFSLWEEEGTPRDQRAGKDIPPILRPSLHSETWEIPFEKNCGEDKKCEANLRVSFSPARSRALRLTAFASLSVELSLSNLEEDAYWVQLDLHFPPGLSFRKVEMLKPHSQIPVSCEELPEESRLLSRALSCNVSSPIFKAGHSVALQMMFNTLVNSSWGDSVELHANVTCNNEDSDLLEDNSATTIIPILYPINILIQDQEDSTLYVSFTPKGPKIHQVKHMYQVRIQPSIHDHNIPTLEAVVGVPQPPSEGPITHQWSVQMEPPVPCHYEDLERLPDAAEPCLPGALFRCPVVFRQEILVQVIGTLELVGEIEASSMFSLCSSLSISFNSSKHFHLYGSNASLAQVVMKVDVVYEKQMLYLYVLSGIGGLLLLLLIFIVLYKVGFFKRNLKEKMEAGRGVPNGIPAEDSEQLASGQEAGDPGCLKPLHEKDSESGGGKD

SEQ ID NO: 1919 - protein, 566 aa, Artificial Sequence
  Synthetic polypeptide
MRKEQGSCGRSWDVDECSSGQHQCDSSTVCFNTVGSYSCRCRPGWKPRHGIPNNQKDTVCEDMTFSTWTPPPGVHSQTLSRFFDKVQDLGRDYKPGLANNTIQSILQALDELLEAPGDLETLPRLQQHCVASHLLDGLEDVLRGLSKNLSNGLLNFSYPAGTELSLEVQKQVDRSVTLRQNQAVMQLDWNQAQKSGDPGPSVVGLVSIPGMGKLLAEAPLVLEPEKQMLLHETHQGLLQDGSPILLSDVISAFLSNNDTQNLSSPVTFTFSHREEDPVLTVITYMGLSVSLLCLLLAALTFLLCKAIQNTSTSLHLQLSLCLFLAHLLFLVAIDQTGHKVLCSIIAGTLHYLYLATLTWMLLEALYLFLTARNLTVVNYSSINRFMKKLMFPVGYGVPAVTVAISAASRPHLYGTPSRCWLQPEKGFIWGFLGPVCAIFSVNLVLFLVTLWILKNRLSSLNSEVSTLRNTRMLAFKATAQLFILGCTWCLGILQVGPAARVMAYLFTIINSLQGVFIFLVYCLLSQQVREQYGKWSKGIRKLKTESEMHTLSSSAKADTSKPSTVN

SEQ ID NO: 1920 - protein, 565 aa, Artificial Sequence
  Synthetic polypeptide
TWETEVVDIQEVQGYVLIAHNQVRQVPLQRLRIVRGTQLFEDNYALAVLDNGDPLNNTTPVTGASPGGLRELQLRSLTEILKGGVLIQRNPQLCYQDTILWKDIFHKNNQLALTLIDTNRSRACHPCSPMCKGSRCWGESSEDCQSLTRTVCAGGCARCKGPLPTDCCHEQCAAGCTGPKHSDCLACLHFNHSGICELHCPALVTYNTDTFESMPNPEGRYTFGASCVTACPYNYLSTDVGSCTLVCPLHNQEVTAEDGTQRCEKCSKPCARVCYGLGMEHLREVRAVTSANIQEFAGCKKIFGSLAFLPESFDGDPASNTAPLQPEQLQVFETLEEITGYLYISAWPDSLPDLSVFQNLQVIRGRILHNGAYSLTLQGLGISWLGLRSLRELGSGLALIHHNTHLCFVHTVPWDQLFRNPHQALLHTANRPEDECVGEGLACHQLCARGHCWGPGPTQCVNCSQFLRGQECVEECRVLQGLPREYVNARHCLPCHPECQPQNGSVTCFGPEADQCVACAHYKDPPFCVARCPSGVKPDLSYMPIWKFPDEEGACQPCPINCTHS

SEQ ID NO: 1921 - protein, 565 aa, Artificial Sequence; identical to SEQ ID NO: 1920
  Synthetic polypeptide

SEQ ID NO: 1922 - protein, 563 aa, Artificial Sequence
  Synthetic polypeptide
VLMRSDGLKVCGTSPFTHCLSCRHVKMCLLPLCPSTVIVSFLRPHQPCLLYSLWNSNFLDNMLLRSAGKLNVGTKKEDGESTAPTPRPKVLRCKCHHHCPEDSVNNICSTDGYCFTMIEEDDSGLPVVTSGCLGLEGSDFQCRDTPIPHQRRSIECCTERNECNKDLHPTLPPLKNRDFVDGPIHHRALLISVTVCSLLLVLIILFCYFRYKRQETRPRYSIGLEQDETYIPPGESLRDLIEQSQSSGSGSGLPLLVQRTIAKQIQMVKQIGKGRYGEVWMGKWRGEKVAVKVFFTTEEASWFRETEIYQTVLMRHENILGFIAADIKGTGSWTQLYLITDYHENGSLYDYLKSTTLDAKSMLKLAYSSVSGLCHLHTEIFSTQGKPAIAHRDLKSKNILVKKNGTCCIADLGLAVKFISDTNEVDIPPNTRVGTKRYMPPEVLDESLNRNHFQSYIMADMYSFGLILWEVARRCVSGGIVEEYQLPYHDLVPSDPSYEDMREIVCIKKLRPSFPNRWSSDECLRQMGKLMTECWAHNPASRLTALRVKKTLAKMSESQDIKL

SEQ ID NO: 1923 - protein, 563 aa, Artificial Sequence
  Synthetic polypeptide
QKKGLDIQEVQGYVLIAHNQVRQVPLQRLRIVRGTQLFEDNYALAVLDNGDPLNNTTPVTGASPGGLRELQLRSLTEILKGGVLIQRNPQLCYQDTILWKDIFHKNNQLALTLIDTNRSRACHPCSPMCKGSRCWGESSEDCQSLTRTVCAGGCARCKGPLPTDCCHEQCAAGCTGPKHSDCLACLHFNHSGICELHCPALVTYNTDTFESMPNPEGRYTFGASCVTACPYNYLSTDVGSCTLVCPLHNQEVTAEDGTQRCEKCSKPCARVCYGLGMEHLREVRAVTSANIQEFAGCKKIFGSLAFLPESFDGDPASNTAPLQPEQLQVFETLEEITGYLYISAWPDSLPDLSVFQNLQVIRGRILHNGAYSLTLQGLGISWLGLRSLRELGSGLALIHHNTHLCFVHTVPWDQLFRNPHQALLHTANRPEDECVGEGLACHQLCARGHCWGPGPTQCVNCSQFLRGQECVEECRVLQGLPREYVNARHCLPCHPECQPQNGSVTCFGPEADQCVACAHYKDPPFCVARCPSGVKPDLSYMPIWKFPDEEGACQPCPINCTHS

SEQ ID NO: 1924 - protein, 563 aa, Artificial Sequence; identical to SEQ ID NO: 1923
  Synthetic polypeptide

SEQ ID NO: 1925 - protein, 561 aa, Artificial Sequence
  Synthetic polypeptide
GSGGPNGRCSLRRGSSFTFLTPGPNWDFTLKRKRREKDDDVVSLSSLDLKEPSNKRVRPLARVTSLANLISPVRNGAVRRFGQTIQSFTLRGDHRSPASAQKFSSRSTVPTPAKRRSSALWSEMLDITMKESLTTREIRRQEAIYEMSRGEQDLIEDLKLARKAYHDPMLKLSIMSEEELTHIFGDLDSYIPLHEDLLTRIGEATKPDGTVEQIGHILVSWLPRLNAYRGYCSNQLAAKALLDQKKQDPRVQDFLQRCLESPFSRKLDLWSFLDIPRSRLVKYPLLLKEILKHTPKEHPDVQLLEDAILIIQGVLSDINLKKGESECQYYIDKLEYLDEKQRDPRIEASKVLLCHGELRSKSGHKLYIFLFQDILVLTRPVTRNERHSYQVYRQPIPVQELVLEDLQDGDVRMGGSFRGAFSNSEKAKNIFRIRFHDPSPAQSHTLQANDVFHKQQWFNCIRAAIAPFQSAGSPPELQGLPELHEECEGNHPSARKLTAQRRASTVSSVTQVEVDENAYRCGSGMQMAEDSKSLKTHQTQPGIRRARDKALSGGKRKETLV

SEQ ID NO: 1926 - protein, 561 aa, Artificial Sequence
  Synthetic polypeptide
GRGGPNGRCSLRRGSSFTFLTPGPNWDFTLKRKRREKDDDVVSLSSLDLKEPSNKRVRPLARVTSLANLISPVRNGAVRRFGQTIQSFTLRGDHRSPASAQKFSSRSTVPTPAKRRSSALWSEMLDITMKESLTTREIRRQEAIYEMSRGEQDLIEDLKLARKAYHDPMLKLSIMSEEELTHIFGDLDSYIPLHEDLLTRIGEATKPDGTVEQIGHILVSWLPRLNAYRGYCSNQLAAKALLDQKKQDPRVQDFLQRCLESPFSRKLDLWSFLDIPRSRLVKYPLLLKEILKHTPKEHPDVQLLEDAILIIQGVLSDINLKKGESECQYYIDKLEYLDEKQRDPRIEASKVLLCHGELRSKSGHKLYIFLFQDILVLTRPVTRNERHSYQVYRQPIPVQELVLEDLQDGDVRMGGSFRGAFSNSEKAKNIFRIRFHDPSPAQSHTLQANDVFHKQQWFNCIRAAIAPFQSAGSPPELQGLPELHEECEGNHPSARKLTAQRRASTVSSVTQVEVDENAYRCGSGMQMAEDSKSLKTHQTQPGIRRARDKALSGGKRKETLV

SEQ ID NO: 1927 - protein, 556 aa, Artificial Sequence
  Synthetic polypeptide
PPPDAPSTVPIMHQVSATMRSITLSWPQPEQPNGIILDYEIRYYEKEHNEFNSSMARSQTNTARIDGLRPGMVYVVQVRARTVAGYGKFSGKMCFQTLTDDDYKSELREQLPLIAGSAAAGVVFVVSLVAISIVCSRKRAYSKEAVYSDKLQHYSTGRGSPGMKIYIDPFTYEDPNEAVREFAKEIDVSFVKIEEVIGAGEFGEVYKGRLKLPGKREIYVAIKTLKAGYSEKQRRDFLSEASIMGQFDHPNIIRLEGVVTKSRPVMIITEFMENGALDSFLRQNDGQFTVIQLVGMLRGIAAGMKYLAEMNYVHRDLAARNILVNSNLVCKVSDFGLSRYLQDDTSDPTYTSSLGGKIPVRWTAPEAIAYRKFTSASDVWSYGIVMWEVMSFGERPYWDMSNQDVINAIEQDYRLPPPMDCPAALHQLMLDCWQKDRNSRPRFAEIVNTLDKMIRNPASLKTVATITAVPSQPLLDRSIPDFTAFTTVDDWLSAIKMVQYRDSFLTAGFTSLQLVTQMTSEDLLRIGITLAGHQKKILNSIHSMRVQISQSPTAMA

SEQ ID NO: 1928 - protein, 556 aa, Artificial Sequence
  Synthetic polypeptide
FLLKMTLGFHDVLGNERPSAYMREHNQLNGWSSDENDWNEKLYPVWKRGDMRWKNSWKGGRVQAVLTSDSPALVGSNITFAVNLIFPRCQKEDANGNIVYEKNCRNEAGLSADPYVYNWTAWSEDSDGENGTGQSHHNVFPDGKPFPHHPGWRRWNFIYVFHTLGQYFQKLGRCSVRVSVNTANVTLGPQLMEVTVYRRHGRAYVPIAQVKDVYVVTDQIPVFVTMFQKNDRNSSDETFLKDLPIMFDVLIHDPSHFLNYSTINYKWSFGDNTGLFVSTNHTVNHTYVLNGTFSLNLTVKAAAPGPCPPPPPPPRPSKPTPSLATTLKSYDSNTPGPAGDNPLELSRIPDENCQINRYGHFQATITIVEGILEVNIIQMTDVLMPVPWPESSLIDFVVTCQGSIPTEVCTIISDPTCEITQNTVCSPVDVDEMCLLTVRRTFNGSGTYCVNLTLGDDTSLALTSTLISVPDRDPASPLRMANSALISVGCLAIFVTVISLLVYKKHKEYNPIENSPGNVVRSKGLSVFLNRAKAVFFPGNQEKDPLLKNQEFKGVS

SEQ ID NO: 1929 - protein, 555 aa, Artificial Sequence
  Synthetic polypeptide
EAWILATASTLVSLVISDLFLDLGFSSGKIATQTTTDSSNKTAPTPASSVTIMATDTAQQSTVPTSKANEILASVKATTLGVSSDSPGTTTLAQQVSGPVNTTVARGGGSGNPTTTIESPKSTKSADTTTVATSTATAKPNTTSSQNGAEDTTNSGGKSSHSVTTDLTSTKAEHLTTPHPTSPLSPRQPTSTHPVATPTSSGHDHLMKISSSSSTVAIPGYTFTSPGMTTTLLETVFHHVSQAGLELLTSGDLPTLASQSAGITASSVISQRTQQTSSQMPASSTAPSSQETVQPTSPATALRTPTLPETMSSSPTAASTTHRYPKTPSPTVAHESNWAKCEDLETQTQSEKQLVLNLTGNTLCAGGASDEKLISLICRAVKATFNPAQDKCGIRLASVPGSQTVVVKEITIHTKLPAKDVYERLKDKWDELKEAGVSDMKLGDQGPPEEAEDRFSMPLIITIVCMASFLLLVAALYGCCHQRLSQRKDQQRLTEELQTVENGYHDNPTLEVMETSSEMQEKKVVSLNGELGDSWIVPLDNLTKDDLDEEEDTHL

SEQ ID NO: 1930 - protein, 555 aa, Artificial Sequence; identical to SEQ ID NO: 1929
  Synthetic polypeptide

SEQ ID NO: 1931 - protein, 553 aa, Artificial Sequence
  Synthetic polypeptide
VTQGGRSCVDGARDHSDTATSQGVARIAATQTTTDSSNKTAPTPASSVTIMATDTAQQSTVPTSKANEILASVKATTLGVSSDSPGTTTLAQQVSGPVNTTVARGGGSGNPTTTIESPKSTKSADTTTVATSTATAKPNTTSSQNGAEDTTNSGGKSSHSVTTDLTSTKAEHLTTPHPTSPLSPRQPTSTHPVATPTSSGHDHLMKISSSSSTVAIPGYTFTSPGMTTTLLETVFHHVSQAGLELLTSGDLPTLASQSAGITASSVISQRTQQTSSQMPASSTAPSSQETVQPTSPATALRTPTLPETMSSSPTAASTTHRYPKTPSPTVAHESNWAKCEDLETQTQSEKQLVLNLTGNTLCAGGASDEKLISLICRAVKATFNPAQDKCGIRLASVPGSQTVVVKEITIHTKLPAKDVYERLKDKWDELKEAGVSDMKLGDQGPPEEAEDRFSMPLIITIVCMASFLLLVAALYGCCHQRLSQRKDQQRLTEELQTVENGYHDNPTLEVMETSSEMQEKKVVSLNGELGDSWIVPLDNLTKDDLDEEEDTHL

SEQ ID NO: 1932 - protein, 553 aa, Artificial Sequence; identical to SEQ ID NO: 1931
  Synthetic polypeptide

SEQ ID NO: 1933 - protein, 552 aa, Artificial Sequence
  Synthetic polypeptide
QAPVVLATWEAEEGGSLEPRSWRLRLQEKAADTIEALQKAGIKVWVLTGDKMETAAATCYACKLFRRNTQLLELTTKRIEEQSLHDVLFELSKTVLRHSGSLTRDNLSGLSADMQDYGLIIDGAALSLIMKPREDGSSGNYRELFLEICRSCSAVLCCRMAPLQKAQIVKLIKFSKEHPITLAIGDGANDVSMILEAHVGIGVIGKEGRQAARNSDYAIPKFKHLKKMLLVHGHFYYIRISELVQYFFYKNVCFIFPQFLYQFFCGFSQQTLYDTAYLTLYNISFTSLPILLYSLMEQHVGIDVLKRDPTLYRDVAKNALLRWRVFIYWTLLGLFDALVFFFGAYFVFENTTVTSNGQIFGNWTFGTLVFTVMVFTVTLKLALDTHYWTWINHFVIWGSLLFYVVFSLLWGGVIWPFLNYQRMYYVFIQMLSSGPAWLAIVLLVTISLLPDVLKKVLCRQLWPTATERVQNGCAQPRDRDSEFTPLASLQSPGYQSTCPSAAWYSSHSQQVTLAAWKEKVSTEPPPILGGSHHHCSSIPSHSCPRSRVGMLV

SEQ ID NO: 1934 - protein, 551 aa, Artificial Sequence
  Synthetic polypeptide
QLTLSMPLFPLECEPDEESWGKLVHANFGTKKDFEDLYTPVNGSIVIVRAGKITFAEKVANAESLNAIGVLIYMDQTKFPIVNAELSFFGHAHLGTGDPYTPGFPSFNHTQFPPSRSSGLPNIPVQTISRAAAEKLFGNMEGDCPSDWKTDSTCRMVTSESKNVKLTVSNVLKEIKILNIFGVIKGFVEPDHYVVVGAQRDAWGPGAAKSGVGTALLLKLAQMFSDMVLKDGFQPSRSIIFASWSAGDFGSVGATEWLEGYLSSLHLKAFTYINLDKAVLGTSNFKVSASPLLYTLIEKTMQNVKHPVTGQFLYQDSNWASKVEKLTLDNAAFPFLAYSGIPAVSFCFCEDTDYPYLGTTMDTYKELIERIPELNKVARAAAEVAGQFVIKLTHDVELNLDYERYNSQLLSFVRDLNQYRADIKEMGLSLQWLYSARGDFFRATSRLTTDFGNAEKTDRFVMKKLNDRVMRVEYHFLSPYVSPKESPFRHVFWGSGSHTLPALLENLKLRKQNNGAFNETLFRNQLALATWTIQGAANALSGDVWDIDNEF

SEQ ID NO: 1935 - protein, 551 aa, Artificial Sequence; identical to SEQ ID NO: 1934
  Synthetic polypeptide

SEQ ID NO: 1936 - protein, 551 aa, Artificial Sequence; identical to SEQ ID NO: 1934
  Synthetic polypeptide

SEQ ID NO: 1937 - protein, 548 aa, Artificial Sequence
  Synthetic polypeptide
DGDNPGLPQSAWRFYATNLSRTDLHSTWQYYERTVTVPMYRLIPPLNQLELLRNLKSKSGLAFRKDPPPEPSPSQKVSLKDRVFSSPRGVAAKGKGSPQAQTVRRSPSADQSLEDSPSKVPKSWSFGDRSRARQAFRIKGAASRQNSEEASLPGEDIVDDKSCPCEFVTEDLTPGLKVSIRAVCVMRFLVSKRKFKESLRPYDVMDVIEQYSAGHLDMLSRIKSLQTGIDMIVGPPPPSTPRHKKYPTKGPTAPPRESPQYSPRVDQIVGRGPAITDKDRTKGPAEAELPEDPSMMGRLGKVEKQVLSMEKKLDFLVNIYMQRMGIPPTETEAYFGAKEPEPAPPYHSPEDSREHVDRHGCIVKIVRSSSSTGQKNFSAPPAAPPVQCPPSTSWQPQSHPRQGHGTSPVGDHGSLVRIPPPPAHERSLSAYGGGNRASMEFLRQEDTPGCRPPEGNLRDSDTSISIPSVDHEELERSFSGFSISQSKENLDALNSCYAAVAPCAKVRPYIAEGESDTDSDLCTPCGPPPRSATGEGPFGDVGWAGPRK

SEQ ID NO: 1938 - protein, 548 aa, Artificial Sequence
  Synthetic polypeptide
DGDNPGLPQSAWRFYATNLSRTDLHSTWQYYERTVTVPMYRLIPPLNQLELLRNLKSKSGLAFRKDPPPEPSPSQKVSLKDRVFSSPRGVAAKGKGSPQAQTVRRSPSADQSLEDSPSKVPKSWSFGDRSRARQAFRIKGAASRQNSEEASLPGEDIVDDKSCPCEFVTEDLTPGLKVSIRAVCVMRFLVSKRKFKESLRPYDVMDVIEQYSAGHLDMLSRIKSLQSRIDMIVGPPPPSTPRHKKYPTKGPTAPPRESPQYSPRVDQIVGRGPAITDKDRTKGPAEAELPEDPSMMGRLGKVEKQVLSMEKKLDFLVNIYMQRMGIPPTETEAYFGAKEPEPAPPYHSPEDSREHVDRHGCIVKIVRSSSSTGQKNFSAPPAAPPVQCPPSTSWQPQSHPRQGHGTSPVGDHGSLVRIPPPPAHERSLSAYGGGNRASMEFLRQEDTPGCRPPEGNLRDSDTSISIPSVDHEELERSFSGFSISQSKENLDALNSCYAAVAPCAKVRPYIAEGESDTDSDLCTPCGPPPRSATGEGPFGDVGWAGPRK

SEQ ID NO: 1939 - protein, 547 aa, Artificial Sequence
  Synthetic polypeptide
PRCPSQEGLEQRPTHDHQCYNGSGMDYRGTASTTKSGHQCQPWALQHPHSHHLSSTDFPELGGGHAYCRNPGGQMEGPWCFTQNKNVRMELCDVPSCSPRDSSKMGILYILVPSIAIPLVIACLFFLVCMCRNKQKASASTPQRRQLMASPSQDMEMPLINQHKQAKLKEISLSAVRFMEELGEDRFGKVYKGHLFGPAPGEQTQAVAIKTLKDKAEGPLREEFRHEAMLRARLQHPNVVCLLGVVTKDQPLSMIFSYCSHGDLHEFLVMRSPHSDVGSTDDDRTVKSALEPPDFVHLVAQIAAGMEYLSSHHVVHKDLATRNVLVYDKLNVKISDLGLFREVYAADYYKLLGNSLLPIRWMAPEAIMYGKFSIDSDIWSYGVVLWEVFSYGLQPYCGYSNQDVVEMIRNRQVLPCPDDCPAWVYALMIECWNEFPSRRPRFKDIHSRLRAWGNLSNYNSSAQTSGASNTTQTSSLSTSPVSNVVRMRGSGRQCWMTETPNALLWHNVSGVGSCRWVRGLADFKDEATDFRVMPRDPSLHCHVTSTA

SEQ ID NO: 1940 - protein, 545 aa, Artificial Sequence
  Synthetic polypeptide
QALWLTPVIPALWEAEAGGSRGQEIETTSTLACARASALCLNFNSTLILLPVCRNLLSFLRGTCSFCSRTLRKQLDHNLTFHKLVAYMICLHTAIHIIAHLFNFDCYSRSRQATDGSLASILSSLSHDEKKGGSWLNPIQSRNTTVEYVTFTSIAGLTGVIMTIALILMVTSATEFIRRSYFEVFWYTHHLFIFYILGLGIHGIGGIVRGQTEESMNESHPRKCAESFEMWDDRDSHCRRPKFEGHPPESWKWILAPVILYICERILRFYRSQQKVVITKVVMHPSKVLELQMNKRGFSMEVGQYIFVNCPSISLLEWHPFTLTSAPEEDFFSIHIRAAGDWTENLIRAFEQQYSPIPRIEVDGPFGTASEDVFQYEVAVLVGAGIGVTPFASILKSIWYKFQCADHNLKTKKIYFYWICRETGAFSWFNNLLTSLEQEMEELGKVGFLNYRLFLTGWDSNIVGHAALNFDKATDIVTGLKQKTSFGRPMWDNEFSTIATSHPKSVVGVFLCGPRTLAKSLRKCCHRYSSLDPRKVQFYFNKENF

SEQ ID NO: 1941 - protein, 545 aa, Artificial Sequence
  Synthetic polypeptide
LSESLHLSASVSLSPMALHGLHEIIFAVHLDQCLAHGAQDVRVQVLPEVRGQLGGTVELPCHLLPPVPGLYISLVTWQRPDAPANHQNVAAFHPKMGPSFPSPKPGSERLSFVSAKQSTGQDTEAELQDATLALHGLTVEDEGNYTCEFATFPKGSVRGMTWLRVIAKPKNQAEAQKVTFSQDPTTVALCISKEGRPPARISWLSSLDWEAKETQVSGTLAGTVTVTSRFTLVPSGRADGVTVTCKVEHESFEEPALIPVTLSVRYPPEVSISGYDDNWYLGRTDATLSCDVRSNPEPTGYDWSTTSGTFPTSAVAQGSQLVIHAVDSLFNTTFVCTVTNAVGMGRAEQVIFVRETPNTAGAGATGGIIGGIIAAIIATAVAATGILICRQQRKEQTLQGAEEDEDLEGPPSYKPPTPKAKLEAQEMPSQLFTLGASEHSPLKTPYFDAGASCTEQEMPRYHELPTLEERSGPLHPGATSLGSPIPVPPGPPAVEDVSLDLEDEEGEEEEEYLDKINPIYDALSYSSPSDSYQGKGFVMSRAMYV

SEQ ID NO: 1942 - protein, 544 aa, Artificial Sequence
  Synthetic polypeptide
FLLKMTLGFHDVLGNERPSAYMREHNQLNGWSSDENDWNEKLYPVWKRGDMRWKNSWKGGRVQAVLTSDSPALVGSNITFAVNLIFPRCQKEDANGNIVYEKNCRNEAGLSADPYVYNWTAWSEDSDGENGTGQSHHNVFPDGKPFPHHPGWRRWNFIYVFHTLGQYFQKLGRCSVRVSVNTANVTLGPQLMEVTVYRRHGRAYVPIAQVKDVYVVTDQIPVFVTMFQKNDRNSSDETFLKDLPIMFDVLIHDPSHFLNYSTINYKWSFGDNTGLFVSTNHTVNHTYVLNGTFSLNLTVKAAAPGPCPPPPPPPRPSKPTPSLGPAGDNPLELSRIPDENCQINRYGHFQATITIVEGILEVNIIQMTDVLMPVPWPESSLIDFVVTCQGSIPTEVCTIISDPTCEITQNTVCSPVDVDEMCLLTVRRTFNGSGTYCVNLTLGDDTSLALTSTLISVPDRDPASPLRMANSALISVGCLAIFVTVISLLVYKKHKEYNPIENSPGNVVRSKGLSVFLNRAKAVFFPGNQEKDPLLKNQEFKGVS

SEQ ID NO: 1943 - protein, 543 aa, Artificial Sequence
  Synthetic polypeptide
FSGSQDFESYNTSFPGSPVCRWQIVELLTLHNCHIEHSRYLSLLDAVDNSKMALNSGSPPAIGPYYENHGYQPENPYPAQPTVVPTVYEVHPAQYYPSPVPQYAPRVLTQASNPVVCTQPKSPSGTVCTSKTKKALCITLTLGTFLVGAALAAGLLWKFMGSKCSNSGIECDSSGTCINPSNWCDGVSHCPGGEDENRCVRLYGPNFILQVYSSQRKSWHPVCQDDWNENYGRAACRDMGYKNNFYSSQGIVDDSGSTSFMKLNTSAGNVDIYKKLYHSDACSSKAVVSLRCIACGVNLNSSRQSRIVGGESALPGAWPWQVSLHVQNVHVCGGSIITPEWIVTAAHCVEKPLNNPWHWTAFAGILRQSFMFYGAGYQVEKVISHPNYDSKTKNNDIALMKLQKPLTFNDLVKPVCLPNPGMMLQPEQLCWISGWGATEEKGKTSEVLNAAKVLLIETQRCNSRYVYDNLITPAMICAGFLQGNVDSCQGDSGGPLVTSKNNIWWLIGDTSWGSGCAKAYRPGVYGNVMVFTDWIYRQMRADG

SEQ ID NO: 1944 - protein, 542 aa, Artificial Sequence
  Synthetic polypeptide
SQRFGRPREVDHLRPGVQDQPGQHSRNAKNQPGVVTQKSASSIFMLSFYLTCSLLLTLVVFVSVIYSCVKLFPSPLQTLSRKIVRSKMNSTLVGVFTITLVFLAAFVNMFTCNSRDLLGCLAQEHNISASQVNACHVAESAVNYSLGDEQGFCGSPWPNCNFPEYFTYSVLLSLLACSVFLQISCIGKLVLMLAIELIYVLIVEVPGVTLFDNADLLVTANAIDFFNNGTSQWSLCENLRHRRMEAGTYFPSGVKEQSPEHATKVALKVVTPIIISVFVLALYLHAQQVESTARLDFLWKLQATEEKEEMEELQAYNRRLLHNILPKDVAAHFLARERRNDELYYQSCECVAVMFASIANFSEFYVELEANNEGVECLRLLNEIIADFDEIISEDRFRQLEKIKTIGSTYMAASGLNDSTYDKVGKTHIKALADFAMKLMDQMKYINEHSFNNFQMKIGLNIGPVVAGVIGARKPQYDIWGNTVNVASRMDSTGVPDRIQVTTDMYQVLAANTYQLECRGVVKVKGKGEMMTYFLNGGPPLS

SEQ ID NO: 1945 - protein, 542 aa, Artificial Sequence
  Synthetic polypeptide
TSGSAWRFYATNLSRTDLHSTWQYYERTVTVPMYRLIPPLNQLELLRNLKSKSGLAFRKDPPPEPSPSQKVSLKDRVFSSPRGVAAKGKGSPQAQTVRRSPSADQSLEDSPSKVPKSWSFGDRSRARQAFRIKGAASRQNSEEASLPGEDIVDDKSCPCEFVTEDLTPGLKVSIRAVCVMRFLVSKRKFKESLRPYDVMDVIEQYSAGHLDMLSRIKSLQTGIDMIVGPPPPSTPRHKKYPTKGPTAPPRESPQYSPRVDQIVGRGPAITDKDRTKGPAEAELPEDPSMMGRLGKVEKQVLSMEKKLDFLVNIYMQRMGIPPTETEAYFGAKEPEPAPPYHSPEDSREHVDRHGCIVKIVRSSSSTGQKNFSAPPAAPPVQCPPSTSWQPQSHPRQGHGTSPVGDHGSLVRIPPPPAHERSLSAYGGGNRASMEFLRQEDTPGCRPPEGNLRDSDTSISIPSVDHEELERSFSGFSISQSKENLDALNSCYAAVAPCAKVRPYIAEGESDTDSDLCTPCGPPPRSATGEGPFGDVGWAGPRK

SEQ ID NO: 1946 - protein, 542 aa, Artificial Sequence
  Synthetic polypeptide
TSGSAWRFYATNLSRTDLHSTWQYYERTVTVPMYRLIPPLNQLELLRNLKSKSGLAFRKDPPPEPSPSQKVSLKDRVFSSPRGVAAKGKGSPQAQTVRRSPSADQSLEDSPSKVPKSWSFGDRSRARQAFRIKGAASRQNSEEASLPGEDIVDDKSCPCEFVTEDLTPGLKVSIRAVCVMRFLVSKRKFKESLRPYDVMDVIEQYSAGHLDMLSRIKSLQSRIDMIVGPPPPSTPRHKKYPTKGPTAPPRESPQYSPRVDQIVGRGPAITDKDRTKGPAEAELPEDPSMMGRLGKVEKQVLSMEKKLDFLVNIYMQRMGIPPTETEAYFGAKEPEPAPPYHSPEDSREHVDRHGCIVKIVRSSSSTGQKNFSAPPAAPPVQCPPSTSWQPQSHPRQGHGTSPVGDHGSLVRIPPPPAHERSLSAYGGGNRASMEFLRQEDTPGCRPPEGNLRDSDTSISIPSVDHEELERSFSGFSISQSKENLDALNSCYAAVAPCAKVRPYIAEGESDTDSDLCTPCGPPPRSATGEGPFGDVGWAGPRK

SEQ ID NO: 1947 - protein, 542 aa, Artificial Sequence
  Synthetic polypeptide
SAQFRFVAQPNCQQLLASRWYDEFPGWRRRHWAVKMVTCFIIGLLFPVFSVCYLIAPKSPLGLFIRKPFIKFICHTASYLTFLFLLLLASQHIDRSDLNRQGPPPTIVEWMILPWVLGFIWGEIKQMWDGGLQDYIHDWWNLMDFVMNSLYLATISLKIVAFVKYSALNPRESWDMWHPTLVAEALFAIANIFSSLRLISLFTANSHLGPLQISLGRMLLDILKFLFIYCLVLLAFANGLNQLYFYYEETKGLTCKGIRCEKQNNAFSTLFETLQSLFWSIFGLINLYVTNVKAQHEFTEFVGATMFGTYNVISLVVLLNMLIAMMNNSYQLIADHADIEWKFARTKLWMSYFEEGGTLPTPFNVIPSPKSLWYLIKWIWTHLCKKKMRRKPESFGTIGRRAADNLRRHHQYQEVMRNLVKRYVAAMIRDAKTEEVARQQAAGPLERNIQLESRGLASRGDLSIPGLSEQCVLVDHRERNTDTLGLQVGKRVCPFKSEKVVVEDTVPIIPKEKHAKEEDSSIDYDLNLPDTVTHEDYVTTRL

SEQ ID NO: 1948 - protein, 542 aa, Artificial Sequence; identical to SEQ ID NO: 1947
  Synthetic polypeptide

SEQ ID NO: 1949 - protein, 540 aa, Artificial Sequence
  Synthetic polypeptide
WFKSVWHFPIHSLSLLPSREDVLASPLPFHRNSNFLDNMLLRSAGKLNVGTKKEDGESTAPTPRPKVLRCKCHHHCPEDSVNNICSTDGYCFTMIEEDDSGLPVVTSGCLGLEGSDFQCRDTPIPHQRRSIECCTERNECNKDLHPTLPPLKNRDFVDGPIHHRALLISVTVCSLLLVLIILFCYFRYKRQETRPRYSIGLEQDETYIPPGESLRDLIEQSQSSGSGSGLPLLVQRTIAKQIQMVKQIGKGRYGEVWMGKWRGEKVAVKVFFTTEEASWFRETEIYQTVLMRHENILGFIAADIKGTGSWTQLYLITDYHENGSLYDYLKSTTLDAKSMLKLAYSSVSGLCHLHTEIFSTQGKPAIAHRDLKSKNILVKKNGTCCIADLGLAVKFISDTNEVDIPPNTRVGTKRYMPPEVLDESLNRNHFQSYIMADMYSFGLILWEVARRCVSGGIVEEYQLPYHDLVPSDPSYEDMREIVCIKKLRPSFPNRWSSDECLRQMGKLMTECWAHNPASRLTALRVKKTLAKMSESQDIKL

SEQ ID NO: 1950 - protein, 540 aa, Artificial Sequence
  Synthetic polypeptide
DGDNPGLPQSAWRFYATNLSRTDLHSTWQYYERTVTVPMYSSQTQTYGASRLIPPLNQLELLRNLKSKSGLAFRKDPPPEPSPSKGSPCRGPLCGCCPGRSSQKVSLKDRVFSSPRGVAAKGKGSPQAQTVRRSPSADQSLEDSPSKVPKSWSFGDRSRARQAFRIKGAASRQNSEEASLPGEDIVDDKSCPCEFVTEDLTPGLKVSIRAVCVMRFLVSKRKFKESLRPYDVMDVIEQYSAGHLDMLSRIKSLQSRVDQIVGRGPAITDKDRTKGPAEAELPEDPSMMGRLGKVEKQVLSMEKKLDFLVNIYMQRMGIPPTETEAYFGAKEPEPAPPYHSPEDSREHVDRHGCIVKIVRSSSSTGQKNFSAPPAAPPVQCPPSTSWQPQSHPRQGHGTSPVGDHGSLVRIPPPPAHERSLSAYGGGNRASMEFLRQEDTPGCRPPEGNLRDSDTSISIPSVDHEELERSFSGFSISQSKENLDALNSCYAAVAPCAKVRPYIAEGESDTDSDLCTPCGPPPRSATGEGPFGDVGWAGPRK

SEQ ID NO: 1951 - protein, 540 aa, Artificial Sequence
  Synthetic polypeptide
DGDNPGLPQSAWRFYATNLSRTDLHSTWQYYERTVTVPMYSSQTQTYGASRLIPPLNQLELLRNLKSKSGLAFRKDPPPEPSPSKGSPCRGPLCGCCPGRSSQKVSLKDRVFSSPRGVAAKGKGSPQAQTVRRSPSADQSLEDSPSKVPKSWSFGDRSRARQAFRIKGAASRQNSEEASLPGEDIVDDKSCPCEFVTEDLTPGLKVSIRAVCVMRFLVSKRKFKESLRPYDVMDVIEQYSAGHLDMLSRIKSLQSQVDQIVGRGPAITDKDRTKGPAEAELPEDPSMMGRLGKVEKQVLSMEKKLDFLVNIYMQRMGIPPTETEAYFGAKEPEPAPPYHSPEDSREHVDRHGCIVKIVRSSSSTGQKNFSAPPAAPPVQCPPSTSWQPQSHPRQGHGTSPVGDHGSLVRIPPPPAHERSLSAYGGGNRASMEFLRQEDTPGCRPPEGNLRDSDTSISIPSVDHEELERSFSGFSISQSKENLDALNSCYAAVAPCAKVRPYIAEGESDTDSDLCTPCGPPPRSATGEGPFGDVGWAGPRK

SEQ ID NO: 1952 - protein, 540 aa, Artificial Sequence
  Synthetic polypeptide
ATQKTGDFCISIRGCLSLLVTVQHTERYVTLFASIILKCDYTTSAQLQDVVVTWRFKSFCKDPIFDYYSASYQAALSLGQDPSNDCNDNQREVRIVAQRRGQNEPVLGVDYRQRKITIQNRADLVINEVMWWDHGVYYCTIEAPGDTSGDPDKEVKLIVLHWLTVIFIILGALLLLLLIGVCWCQCCPQYCCCYIRCPCCPAHCCCPEEALARHRYMKQAQALGPQMMGKPLYWGADRSSQVSSYPMHPLLQRDLSLPSSLPQMPMTQTTNQPPIANGVLEYLEKELRNLNLAQPLPPDLKGRFGHPCSMLSSLGSEVVERRIIHLPPLIRDLSSSRRTSDSLHQQWLTPIPSRPWDLREGRSHHHYPDFHQELQDRGPKSWALERRELDPSWSGRHRSSRLNGSPIHWSDRDSLSDVPSSSEARWRPSHPPFRSRCQERPRRPSPRESTQRHGRRRRHRSYSPPLPSGLSSWSSEEDKERQPQSWRAHRRGSHSPHWPEEKPPSYRSLDITPGKNSRKKGSVERRSEKDSSHSGRSVVI

SEQ ID NO: 1953 - protein, 539 aa, Artificial Sequence
  Synthetic polypeptide
LMPVIPALWGTEMADHLRSGVQDQAGQRGELPVSTKNTKISQVCWCMPLVPATQEAKALLLLGAAALACLALDLLFLLFYSFWLCCRRRKSEEHLDADCCCTAWCVIIATLVCSAGIAVGFYGNGETSDGIHRATYSLRHANRTVAGVQDRVWDTAVGLNHTAEPSLQTLERQLAGRPEPLRAVQRLQGLLETLLGYTAAIPFWRNTAVSLEVLAEQVDLYDWYRWLGYLGLLLLDVIICLLVLVGLIRSSKGILVGVCLLGVLALVISWGALGLELAVSVGSSDFCVDPDAYVTKMVEEYSVLSGDILQYYLACSPRAANPFQQKLSGSHKALVEMQDVVAELLRTVPWEQPATKDPLLRVQEVLNGTEVNLQHLTALVDCRSLHLDYVQALTGFCYDGVEGLIYLALFSFVTALMFSSIVCSVPHTWQQKRGPDEDGEEEAAPGPRQAHDSLYRVHMPSLYSCGSSYGSETSIPAAAHTVSNAPVTEYMSQNANFQNPRCENTPLIGRESPPPSYTSSMRAKYLATSQPRPDSSGSH

SEQ ID NO: 1954 - protein, 538 aa, Artificial Sequence
  Synthetic polypeptide
PGTVADACNPSTLRGRGGGSRGQEIETILGAQDVRVQVLPEVRGQLGGTVELPCHLLPPVPGLYISLVTWQRPDAPANHQNVAAFHPKMGPSFPSPKPGSERLSFVSAKQSTGQDTEAELQDATLALHGLTVEDEGNYTCEFATFPKGSVRGMTWLRVIAKPKNQAEAQKVTFSQDPTTVALCISKEGRPPARISWLSSLDWEAKETQVSGTLAGTVTVTSRFTLVPSGRADGVTVTCKVEHESFEEPALIPVTLSVRYPPEVSISGYDDNWYLGRTDATLSCDVRSNPEPTGYDWSTTSGTFPTSAVAQGSQLVIHAVDSLFNTTFVCTVTNAVGMGRAEQVIFVRETPNTAGAGATGGIIGGIIAAIIATAVAATGILICRQQRKEQTLQGAEEDEDLEGPPSYKPPTPKAKLEAQEMPSQLFTLGASEHSPLKTPYFDAGASCTEQEMPRYHELPTLEERSGPLHPGATSLGSPIPVPPGPPAVEDVSLDLEDEEGEEEEEYLDKINPIYDALSYSSPSDSYQGKGFVMSRAMYV

SEQ ID NO: 1955 - protein, 537 aa, Artificial Sequence
  Synthetic polypeptide
CGPLEEHWSEKWEACILVLILPLICHMTLKKLLIFSVPRFMHLYRGNNICPSRMAVRSIEPLDPSEKTPIKWMALESIHFGKYTHQSDVWSYGVTVWELMTFGAEPYAGLRLAEVPDLLEKGERLAQPQICTIDVYMVMVKCWMIDENIRPTFKELANEFTRMARDPPRYLVIKRESGPGIAPGPEPHGLTNKKLEEVELEPELDLDLDLEAEEDNLATTTLGSALSLPVGTLNRPRGSQSLLSPSSGYMPMNQGNLGESCQESAVSGSSERCPRPVSLHPMPRGCLASESSEGHVTGSEAELQEKVSMCRSRSRSRSPRPRGDSAYHSQRHSLLTPVTPLSPPGLEEEDVNGYVMPDTHLKGTPSSREGTLSSVGLSSVLGTEEEDEDEEYEYMNRRRRHSPPHPPRPSSLEELGYEYMDVGSDLSASLGSTQSCPLHPVPIMPTAGTTPDEDYEYMNRQRDGGGPGGDYAAMGACPASEQGYEEMRAFQGPGHQAPHVHYARLKTLRSLEATDSAFDNPDYWHSRLFPKANAQRT

SEQ ID NO: 1956 - protein, 535 aa, Artificial Sequence
  Synthetic polypeptide
GQAWWLMPVIPALWEAEADGSLEILMSEPGKLSQKIKVWLQEYWNITDLVAISTFMIGAILRLQNQPYMGYGRVIYCVDIIFWYIRVLDIFGVNKYLGPYVMMIGKMMIDMLYFVVIMLVVLMSFGVARQAILHPEEKPSWKLARNIFYMPYWMIYGEVFADQIDLYAMEINPPCGENLYDEEGKRLPPCIPGAWLTPALMACYLLVANILLVNLLIAVFNNTFFEVKSISNQVWKFQRYQLIMTFHDRPVLPPPMIILSHIYIIIMRLSGRCRKKREGDQEERDRGLKLFLSDEELKRLHEFEEQCVQEHFREKEDEQQSSSDERIRVTSERVENMSMRLEEINERETFMKTSLQTVDLRLAQLEELSNRMVNALENLAGIDRSDLIQARSRASSECEATYLLRQSSINSADGYSLYRYHFNGEELLFEDTSLSTSPGTGVRKKTCSFRIKEEKDVKTHLVPECQNSLHLSLGTSTSATPDGSHLAVDDLKNAEESKLGPDIGISKEDDERQTDSKKEETISPSLNKTDVIHGQ

SEQ ID NO: 1957 - protein, 534 aa, Artificial Sequence
  Synthetic polypeptide
TSGSAWRFYATNLSRTDLHSTWQYYERTVTVPMYSSQTQTYGASRLIPPLNQLELLRNLKSKSGLAFRKDPPPEPSPSKGSPCRGPLCGCCPGRSSQKVSLKDRVFSSPRGVAAKGKGSPQAQTVRRSPSADQSLEDSPSKVPKSWSFGDRSRARQAFRIKGAASRQNSEEASLPGEDIVDDKSCPCEFVTEDLTPGLKVSIRAVCVMRFLVSKRKFKESLRPYDVMDVIEQYSAGHLDMLSRIKSLQSRVDQIVGRGPAITDKDRTKGPAEAELPEDPSMMGRLGKVEKQVLSMEKKLDFLVNIYMQRMGIPPTETEAYFGAKEPEPAPPYHSPEDSREHVDRHGCIVKIVRSSSSTGQKNFSAPPAAPPVQCPPSTSWQPQSHPRQGHGTSPVGDHGSLVRIPPPPAHERSLSAYGGGNRASMEFLRQEDTPGCRPPEGNLRDSDTSISIPSVDHEELERSFSGFSISQSKENLDALNSCYAAVAPCAKVRPYIAEGESDTDSDLCTPCGPPPRSATGEGPFGDVGWAGPRK

SEQ ID NO: 1958 - protein, 534 aa, Artificial Sequence
  Synthetic polypeptide
TSGSAWRFYATNLSRTDLHSTWQYYERTVTVPMYSSQTQTYGASRLIPPLNQLELLRNLKSKSGLAFRKDPPPEPSPSKGSPCRGPLCGCCPGRSSQKVSLKDRVFSSPRGVAAKGKGSPQAQTVRRSPSADQSLEDSPSKVPKSWSFGDRSRARQAFRIKGAASRQNSEEASLPGEDIVDDKSCPCEFVTEDLTPGLKVSIRAVCVMRFLVSKRKFKESLRPYDVMDVIEQYSAGHLDMLSRIKSLQSQVDQIVGRGPAITDKDRTKGPAEAELPEDPSMMGRLGKVEKQVLSMEKKLDFLVNIYMQRMGIPPTETEAYFGAKEPEPAPPYHSPEDSREHVDRHGCIVKIVRSSSSTGQKNFSAPPAAPPVQCPPSTSWQPQSHPRQGHGTSPVGDHGSLVRIPPPPAHERSLSAYGGGNRASMEFLRQEDTPGCRPPEGNLRDSDTSISIPSVDHEELERSFSGFSISQSKENLDALNSCYAAVAPCAKVRPYIAEGESDTDSDLCTPCGPPPRSATGEGPFGDVGWAGPRK

SEQ ID NO: 1959 - protein, 534 aa, Artificial Sequence
  Synthetic polypeptide
SAQFRFVAQPNCQQLLASRWYDEFPGWRRRHWAVKMVTCFIIGLLFPVFSVCYLIAPKSPLGLFIRKPFIKFICHTASYLTFLFLLLLASQHIDRSDLNRQGPPPTIVEWMILPWVLGFIWGEIKQMWDGGLQDYIHDWWNLMDFVMNSLYLATISLKIVAFVKYSALNPRESWDMWHPTLVAEALFAIANIFSSLRLISLFTANSHLGPLQISLGRMLLDILKFLFIYCLVLLAFANGLNQLYFYYEETKGLTCKGIRCEKQNNAFSTLFETLQSLFWSIFGLINLYVTNVKAQHEFTEFVGATMFGTYNVISLVVLLNMLIAMMNNSYQLIARRAADNLRRHHQYQEVMRNLVKRYVAAMIRDAKTEEGLTEENFKELKQDISSFRFEVLGLLRGSKLSTIQSANASKESSNSADSDEKSDSEEEVARQQAAGPLERNIQLESRGLASRGDLSIPGLSEQCVLVDHRERNTDTLGLQVGKRVCPFKSEKVVVEDTVPIIPKEKHAKEEDSSIDYDLNLPDTVTHEDYVTTRL

SEQ ID NO: 1960 - protein, 530 aa, Artificial Sequence
  Synthetic polypeptide
PGTVADACNPSTLRGRGGGSRGAQDVRVQVLPEVRGQLGGTVELPCHLLPPVPGLYISLVTWQRPDAPANHQNVAAFHPKMGPSFPSPKPGSERLSFVSAKQSTGQDTEAELQDATLALHGLTVEDEGNYTCEFATFPKGSVRGMTWLRVIAKPKNQAEAQKVTFSQDPTTVALCISKEGRPPARISWLSSLDWEAKETQVSGTLAGTVTVTSRFTLVPSGRADGVTVTCKVEHESFEEPALIPVTLSVRYPPEVSISGYDDNWYLGRTDATLSCDVRSNPEPTGYDWSTTSGTFPTSAVAQGSQLVIHAVDSLFNTTFVCTVTNAVGMGRAEQVIFVRETPNTAGAGATGGIIGGIIAAIIATAVAATGILICRQQRKEQTLQGAEEDEDLEGPPSYKPPTPKAKLEAQEMPSQLFTLGASEHSPLKTPYFDAGASCTEQEMPRYHELPTLEERSGPLHPGATSLGSPIPVPPGPPAVEDVSLDLEDEEGEEEEEYLDKINPIYDALSYSSPSDSYQGKGFVMSRAMYV

SEQ ID NO: 1961 - protein, 530 aa, Artificial Sequence
  Synthetic polypeptide
RKTGRKERRKRRPQNNHKRHNKMAGKKEKATGREVTHIQFTSWPDHGVPEDPHLLLKLRRRVNAFSNFFSGPIVVHCSAGVGRTGTYIGIDAMLEGLEAENKVDVYGYVVKLRRQRCLMVQVEAQYILIHQALVEYNQFGETEVNLSELHPYLHNMKKRDPPSEPSPLEAEFQRLPSYRSWRTQHIGNQEENKSKNRNSNVIPYDYNRVPLKHELEMSKESEHDSDESSDDDSDSEEPSKYINASFIMSYWKPEVMIAAQGPLKETIGDFWQMIFQRKVKVIVMLTELKHGDQEICAQYWGEGKQTYGDIEVDLKDTDKSSTYTLRVFELRHSKRKDSRTVYQYQYTNWSVEQLPAEPKELISMIQVVKQKLPQKNSSEGNKHHKSTPLLIHCRDGSQQTGIFCALLNLLESAETEEVVDIFQVVKALRKARPGMVSTFEQYQFLYDVIASTYPAQNGQVKKNNHQEDKIEFDNEVDKVKQDANCVNPLGAPEKLPEAKEQAEGSEPTSGTEGPEHSVNGPASPALNQGS

SEQ ID NO: 1962 - protein, 530 aa, Artificial Sequence; identical to SEQ ID NO: 1961
  Synthetic polypeptide

SEQ ID NO: 1963 - protein, 530 aa, Artificial Sequence; identical to SEQ ID NO: 1961
  Synthetic polypeptide

SEQ ID NO: 1964 - protein, 530 aa, Artificial Sequence; identical to SEQ ID NO: 1961
  Synthetic polypeptide

SEQ ID NO: 1965 - protein, 530 aa, Artificial Sequence; identical to SEQ ID NO: 1961
  Synthetic polypeptide

SEQ ID NO: 1966 - protein, 529 aa, Artificial Sequence
  Synthetic polypeptide
KKGPGIREVSSWLCQEPEPCHPGFDAESYTFTVPRRHLERGRVLGRVNFEDCTGRQRTAYFSLDTRFKVGTDGVITVKRPLRFHNPQIHFLVYAWDSTYRKFSTKVTLNTVGHHHRPPPHQASVSGIQAELLTFPNSSPGLRRQKRDWVIPPISCPENEKGPFPKNLVQIKSNKDKEGKVFYSITGQGADTPPVGVFIIERETGWLKVTEPLDRERIATYTLFSHAVSSNGNAVEDPMEILITVTDQNDNKPEFTQEVFKGSVMEGALPGTSVMEVTATDADDDVNTYNAAIAYTILSQDPELPDKNMFTINRNTGVISVVTTGLDRESFPTYTLVVQAADLQGEGLSTTATAVITVTDTNDNPPIFNPTTYKGQVPENEANVVITTLKVTDADAPNTPAWEAVYTILNDDGGQFVVTTNPVNNDGILKTAKGLDFEAKQQYILHVAVTNVVPFEVSLTTSTATVTVDVLDVNEAPIFVPPEKRVEVSEDFGVGQEITSYTAQEPDTFMEQKITFSSCYWNRDTSADPV

SEQ ID NO: 1967 - protein, 528 aa, Artificial Sequence
  Synthetic polypeptide
SWAGSRPQFSLLRYEDNTVVRTKGVASVVVSFFLSMYYNVINAWAFWYLFHSFQDPLPWSVCPLNGNHTGYDEECEKASSTQYFWYRKTLNISPSLQENGGVQWEPALCLLLAWLVVYLCILRGTESTGKVVYFTASLPYCVLIIYLIRGLTLHGATNGLMYMFTPKIEQLANPKAWINAATQIFFSLGLGFGSLIAFASYNEPSNNCQKHAIIVSLINSFTSIFASIVTFSIYGFKATFNYENCLKKVSLLLTNTFDLEDGFLTASNLEQVKGYLASAYPSKYSEMFPQIKNCSLESELDTAVQGTGLAFIVYTEAIKNMEVSQLWSVLYFFMLLMLGIGSMLGNTAAILTPLTDSKIISSHLPKEAISGLVCLVNCAIGMVFTMEAGNYWFDIFNDYAATLSLLLIVLVETIAVCYVYGLRRFESDLKAMTGRAVSWYWKVMWAGVSPLLIVSLFVFYLSDYILTGTLKYQAWDASQGQLVTKDYPAYALAVIGLLVASSTMCIPLAALGTFVQRRLKRGDADPVA

SEQ ID NO: 1968 - protein, 527 aa, Artificial Sequence
  Synthetic polypeptide
GRFQDGRIRTAPVHSSQHERRRRRMISAFPTETLDGHMVVRSHARVSSLTLKSIQYTDAGEYICTASNTIGQDSQSMYLEVQYAPKLQGPVAVYTWEGNQVNITCEVFAYPSATISWFRDGQLLPSSNYSNIKIYNTPSASYLEVTPDSENDFGNYNCTAVNRIGQESLEFILVQADTPSSPSIDQVEPYSSTAQVQFDEPEATGGVPILKYKAEWRAVGEEVWHSKWYDAKEASMEGIVTIVGLKPETTYAVRLAALNGKGLGEISAASEFKTQPVQGEPSAPKLEGQMGEDGNSIKVNLIKQDDGGSPIRHYLVRYRALSSEWKPEIRLPSGSDHVMLKSLDWNAEYEVYVVAENQQGKSKAAHFVFRTSAQPTAIPANGSPTSGLSTGAIVGILIVIFVLLLVVVDITCYFLNKCGLFMCIAVNLCGKAGPGAKGKDMEEGKAAFSKDESKEPIVEVRTEEERTPNHDGGKHTEPNETTPLTEPEKGPVEAKPECQETETKPAPAEVKTVPNDATQTKENESKA

SEQ ID NO: 1969 - protein, 527 aa, Artificial Sequence
  Synthetic polypeptide
GRFQDGRIRTAPVHSSQHERRRRRMISAFPTETLDGHMVVRSHARVSSLTLKSIQYTDAGEYICTASNTIGQDSQSMYLEVQYAPKLQGPVAVYTWEGNQVNITCEVFAYPSATISWFRDGQLLPSSNYSNIKIYNTPSASYLEVTPDSENDFGNYNCTAVNRIGQESLEFILVQADTPSSPSIDQVEPYSSTAQVQFDEPEATGGVPILKYKAEWRAVGEEVWHSKWYDAKEASMEGIVTIVGLKPETTYAVRLAALNGKGLGEISAASEFKTQPVPGEPSAPKLEGQMGEDGNSIKVNLIKQDDGGSPIRHYLVRYRALSSEWKPEIRLPSGSDHVMLKSLDWNAEYEVYVVAENQQGKSKAAHFVFRTSAQPTAIPANGSPTSGLSTGAIVGILIVIFVLLLVVVDITCYFLNKCGLFMCIAVNLCGKAGPGAKGKDMEEGKAAFSKDESKEPIVEVRTEEERTPNHDGGKHTEPNETTPLTEPEKGPVEAKPECQETETKPAPAEVKTVPNDATQTKENESKA

SEQ ID NO: 1970 - protein, 527 aa, Artificial Sequence
  Synthetic polypeptide
PRLASRPVREVRGASAWPPLLGSEEPLCQASRPIREGGGGVSPPPGQPPRPGGRLGGVSPQPGQPPRPGGNFMVLWSTCRTTVFKSVTNRFIKNLACSGICASLVCVPFDIILSTSPHCCWWIYTMLFCKVVKFLHKVFCSVTILSFPAIALDRYYSVLYPLERKISDAKSRELVMYIWAHAVVASVPVFAVTNVADIYATSTCTEVWSNSLGHLVYVLVYNITTVIVPVVVVFLFLILIRRALSASQKKKVIIAALRTPQNTISIPYASQREAELHATLLSMVMVFILCSVPYATLVVYQTVLNVPDTSVFLLLTAVWLPKVSLLANPVLFLTVNKSVRKCLIGTLVQLHHRYSRRNVVSTGSGMAEASLEPSIRSGSQLLEMFHIGQQQIFKPTEDEEESEAKYIGSADFQAKEIFSTCLEGEQGPQFAPSAPPLSTVDSVSQVAPAAPVEPETFPDKYSLQFGFGPFELPPQWLSETRNSKKRLLPPLGNTPEELIQTKVPKVGRVERKMSRNNKVSIFPKVDS

SEQ ID NO: 1971 - protein, 527 aa, Artificial Sequence; identical to SEQ ID NO: 1970
  Synthetic polypeptide

SEQ ID NO: 1972 - protein, 526 aa, Artificial Sequence
  Synthetic polypeptide
PVVIKTISHSEVCDDEWHHYALNLEFPTVTLYTDGISFDPALIHDNGLIHPPRREPALMIGACWTEEKNKEKEKGDNSTDTTQGDPLSIHHYFHGYLAGFSVRSGRLESREVIECLYACREGLDYRDFESLGKGMKVHVNPSQSLLTLEGDDVETFNHALQHVAYMNTLRFATPGVRPLRLTTAVKCFSEESCVSIPEVEGYVVVLQPDAPQILLSGTAHFARPAVDFEGTNGVPLFPDLQITCSISHQVEAKKDESWQGTVTDTRMSDEIVHNLDGCEISLVGDDLDPERESLLLDTTSLQQRGLELTNTSAYLTIAGVESITVYEEILRQARYRLRHGAALYTRKFRLSCSEMNGRYSSNEFIVEVNVLHSMNRVAHPSHVLSSQQFLHRGHQPPPEMAGHSLASSHRNSMIPSAATLIIVVCVGFLVLMVVLGLVRIHSLHRRVSGAGGPPGASSDPKDPDLFWDDSALTIIVNPMESYQNRQSCVTGAVGGQQEDEDSSDSEVADSPSSDERRIIETPPHRY

SEQ ID NO: 1973 - protein, 526 aa, Artificial Sequence; identical to SEQ ID NO: 1972
  Synthetic polypeptide

SEQ ID NO: 1974 - protein, 526 aa, Artificial Sequence
  Synthetic polypeptide
KDDETLSPRELWHLVHQCYGSELGLTSEDEDYVSPLQLNGLGTPKEVGDVIALSDITSSGAADRSQEPSPVGSRRGHVTPNLSRASSDADHGAEEDKEEQVDSQPDASSSQTVTPVAEPPSTEPTQPDGPTTLGPLDLLPSEELLTDTSNSSSSTGEEADLAALLPDLSGRLLINSVFHVGAERLQQMLFSDSPFLQGFLQQCKFTDVTLSPWSGDSKCHQRRVLTYTIPISNPLGPKSASVVETQTLFRRGPQAGGCVVDSEVLTQGIPYQDYFYTAHRYCILGLARNKARLRVSSEIRYRKQPWSLVKSLIEKNSWSGIEDYFHHLERELAKAEKLSLEEGGKDARGLLSGLRRRKRPLSWRAHGDGPQHPDPDPCARAGIHTSGSLSSRFSEPSVDQGPGAGIPSALVLISIVICVSLIILIALNVLLFYRLWSLERTAHTFESWHSLALAKGKFPQTATEWAEILALQKQFHSVEVHKWRQILRASVELLDEMKFSLEKLHQGITVSDPPFDTQPRPDDSFS

SEQ ID NO: 1975 - protein, 525 aa, Artificial Sequence
  Synthetic polypeptide
ENVSTKNLHPDVHSSVIANFLDNMLLRSAGKLNVGTKKEDGESTAPTPRPKVLRCKCHHHCPEDSVNNICSTDGYCFTMIEEDDSGLPVVTSGCLGLEGSDFQCRDTPIPHQRRSIECCTERNECNKDLHPTLPPLKNRDFVDGPIHHRALLISVTVCSLLLVLIILFCYFRYKRQETRPRYSIGLEQDETYIPPGESLRDLIEQSQSSGSGSGLPLLVQRTIAKQIQMVKQIGKGRYGEVWMGKWRGEKVAVKVFFTTEEASWFRETEIYQTVLMRHENILGFIAADIKGTGSWTQLYLITDYHENGSLYDYLKSTTLDAKSMLKLAYSSVSGLCHLHTEIFSTQGKPAIAHRDLKSKNILVKKNGTCCIADLGLAVKFISDTNEVDIPPNTRVGTKRYMPPEVLDESLNRNHFQSYIMADMYSFGLILWEVARRCVSGGIVEEYQLPYHDLVPSDPSYEDMREIVCIKKLRPSFPNRWSSDECLRQMGKLMTECWAHNPASRLTALRVKKTLAKMSESQDIKL

SEQ ID NO: 1976 - protein, 525 aa, Artificial Sequence
  Synthetic polypeptide
VQQWLLHFLSLWLWNVRIDPSSLSFNMWKEIPIPFYLSVYFFDVMNPSEILKGEKPQVRERGPYVYREFRHKSNITFNNNDTVSFLEYRTFQFQPSKSHGSESDYIVMPNILVLGAAVMMENKPMTLKLIMTLAFTTLGERAFMNRTVGEIMWGYKDPLVNLINKYFPGMFPFKDKFGLFAELNNSDSGLFTVFTGVQNISRIHLVDKWNGLSKVDFWHSDQCNMINGTSGQMWPPFMTPESSLEFYSPEACRSMKLMYKESGVFEGIPTYRFVAPKTLFANGSIYPPNEGFCPCLESGIQNVSTCRFSAPLFLSHPHFLNADPVLAEAVTGLHPNQEAHSLFLDIHPVTGIPMNCSVKLQLSLYMKSVAGIGQTGKIEPVVLPLLWFAESGAMEGETLHTFYTQLVLMPKVMHYAQYVLLALGCVLLLVPVICQIRSQVGAGQRAARADSHSLACWGKGASDRTLWPTAAWSPPPAAVLRLCRSGSGHCWGLRSTLASFACRVATTLPVLEGLGPSLGGGTGGL

SEQ ID NO: 1977 - protein, 525 aa, Artificial Sequence; identical to SEQ ID NO: 1976
  Synthetic polypeptide

SEQ ID NO: 1978 - protein, 524 aa, Artificial Sequence
  Synthetic polypeptide
NYISQSPYHPMVPDSSWPAKGSCSISARRKERCHSPLEAAPSRHVGDMREHNQLNGWSSDENDWNEKLYPVWKRGDMRWKNSWKGGRVQAVLTSDSPALVGSNITFAVNLIFPRCQKEDANGNIVYEKNCRNGQYFQKLGRCSVRVSVNTANVTLGPQLMEVTVYRRHGRAYVPIAQVKDVYVVTDQIPVFVTMFQKNDRNSSDETFLKDLPIMFDVLIHDPSHFLNYSTINYKWSFGDNTGLFVSTNHTVNHTYVLNGTFSLNLTVKAAAPGPCPPPPPPPRPSKPTPSLATTLKSYDSNTPGPAGDNPLELSRIPDENCQINRYGHFQATITIVEGILEVNIIQMTDVLMPVPWPESSLIDFVVTCQGSIPTEVCTIISDPTCEITQNTVCSPVDVDEMCLLTVRRTFNGSGTYCVNLTLGDDTSLALTSTLISVPDRDPASPLRMANSALISVGCLAIFVTVISLLVYKKHKEYNPIENSPGNVVRSKGLSVFLNRAKAVFFPGNQEKDPLLKNQEFKGVS

SEQ ID NO: 1979 - protein, 524 aa, Artificial Sequence
  Synthetic polypeptide
VQQWLLHFLSLWLWNVRIDPSSLSFNMWKEIPIPFYLSVYFFDVMNPSEILKGEKPQVRERGPYVYREFRHKSNITFNNNDTVSFLEYRTFQFQPSKSHGSESDYIVMPNILVLGAAVMMENKPMTLKLIMTLAFTTLGERAFMNRTVGEIMWGYKDPLVNLINKYFPGMFPFKDKFGLFAELNNSDSGLFTVFTGVQNISRIHLVDKWNGLSKVDFWHSDQCNMINGTSGQMWPPFMTPESSLEFYSPEACRSMKLMYKESGVFEGIPTYRFVAPKTLFANGSIYPPNEGFCPCLESGIQNVSTCRFSAPLFLSHPHFLNADPVLAEAVTGLHPNQEAHSLFLDIHPVTGIPMNCSVKLQLSLYMKSVAGIGQTGKIEPVVLPLLWFAESGAMEGETLHTFYTQLVLMPKVMHYAQYVLLALGCVLLLVPVICQIRSQVGAGQRAARADSHSLACWGKGASDRTLWPTAAWSPPPAAVLRLCRSGSGHCWGLRSTLASFACRVATTLPVLEGLGPSLGGGTGS

SEQ ID NO: 1980 - protein, 523 aa, Artificial Sequence
  Synthetic polypeptide
EAWILATASTLVSLVISDLFLDLGFSSGKIATQTTTDSSNKTAPTPASSVTIMATDTAQQSTVPTSKANEILASVKATTLGVSSDSPGTTTLAQQVSGPVNTTVARGGGSGNPTTTIESPKSTKSADTTTVATSTATAKPNTTSSQNGAEDTTNSGGKSSHSVTTDLTSTKAEHLTTPHPTSPLSPRQPTSTHPVATPTSSGHDHLMKISSSSSTVAIPGYTFTSPGMTTTLPSSVISQRTQQTSSQMPASSTAPSSQETVQPTSPATALRTPTLPETMSSSPTAASTTHRYPKTPSPTVAHESNWVTPAGVGTQTRVEEALRQALTHSLLPAGGASDEKLISLICRAVKATFNPAQDKCGIRLASVPGSQTVVVKEITIHTKLPAKDVYERLKDKWDELKEAGVSDMKLGDQGPPEEAEDRFSMPLIITIVCMASFLLLVAALYGCCHQRLSQRKDQQRLTEELQTVENGYHDNPTLEVMETSSEMQEKKVVSLNGELGDSWIVPLDNLTKDDLDEEEDTHL

SEQ ID NO: 1981 - protein, 523 aa, Artificial Sequence
  Synthetic polypeptide
EAWILATASTLVSLVISDLFLDLGFSSGKIATQTTTDSSNKTAPTPASSVTIMATDTAQQSTVPTSKANEILASVKATTLGVSSDSPGTTTLAQQVSGPVNTTVARGGGSGNPTTTIESPKSTKSADTTTVATSTATAKPNTTSSQNGAEDTTNSGGKSSHSVTTDLTSTKAEHLTTPHPTSPLSPRQPTSTHPVATPTSSGHDHLMKISSSSSTVAIPGYTFTSPGMTTTLPSSVISQRTQQTSSQMPASSTAPSSQETVQPTSPATALRTPTLPETMSSSPTAASTTHRYPKTPSPTVAHESNWAKCEDLETQTQSEKQLVLNLTGNTLCAGGASDEKLISLICRAVKATFNPAQDKCGIRLASVPGSQTVVVKEITIHTKLPAKDVYERLKDKWDELKEAGVSDMKLGDQGPPEEAEDRFSMPLIITIVCMASFLLLVAALYGCCHQRLSQRKDQQRLTEELQTVENGYHDNPTLEVMETSSEMQEKKVVSLNGELGDSWIVPLDNLTKDDLDEEEDTHL

SEQ ID NO: 1982 - protein, 523 aa, Artificial Sequence
  Synthetic polypeptide
GQEFETSLANRILMSEPGKLSQKIKVWLQEYWNITDLVAISTFMIGAILRLQNQPYMGYGRVIYCVDIIFWYIRVLDIFGVNKYLGPYVMMIGKMMIDMLYFVVIMLVVLMSFGVARQAILHPEEKPSWKLARNIFYMPYWMIYGEVFADQIDLYAMEINPPCGENLYDEEGKRLPPCIPGAWLTPALMACYLLVANILLVNLLIAVFNNTFFEVKSISNQVWKFQRYQLIMTFHDRPVLPPPMIILSHIYIIIMRLSGRCRKKREGDQEERDRGLKLFLSDEELKRLHEFEEQCVQEHFREKEDEQQSSSDERIRVTSERVENMSMRLEEINERETFMKTSLQTVDLRLAQLEELSNRMVNALENLAGIDRSDLIQARSRASSECEATYLLRQSSINSADGYSLYRYHFNGEELLFEDTSLSTSPGTGVRKKTCSFRIKEEKDVKTHLVPECQNSLHLSLGTSTSATPDGSHLAVDDLKNAEESKLGPDIGISKEDDERQTDSKKEETISPSLNKTDVIHGQ

SEQ ID NO: 1983 - protein, 522 aa, Artificial Sequence
  Synthetic polypeptide
DGDNPGLPQSAWRFYATNLSRTDLHSTWQYYERTVTVPMYSSQTQTYGASRLIPPLNQLELLRNLKSKSGLAFRKDPPPEPSPSQKVSLKDRVFSSPRGVAAKGKGSPQAQTVRRSPSADQSLEDSPSKVPKSWSFGDRSRARQAFRIKGAASRQNSEEASLPGEDIVDDKSCPCEFVTEDLTPGLKVSIRAVCVMRFLVSKRKFKESLRPYDVMDVIEQYSAGHLDMLSRIKSLQSRVDQIVGRGPAITDKDRTKGPAEAELPEDPSMMGRLGKVEKQVLSMEKKLDFLVNIYMQRMGIPPTETEAYFGAKEPEPAPPYHSPEDSREHVDRHGCIVKIVRSSSSTGQKNFSAPPAAPPVQCPPSTSWQPQSHPRQGHGTSPVGDHGSLVRIPPPPAHERSLSAYGGGNRASMEFLRQEDTPGCRPPEGNLRDSDTSISIPSVDHEELERSFSGFSISQSKENLDALNSCYAAVAPCAKVRPYIAEGESDTDSDLCTPCGPPPRSATGEGPFGDVGWAGPRK

SEQ ID NO: 1984 - protein, 522 aa, Artificial Sequence
  Synthetic polypeptide
GWNELRQEGRCLFVILLMAVYWCTEALPLSVTALLPIVLFPFMGILPSNKVCPQYFLDTNFLFLSGLIMASAIEEWNLHRRIALKILMLVGVQPARLILGMMVTTSFLSMWLSNTASTAMMLPIANAILKSLFGQKEVRKDPSQESEENTAKTTLGRQRFHWICRLTPGRRMNIVGTSGRASSSPSPTQPVLGAQPHSRAQPLTSSCLASSRGWLWISFLYGGLSFRGWRKNKSEIRTNAEDRARAVIREEYQNLGPIKFAEQAVFILFCMFAILLFTRDPKFIPGWASLFNPGFLSDAVTGVAIVTILFFFPSQRPSLKWWFDFKAPNTETEPLLTWKKAQETVPWNIILLLGGGFAMAKGCEESGLSVWIGGQLHPLENVPPALAVLLITVVIAFFTEFASNTATIIIFLPVLAELAIRLRVHPLYLMIPGTVGCSFAFMLPVSTPPNSIAFASGHLLVKDMVRTGLLMNLMGVLLLSLAMNTWAQTIFQLGTFPDWADMYSVNVTALPPTLANDTFRTL

SEQ ID NO: 1985 - protein, 522 aa, Artificial Sequence
  Synthetic polypeptide
KPLLNEIKEDTNKWKNIPCSWIGRINIVKMAILPKALAANAGTGFAVAEPQIAMFCGKLNMHVNIQTGKWEPDPTGTKSCFETKEEVLQYCQEMYPELQITNVMEANQRVSIDNWCRRDKKQCKSRFVTPFKCLVPPTPLPTNDVDVYFETSADDNEHARFQKAKEQLEIRHRNRMDRVKKEWEEAELQAKNLPKAERQTLIQHFQAMVKALEKEAASEKQQLVETHLARVEAMLNDRRRMALENYLAALQSDPPRPHRILQALRRYVRAENKDRLHTIRHYQHVLAVDPEKAAQMKSQVMTHLHVIEERRNQSLSLLYKVPYVAQEIQEEIDELLQEQRADMDQFTASISETPVDVRVSSEESEEIPPFHPFHPFPALPENEGSGVGEQDGGLIGAEEKVINSKNKVDENMVIDETLDVKEMIFNAERVGGLEEERESVGPLREDFSLSSSALIGLLVIAVAIATVIVISLVMLRKRQYGTISHGIVEVDPMLTPEERHLNKMQNHGYENPTYKYLEQMQI

SEQ ID NO: 1986 - protein, 522 aa, Artificial Sequence
  Synthetic polypeptide
KDDETLSPRELWHLVHQCYGSELGLTSEDEDYVSPLQLNGLGTPKEVGDVIALSDITSSGAADRSQEPSPVGSRRGHVTPNLSRASSDADHGAEEDKEEQVDSQPDASSSQTVTPVAEPPSTEPTQPDGPTTLGPLDLLPSEELLTDTSNSSSSTGEEADLAALLPDLSGRLLINSVFHVGAERLQQMLFSDSPFLQGFLQQCKFTDVTLSPWSGDSKCHQRRVLTYTIPISNPLGPKSASVVETQTLFRRGPQAGGCVVDSEVLTQGIPYQDYFYTAHRYCILGLARNKARLRVSSEIRYRKQPWSLVKSLIEKNSWSGIEDYFHHLERELAKAEKLSLEEGGKDARGLLSGLRRRKRPLSWRAHGDGPQHPDPDPCARAGIHTSGSLSSRFSEPSVDQGPGAGIPSALVLISIVLIILIALNVLLFYRLWSLERTAHTFESWHSLALAKGKFPQTATEWAEILALQKQFHSVEVHKWRQILRASVELLDEMKFSLEKLHQGITVSDPPFDTQPRPDDSFS

SEQ ID NO: 1987 - protein, 522 aa, Artificial Sequence; identical to SEQ ID NO: 1986
  Synthetic polypeptide

SEQ ID NO: 1988 - protein, 521 aa, Artificial Sequence
  Synthetic polypeptide
GRARWLTPVIPALWEADAGGSRGQEIKTILANMTLLSNSSETGTASGLVFILRPEQSTCTWYLGTSGIQPVQNMAILLSYSERDPVPGGCNLEFDLDIDPNIYLEYNFFETTIKFAPANLGYARGVDPPPCDAGTDQDSRWRLQYDVYQYFLPENDLTEEMLLKHLQRMVSVPQVKASALKVVTLTANDKTSVSFSSLPGQGVIYNVIVWDPFLNTSAAYIPAHTYACSFEAGEGSCASLGRVSSKVFFTLFALLGFFICFFGHRFWKTELFFIGFIIMGFFFYILITRLTPIKYDVNLILTAVTGSVGGMFLVAVWWRFGILSICMLCVGLVLGFLISSVTFFTPLGNLKIFHDDGVFWVTFSCIAILIPVVFMGCLRILNILTCGVIGSYSVVLAIDSYWSTSLSYITLNVLKRALNKDFHRAFTNVPFQTNDFIILAVWGMLAVSGITLQIRRERGRPFFPPHPYKLWKQERERRVTNILDPSYHIPPLRERLYGRLTQIKGLFQKEQPAGERTPLLL

SEQ ID NO: 1989 - protein, 521 aa, Artificial Sequence
  Synthetic polypeptide
VTQGGRSCVDGARDHSDTATSQGVARIAATQTTTDSSNKTAPTPASSVTIMATDTAQQSTVPTSKANEILASVKATTLGVSSDSPGTTTLAQQVSGPVNTTVARGGGSGNPTTTIESPKSTKSADTTTVATSTATAKPNTTSSQNGAEDTTNSGGKSSHSVTTDLTSTKAEHLTTPHPTSPLSPRQPTSTHPVATPTSSGHDHLMKISSSSSTVAIPGYTFTSPGMTTTLPSSVISQRTQQTSSQMPASSTAPSSQETVQPTSPATALRTPTLPETMSSSPTAASTTHRYPKTPSPTVAHESNWVTPAGVGTQTRVEEALRQALTHSLLPAGGASDEKLISLICRAVKATFNPAQDKCGIRLASVPGSQTVVVKEITIHTKLPAKDVYERLKDKWDELKEAGVSDMKLGDQGPPEEAEDRFSMPLIITIVCMASFLLLVAALYGCCHQRLSQRKDQQRLTEELQTVENGYHDNPTLEVMETSSEMQEKKVVSLNGELGDSWIVPLDNLTKDDLDEEEDTHL

SEQ ID NO: 1990 - protein, 521 aa, Artificial Sequence
  Synthetic polypeptide
VTQGGRSCVDGARDHSDTATSQGVARIAATQTTTDSSNKTAPTPASSVTIMATDTAQQSTVPTSKANEILASVKATTLGVSSDSPGTTTLAQQVSGPVNTTVARGGGSGNPTTTIESPKSTKSADTTTVATSTATAKPNTTSSQNGAEDTTNSGGKSSHSVTTDLTSTKAEHLTTPHPTSPLSPRQPTSTHPVATPTSSGHDHLMKISSSSSTVAIPGYTFTSPGMTTTLPSSVISQRTQQTSSQMPASSTAPSSQETVQPTSPATALRTPTLPETMSSSPTAASTTHRYPKTPSPTVAHESNWAKCEDLETQTQSEKQLVLNLTGNTLCAGGASDEKLISLICRAVKATFNPAQDKCGIRLASVPGSQTVVVKEITIHTKLPAKDVYERLKDKWDELKEAGVSDMKLGDQGPPEEAEDRFSMPLIITIVCMASFLLLVAALYGCCHQRLSQRKDQQRLTEELQTVENGYHDNPTLEVMETSSEMQEKKVVSLNGELGDSWIVPLDNLTKDDLDEEEDTHL

SEQ ID NO: 1991 - protein, 520 aa, Artificial Sequence
  Synthetic polypeptide
GCPLSLLLFNILMEVQAKAIRCCCGQFTNQHIPPLPSATPSKNEEESKQVETQPEKWSVAKHTQSYPTDSYGVLEFQGGGYSNKAMYIRVSYDTKPDSLLHLMVKDWQLELPKLLISVHGGLQNFEMQPKLKQVFGKGLIKAAMTTGAWIFTGGVSTAPCGENLYDEEGKRLPPCIPGAWLTPALMACYLLVANILLVNLLIAVFNNTFFEVKSISNQVWKFQRYQLIMTFHDRPVLPPPMIILSHIYIIIMRLSGRCRKKREGDQEERDRGLKLFLSDEELKRLHEFEEQCVQEHFREKEDEQQSSSDERIRVTSERVENMSMRLEEINERETFMKTSLQTVDLRLAQLEELSNRMVNALENLAGIDRSDLIQARSRASSECEATYLLRQSSINSADGYSLYRYHFNGEELLFEDTSLSTSPGTGVRKKTCSFRIKEEKDVKTHLVPECQNSLHLSLGTSTSATPDGSHLAVDDLKNAEESKLGPDIGISKEDDERQTDSKKEETISPSLNKTDVIHGQ

SEQ ID NO: 1992 - protein, 520 aa, Artificial Sequence
  Synthetic polypeptide
MSWSKDGHWIWAAPRLNAASPISQSGILFTMLVFGPACGFILGSFCTKIYVDAVFIDTSNLDITPDDPRWIGAWWGGFLLCGALLFFSSLLMFGFPQSLPPHSEPAMESEQAMLSEREYERPKPSNGVLRHPLEPDSSASCFQQLRVIPKVTKHLLSNPVFTCIILAACMEIAVVAGFAAFLGKYLEQQFNLTTSSANQLLGMTAIPCACLGIFLGGLLVKKLSLSALGAIRMAMLVNLVSTACYVSFLFLGCDTGPVAGVTVPYGNSTAPGSALDPYSPCNNNCECQTDSFTPVCGADGITYLSACFAGCNSTNLTGCACLTTVPAENATVVPGKCPSPGCQEAFLTFLCVMCICSLIGAMAQTPSVIILIRTVSPELKSYALGVLFLLLRLLGFIPPPLIFGAGIDSTCLFWSTFCGEQGACVLYDNVVYRYLYVSIAIALKSFAFILYTTTWQCLRKNYKRYIKNHEGGLSTSEFFASTLTLDNLGRDPVPANQTHRTKFIYNLEDHEWCENMESVL

SEQ ID NO: 1993 - protein, 518 aa, Artificial Sequence
  Synthetic polypeptide
IKRQRESYALAGETHLDYQGEAIDYFYSTRKGSPPAIGPYYENHGYQPENPYPAQPTVVPTVYEVHPAQYYPSPVPQYAPRVLTQASNPVVCTQPKSPSGTVCTSKTKKALCITLTLGTFLVGAALAAGLLWKFMGSKCSNSGIECDSSGTCINPSNWCDGVSHCPGGEDENRCVRLYGPNFILQVYSSQRKSWHPVCQDDWNENYGRAACRDMGYKNNFYSSQGIVDDSGSTSFMKLNTSAGNVDIYKKLYHSDACSSKAVVSLRCIACGVNLNSSRQSRIVGGESALPGAWPWQVSLHVQNVHVCGGSIITPEWIVTAAHCVEKPLNNPWHWTAFAGILRQSFMFYGAGYQVEKVISHPNYDSKTKNNDIALMKLQKPLTFNDLVKPVCLPNPGMMLQPEQLCWISGWGATEEKGKTSEVLNAAKVLLIETQRCNSRYVYDNLITPAMICAGFLQGNVDSCQGDSGGPLVTSKNNIWWLIGDTSWGSGCAKAYRPGVYGNVMVFTDWIYRQMRADG

SEQ ID NO: 1994 - protein, 518 aa, Artificial Sequence; identical to SEQ ID NO: 1993
  Synthetic polypeptide

SEQ ID NO: 1995 - protein, 518 aa, Artificial Sequence; identical to SEQ ID NO: 1993
  Synthetic polypeptide

SEQ ID NO: 1996 - protein, 518 aa, Artificial Sequence
  Synthetic polypeptide
EAKTGGSLEARNSRQHEPADFSQDPPKPSLSSQQAVYGHVHLGTGDPYTPGFPSFNQTQFPPVASSGLPSIPAQPISADIASRLLRKLKGPVAPQEWQGSLLGSPYHLGPGPRLRLVVNNHRTSTPINNIFGCIEGRSEPDHYVVIGAQRDAWGPGAAKSAVGTAILLELVRTFSSMVSNGFRPRRSLLFISWDGGDFGSVGSTEWLEGYLSVLHLKAVVYVSLDNAVLGDDKFHAKTSPLLTSLIESVLKQVDSPNHSGQTLYEQVVFTNPSWDAEVIRPLPMDSSAYSFTAFVGVPAVEFSFMEDDQAYPFLHTKEDTYENLHKVLQGRLPAVAQAVAQLAGQLLIRLSHDRLLPLDFGRYGDVVLRHIGNLNEFSGDLKARGLTLQWVYSARGDYIRAAEKLRQEIYSSEERDERLTRMYNVRIMRVEFYFLSQYVSPADSPFRHIFMGRGDHTLGALLDHLRLLRSNSSGTPGATSSTGFQESRFRRQLALLTWTLQGAANALSGDVWNIDNNF

SEQ ID NO: 1997 - protein, 518 aa, Artificial Sequence; identical to SEQ ID NO: 1996
  Synthetic polypeptide

SEQ ID NO: 1998 - protein, 517 aa, Artificial Sequence
  Synthetic polypeptide
SQRFGRPREVDHLRPGVQDQPGQHSRNAKNQPGVVTQKSASSIFMLSFYLTCSLLLTLVVFVSVIYSCVKLFPSPLQTLSRKIVRSKMNSTLVGVFTITLVFLAAFVNMFTCNSRDLLGCLAQEHNISASQVNACHVAESAVNYSLGDEQGFCGSPWPNCNFPEYFTYSVLLSLLACSVFLQISCIGKLVLMLAIELIYVLIVEVPGVTLFDNADLLVTANAIDFFNNGTSQCPEHATKVALKVVTPIIISVFVLALYLHAQQVESTARLDFLWKLQATEEKEEMEELQAYNRRLLHNILPKDVAAHFLARERRNDELYYQSCECVAVMFASIANFSEFYVELEANNEGVECLRLLNEIIADFDEIISEDRFRQLEKIKTIGSTYMAASGLNDSTYDKVGKTHIKALADFAMKLMDQMKYINEHSFNNFQMKIGLNIGPVVAGVIGARKPQYDIWGNTVNVASRMDSTGVPDRIQVTTDMYQVLAANTYQLECRGVVKVKGKGEMMTYFLNGGPPLS

SEQ ID NO: 1999 - protein, 517 aa, Artificial Sequence; identical to SEQ ID NO: 1998
  Synthetic polypeptide

SEQ ID NO: 2000 - protein, 516 aa, Artificial Sequence
  Synthetic polypeptide
WTVETTKGAQDVRVQVLPEVRGQLGGTVELPCHLLPPVPGLYISLVTWQRPDAPANHQNVAAFHPKMGPSFPSPKPGSERLSFVSAKQSTGQDTEAELQDATLALHGLTVEDEGNYTCEFATFPKGSVRGMTWLRVIAKPKNQAEAQKVTFSQDPTTVALCISKEGRPPARISWLSSLDWEAKETQVSGTLAGTVTVTSRFTLVPSGRADGVTVTCKVEHESFEEPALIPVTLSVRYPPEVSISGYDDNWYLGRTDATLSCDVRSNPEPTGYDWSTTSGTFPTSAVAQGSQLVIHAVDSLFNTTFVCTVTNAVGMGRAEQVIFVRETPNTAGAGATGGIIGGIIAAIIATAVAATGILICRQQRKEQTLQGAEEDEDLEGPPSYKPPTPKAKLEAQEMPSQLFTLGASEHSPLKTPYFDAGASCTEQEMPRYHELPTLEERSGPLHPGATSLGSPIPVPPGPPAVEDVSLDLEDEEGEEEEEYLDKINPIYDALSYSSPSDSYQGKGFVMSRAMYV

SEQ ID NO: 2001 - protein, 516 aa, Artificial Sequence
  Synthetic polypeptide
MIQPFSHSANFLDNMLLRSAGKLNVGTKKEDGESTAPTPRPKVLRCKCHHHCPEDSVNNICSTDGYCFTMIEEDDSGLPVVTSGCLGLEGSDFQCRDTPIPHQRRSIECCTERNECNKDLHPTLPPLKNRDFVDGPIHHRALLISVTVCSLLLVLIILFCYFRYKRQETRPRYSIGLEQDETYIPPGESLRDLIEQSQSSGSGSGLPLLVQRTIAKQIQMVKQIGKGRYGEVWMGKWRGEKVAVKVFFTTEEASWFRETEIYQTVLMRHENILGFIAADIKGTGSWTQLYLITDYHENGSLYDYLKSTTLDAKSMLKLAYSSVSGLCHLHTEIFSTQGKPAIAHRDLKSKNILVKKNGTCCIADLGLAVKFISDTNEVDIPPNTRVGTKRYMPPEVLDESLNRNHFQSYIMADMYSFGLILWEVARRCVSGGIVEEYQLPYHDLVPSDPSYEDMREIVCIKKLRPSFPNRWSSDECLRQMGKLMTECWAHNPASRLTALRVKKTLAKMSESQDIKL

SEQ ID NO: 2002 - protein, 516 aa, Artificial Sequence
  Synthetic polypeptide
TSGSAWRFYATNLSRTDLHSTWQYYERTVTVPMYSSQTQTYGASRLIPPLNQLELLRNLKSKSGLAFRKDPPPEPSPSQKVSLKDRVFSSPRGVAAKGKGSPQAQTVRRSPSADQSLEDSPSKVPKSWSFGDRSRARQAFRIKGAASRQNSEEASLPGEDIVDDKSCPCEFVTEDLTPGLKVSIRAVCVMRFLVSKRKFKESLRPYDVMDVIEQYSAGHLDMLSRIKSLQSRVDQIVGRGPAITDKDRTKGPAEAELPEDPSMMGRLGKVEKQVLSMEKKLDFLVNIYMQRMGIPPTETEAYFGAKEPEPAPPYHSPEDSREHVDRHGCIVKIVRSSSSTGQKNFSAPPAAPPVQCPPSTSWQPQSHPRQGHGTSPVGDHGSLVRIPPPPAHERSLSAYGGGNRASMEFLRQEDTPGCRPPEGNLRDSDTSISIPSVDHEELERSFSGFSISQSKENLDALNSCYAAVAPCAKVRPYIAEGESDTDSDLCTPCGPPPRSATGEGPFGDVGWAGPRK

SEQ ID NO: 2003 - protein, 515 aa, Artificial Sequence
  Synthetic polypeptide
IKRQRESYALAGETHLDYQGEAIDYFYSTRKGSPPAIGPYYENHGYQPENPYPAQPTVVPTVYEVHPAQYYPSPVPQYAPRVLTQASNPVVCTQPKSPSGTVCTSKTKKALCITLTLGTFLVGAALAAGLLWKFMGSKCSNSGIECDSSGTCINPSNWCDGVSHCPGGEDENRCVRLYGPNFILQVYSSQRKSWHPVCQDDWNENYGRAACRDMGYKNNFYSSQGIVDDSGSTSFMKLNTSAGNVDIYKKLYHSDACSSKAVVSLRCIACGVNLNSSRQSRIVGGESALPGAWPWQVSLHVQNVHVCGGSIITPEWIVTAAHCVEKPLNNPWHWTAFAGILRQSFMFYGAGYQVEKVISHPNYDSKTKNNDIALMKLQKPLTFNDLVKPVCLPNPGMMLQPEQLCWISGWGATEEKGKTSEVLNAAKVLLIETQRCNSRYVYDNLITPAMICAGFLQGNVDSCQGDSGGPLVTSKNNIWWLIGDTSWGSGCAKAYRPGVYGNVMVFTDWIYRQMR

SEQ ID NO: 2004 - protein, 515 aa, Artificial Sequence
  Synthetic polypeptide
GSPENVRIDPSSLSFNMWKEIPIPFYLSVYFFDVMNPSEILKGEKPQVRERGPYVYREFRHKSNITFNNNDTVSFLEYRTFQFQPSKSHGSESDYIVMPNILVLGAAVMMENKPMTLKLIMTLAFTTLGERAFMNRTVGEIMWGYKDPLVNLINKYFPGMFPFKDKFGLFAELNNSDSGLFTVFTGVQNISRIHLVDKWNGLSKVDFWHSDQCNMINGTSGQMWPPFMTPESSLEFYSPEACRSMKLMYKESGVFEGIPTYRFVAPKTLFANGSIYPPNEGFCPCLESGIQNVSTCRFSAPLFLSHPHFLNADPVLAEAVTGLHPNQEAHSLFLDIHPVTGIPMNCSVKLQLSLYMKSVAGIGQTGKIEPVVLPLLWFAESGAMEGETLHTFYTQLVLMPKVMHYAQYVLLALGCVLLLVPVICQIRSQVGAGQRAARADSHSLACWGKGASDRTLWPTAAWSPPPAAVLRLCRSGSGHCWGLRSTLASFACRVATTLPVLEGLGPSLGGGTGGL

SEQ ID NO: 2005 - protein, 515 aa, Artificial Sequence; identical to SEQ ID NO: 2004
  Synthetic polypeptide

SEQ ID NO: 2006 - protein, 514 aa, Artificial Sequence
  Synthetic polypeptide
VMTLSCEIPSSGSSWLKNSPTEHPVTPTPAPQRTTPFDCNFPLPTRILQNGPTPSPFPDSFSDSACLHPVGEFVSDALLVPDKCKFLHQERMDVCETHLHWHTVAKETCSEKSTNLHDYGMLLPCGIDKFRGVEFVCCPLAEESDNVDSADAEEDDSDVWWGGADTDYADGSEDKVVEVAEEEEVAEVEEEEADDDEDDEDGDEVEEEAEEPYEEATERTTSIATTTTTTTESVEEVVREVCSEQAETGPCRAMISRWYFDVTEGKCAPFFYGGCGGNRNNFDTEEYCMAVCGSAIPTTAASTPDAVDKYLETPGDENEHAHFQKAKERLEAKHRERMSQVMREWEEAERQAKNLPKADKKAVIQHFQEKVESLEQEAANERQQLVETHMARVEAMLNDRRRLALENYITALQAVPPRPRHVFNMLKKYVRAEQKDRQHTLKHFEHVRMVDPKKAAQIRSQVMTHLRVIYERMNQSLSLLYNVPAVAEEIQDEVGAVAHACNSSILGGQGGQMT

SEQ ID NO: 2007 - protein, 514 aa, Artificial Sequence
  Synthetic polypeptide
GSPENVRIDPSSLSFNMWKEIPIPFYLSVYFFDVMNPSEILKGEKPQVRERGPYVYREFRHKSNITFNNNDTVSFLEYRTFQFQPSKSHGSESDYIVMPNILVLGAAVMMENKPMTLKLIMTLAFTTLGERAFMNRTVGEIMWGYKDPLVNLINKYFPGMFPFKDKFGLFAELNNSDSGLFTVFTGVQNISRIHLVDKWNGLSKVDFWHSDQCNMINGTSGQMWPPFMTPESSLEFYSPEACRSMKLMYKESGVFEGIPTYRFVAPKTLFANGSIYPPNEGFCPCLESGIQNVSTCRFSAPLFLSHPHFLNADPVLAEAVTGLHPNQEAHSLFLDIHPVTGIPMNCSVKLQLSLYMKSVAGIGQTGKIEPVVLPLLWFAESGAMEGETLHTFYTQLVLMPKVMHYAQYVLLALGCVLLLVPVICQIRSQVGAGQRAARADSHSLACWGKGASDRTLWPTAAWSPPPAAVLRLCRSGSGHCWGLRSTLASFACRVATTLPVLEGLGPSLGGGTGS

SEQ ID NO: 2008 - protein, 513 aa, Artificial Sequence
  Synthetic polypeptide
MDMVAQACDPSTLGGQNDYPCSGMLGMVSGLISDSQITSSNQGDRNWMPENIRLVTSRSGWALPPAPHSYINEWLQIDLGEEKIVRGIIIQGGKHRENKVFMRKFKIGYSNNGSDWKMIMDDSKRKAKSFEGNNNYDTPELRTFPALSTRFIRIYPERATHGGLGLRMELLGCEVEAPTAGPTTPNGNLVDECDDDQANCHSGTGDDFQLTGGTTVLATEKPTVIDSTIQSEFPTYGFNCEFGWGSHKTFCHWEHDNHVQLKWSVLTSKTGPIQDHTGDGNFIYSQADENQKGKVARLVSPVVYSQNSAHCMTFWYHMSGSHVGTLRVKLRYQKPEEYDQLVWMAIGHQGDHWKEGRVLLHKSLKLYQVIFEGEIGKGNLGGIAVDDISINNHISQEDCAKPADLDKKNPEIKIDETGSTPGYEGEGEGDKNISRKPGNVLKTLDPILITIIAMSALGVLLGAVCGVVLYCACWHNGMSERNLSALENYNFELVDGVKLKKDKLNTQSTYSEA

SEQ ID NO: 2009 - protein, 513 aa, Artificial Sequence; identical to SEQ ID NO: 2008
  Synthetic polypeptide

SEQ ID NO: 2010 - protein, 512 aa, Artificial Sequence
  Synthetic polypeptide
QWGHMSLSLGKWPAWGWPREGQGGCLKLTGRLMLAVGGAVLGSLQFGYNTGVINAPQKVIEEFYNQTWVHRYGESILPTTLTTLWSLSVAIFSVGGMIGSFSVGLFVNRFGRRNSMLMMNLLAFVSAVLMGFSKLGKSFEMLILGRFIIGVYCGLTTGFVPMYVGEVSPTALRGALGTLHQLGIVVGILIAQVFGLDSIMGNKDLWPLLLSIIFIPALLQCIVLPFCPESPRFLLINRNEENRAKSVLKKLRGTADVTHDLQEMKEESRQMMREKKVTILELFRSPAYRQPILIAVVLQLSQQLSGINAVFYYSTSIFEKAGVQQPVYATIGSGIVNTAFTVVSLFVVERAGRRTLHLIGLAGMAGCAILMTIALALLEQLPWMSYLSIVAIFGFVAFFEVGPGPIPWFIVAELFSQGPRPAAIAVAGFSNWTSNFIVGMCFQYVEQLCGPYVFIIFTVLLVLFFIFTYFKVPETKGRTFDEIASGFRQGGASQSDKTPEELFHPLGADSQV

SEQ ID NO: 2011 - protein, 512 aa, Artificial Sequence
  Synthetic polypeptide
DGDNPGLPQSAWRFYATNLSRTDLHSTWQYYERTVTVPMYRLIPPLNQLELLRNLKSKSGLAFRKDPPPEPSPSQKVSLKDRVFSSPRGVAAKGKGSPQAQTVRRSPSADQSLEDSPSKVPKSWSFGDRSRARQAFRIKGAASRQNSEEASLPGEDIVDDKSCPCEFVTEDLTPGLKVSIRAVCVMRFLVSKRKFKESLRPYDVMDVIEQYSAGHLDMLSRIKSLQSRVDQIVGRGPAITDKDRTKGPAEAELPEDPSMMGRLGKVEKQVLSMEKKLDFLVNIYMQRMGIPPTETEAYFGAKEPEPAPPYHSPEDSREHVDRHGCIVKIVRSSSSTGQKNFSAPPAAPPVQCPPSTSWQPQSHPRQGHGTSPVGDHGSLVRIPPPPAHERSLSAYGGGNRASMEFLRQEDTPGCRPPEGNLRDSDTSISIPSVDHEELERSFSGFSISQSKENLDALNSCYAAVAPCAKVRPYIAEGESDTDSDLCTPCGPPPRSATGEGPFGDVGWAGPRK

SEQ ID NO: 2012 - protein, 512 aa, Artificial Sequence
  Synthetic polypeptide
GWEFKTSLASMLILFGLSNQLAVTFREENTIAFRHLFLLGYSDGADDTFAAYTREQLYQAIFHAVDQYLALPDVSLGRYAYVRGGGDPWTNGSGLALCQRYYHRGHVDPANDTFDIDPMVVTDCIQVDPPERPPPPPSDDLTLLESSSSYKNLTLKFHKLVNVTIHFRLKTINLQSLINNEIPDCYTFSVLITFDNKAHSGRIPISLETQAHIQECKHPSVFQHGDNSFRLLFDVVVILTCSLSFLLCARSLLRGFLLQNEFVGFMWRQRGRVISLWERLEFVNGWYILLVTSDVLTISGTIMKIGIEAKNLASYDVCSILLGTSTLLVWVGVIRYLTFFHNYNILIATLRVALPSVMRFCCCVAVIYLGYCFCGWIVLGPYHVKFRSLSMVSECLFSLINGDDMFVTFAAMQAQQGRSSLVWLFSQLYLYSFISLFIYMVLSLFIALITGAYDTIKHPGGAGAEESELQAYIAQCQDSPTSGKFRRGSGSACSLLCCCGRDPSEEHSLLVN

SEQ ID NO: 2013 - protein, 510 aa, Artificial Sequence
  Synthetic polypeptide
EANKALGKTGLIFCVHSPCTGFLACGNIIGSGIFVSPKGVLENAGSVGLALIVWIVTGFITVVGALCYAELGVTIPKSGGDYSYVKDIFGGLAGFLRLWIAVLVIYPTNQAVIALTFSNYVLQPLFPTCFPPESGLRLLAAICLLLLTWVNCSSVRWATRVQDIFTAGKLLALALIIIMGIVQICKGEYFWLEPKNAFENFQEPDIGLVALAFLQGSFAYGGWNFLNYVTEELVDPYKNLPRAIFISIPLVTFVYVFANVAYVTAMSPQELLASNAVAVTFGEKLLGVMAWIMPISVALSTFGGVNGSLFTSSRLFFAGAREGHLPSVLAMIHVKRCTPIPALLFTCISTLLMLVTSDMYTLINYVGFINYLFYGVTVAGQIVLRWKKPDIPRPIKINLLFPIIYLLFWAFLLVFSLWSEPVVCGIGLAIMLTGVPVYFLGVYWQHKPKCFSDFIELLTLVSQKMCVVVYPEVERGSGTEEANEDMEEQQQPMYQPTPTKDKDVAGQPQP

SEQ ID NO: 2014 - protein, 509 aa, Artificial Sequence
  Synthetic polypeptide
DGDNPGLPQSAWRFYATNLSRTDLHSTWQYYERTVTVPMYSSQTQTYGASRLIPPLNQLELLRNLKSKSGLAFRKDPPPEPSPSPRGVAAKGKGSPQAQTVRRSPSADQSLEDSPSKVPKSWSFGDRSRARQAFRIKGAASRQNSEASLPGEDIVDDKSCPCEFVTEDLTPGLKVSIRAVCVMRFLVSKRKFKESLRPYDVMDVIEQYSAGHLDMLSRIKSLQSRVDQIVGRGPAITDKDRTKGPAEAELPEDPSMMGRLGKVEKQVLSMEKKLDFLVNIYMQRMGIPPTETEAYFGAKEPEPAPPYHSPEDSREHVDRHGCIVKIVRSSSSTGQKNFSAPPAAPPVQCPPSTSWQPQSHPRQGHGTSPVGDHGSLVRIPPPPAHERSLSAYGGGNRASMEFLRQEDTPGCRPPEGNLRDSDTSISIPSVDHEELERSFSGFSISQSKENLDALNSCYAAVAPCAKVRPYIAEGESDTDSDLCTPCGPPPRSATGEGPFGDVGWAGPRK

SEQ ID NO: 2015 - protein, 509 aa, Artificial Sequence
  Synthetic polypeptide
AGHDGSHLQSQHFRRPRQEDRLRPGIQGNTVHLGTGDPYTPGFPSFNQTQFPPVASSGLPSIPAQPISADIASRLLRKLKGPVAPQEWQGSLLGSPYHLGPGPRLRLVVNNHRTSTPINNIFGCIEGRSEPDHYVVIGAQRDAWGPGAAKSAVGTAILLELVRTFSSMVSNGFRPRRSLLFISWDGGDFGSVGSTEWLEGYLSVLHLKAVVYVSLDNAVLGDDKFHAKTSPLLTSLIESVLKQVDSPNHSGQTLYEQVVFTNPSWDAEVIRPLPMDSSAYSFTAFVGVPAVEFSFMEDDQAYPFLHTKEDTYENLHKVLQGRLPAVAQAVAQLAGQLLIRLSHDRLLPLDFGRYGDVVLRHIGNLNEFSGDLKARGLTLQWVYSARGDYIRAAEKLRQEIYSSEERDERLTRMYNVRIMRVEFYFLSQYVSPADSPFRHIFMGRGDHTLGALLDHLRLLRSNSSGTPGATSSTGFQESRFRRQLALLTWTLQGAANALSGDVWNIDNNF

SEQ ID NO: 2016 - protein, 509 aa, Artificial Sequence; identical to SEQ ID NO: 2015
  Synthetic polypeptide

SEQ ID NO: 2017 - protein, 509 aa, Artificial Sequence
  Synthetic polypeptide
REKKPIMENGKIYSRWRVQQIQFADDMQEFTKFPTKTGRRSLSRSISQSSTDSYSSAASYTDSSDDEVSPREKQQTNSKGSSNFCVKNIKQAEFGRREIEIAEQDMSALISLRKRAQGEKPLAGAKIVGCTHITAQTAVLIETLCALGAQCRWSACNIYSTQNEVAAALAEAGVAVFAWKGESEDDFWWCIDRCVNMDGWQANMILDDGGDLTHWVYKKYPNVFKKIRGIVEESVTGVHRLYQLSKAGKLCVPAMNVNDSVTKQKFDNLYCCRESILDGLKRTTDVMFGGKQVVVCGYGEVGKGCCAALKALGAIVYITEIDPICALQACMDGFRVVKLNEVIRQVDVVITCTGNKNVVTREHLDRMKNSCIVCNMGHSNTEIDVTSLRTPELTWERVRSQVDHVIWPDGKRVVLLAEGRLLNLSCSTVPTFVLSITATTQALALIELYNAPEGRYKQDVYLLPKKMDEYVASLHLPSFDAHLTELTDDQAKYLGLNKNGPFKPNYYRY

SEQ ID NO: 2018 - protein, 507 aa, Artificial Sequence
  Synthetic polypeptide
RSILLGRKDLNFEISLGAPIPFFHRCAPVNISCYAKFAEALITFVSDNSVLHRLISGVMTSKEIILGLCLLSLVLSMILMVIIRYISRVLVWILTILVILGSLGGTGVLWWLYAKQRRSPKETVTPEQLQIAEDNLRALLIYAISATVFTVILFLIMLVMRKRVALTIALFHVAGKVFIHLPLLVFQPFWTFFALVLFWVYWIMTLLFLGTTGSPVQNEQGFVEFKISGPLQYMWWYHVVGLIWISEFILACQQMTVAGAVVTYYFTRDKRNLPFTPILASVNRLIRYHLGTVAKGSFIITLVKIPRMILMYIHSQLKGKENACARCVLKSCICCLWCLEKCLNYLNQNAYTATAINSTNFCTSAKDAFVILVENALRVATINTVGDFMLFLGKVLIVCSTGLAGIMLLNYQQDYTVWVLPLIIVCLFAFLVAHCFLSIYEMVVDVLFLCFAIDTKYNDGSPGREFYMDKVLMEFVENSRKAMKEAGKGGVADSRELKPMASGASSA

SEQ ID NO: 2019 - protein, 507 aa, Artificial Sequence; identical to SEQ ID NO: 2018
  Synthetic polypeptide

SEQ ID NO: 2020 - protein, 507 aa, Artificial Sequence
  Synthetic polypeptide
LMPVIPALWGTEMADHLRSGVQDQAGQRGELPVSTKNTKISQVCWCMPLVPATQEAKALLLLGAAALACLALDLLFLLFYSFWLCCRRRKSEEHLDADCCCTAWCVIIATLVCSAGIAVGFYGNGETSDGIHRATYSLRHANRTVAGVQDRVWDTAVGLNHTAEPSLQTLERQLAGRPEPLRAVQRLQGLLETLLGYTAAIPFWRNTAVSLEVLAEQVDLYDWYRVCLLGVLALVISWGALGLELAVSVGSSDFCVDPDAYVTKMVEEYSVLSGDILQYYLACSPRAANPFQQKLSGSHKALVEMQDVVAELLRTVPWEQPATKDPLLRVQEVLNGTEVNLQHLTALVDCRSLHLDYVQALTGFCYDGVEGLIYLALFSFVTALMFSSIVCSVPHTWQQKRGPDEDGEEEAAPGPRQAHDSLYRVHMPSLYSCGSSYGSETSIPAAAHTVSNAPVTEYMSQNANFQNPRCENTPLIGRESPPPSYTSSMRAKYLATSQPRPDSSGSH

SEQ ID NO: 2021 - protein, 507 aa, Artificial Sequence
  Synthetic polypeptide
KPPGFIPAPSYSSCGTWRLTLVLALATLIAAFGSSFQYGYNVAAVNSPALLMQQFYNETYYGRTGEFMEDFPLTLLWSVTVSMFPFGGFIGSLLVGPLVNKFGRKGALLFNNIFSIVPAILMGCSRVATSFELIIISRLLVGICAGVSSNVVPMYLGELAPKNLRGALGVVPQLFITVGILVAQIFGLRNLLANVDGWPILLGLTGVPAALQLLLLPFFPESPRYLLIQKKDEAAAKKALQTLRGWDSVDREVAEIRQEDEAEKAAGFISVLKLFRMRSLRWQLLSIIVLMGGQQLSGVNAIYYYADQIYLSAGVPEEHVQYVTAGTGAVNVVMTFCAVFVVELLGRRLLLLLGFSICLIACCVLTAALALQDTVSWMPYISIVCVISYVIGHALGPSPIPALLITEIFLQSSRPSAFMVGGSVHWLSNFTVGLIFPFIQEGLGPYSFIVFAVICLLTTIYIFLIVPETKAKTFIEINQIFTKMNKVSEVYPEKEELKELPPVTSEQ

SEQ ID NO: 2022 - protein, 506 aa, Artificial Sequence
  Synthetic polypeptide
PSSVAQTCSRSALSERIAWAQEYKITNVVEANQPVTIQNWCKRGRKQCKTHPHFVIPYRCLVGEFVSDALLVPDKCKFLHQERMDVCETHLHWHTVAKETCSEKSTNLHDYGMLLPCGIDKFRGVEFVCCPLAEESDNVDSADAEEDDSDVWWGGADTDYADGSEDKVVEVAEEEEVAEVEEEEADDDEDDEDGDEVEEEAEEPYEEATERTTSIATTTTTTTESVEEVVREVCSEQAETGPCRAMISRWYFDVTEGKCAPFFYGGCGGNRNNFDTEEYCMAVCGSAIPTTAASTPDAVDKYLETPGDENEHAHFQKAKERLEAKHRERMSQVMREWEEAERQAKNLPKADKKAVIQHFQEKVESLEQEAANERQQLVETHMARVEAMLNDRRRLALENYITALQAVPPRPRHVFNMLKKYVRAEQKDRQHTLKHFEHVRMVDPKKAAQIRSQVMTHLRVIYERMNQSLSLLYNVPAVAEEIQDEVGAVAHACNSSILGGQGGQMT

SEQ ID NO: 2023 - protein, 506 aa, Artificial Sequence
  Synthetic polypeptide
MDMVAQACDPSTLGGQNDYPCSGMLGMVSGLISDSQITSSNQGDRNWMPENIRLVTSRSGWALPPAPHSYINEWLQIDLGEEKIVRGIIIQGGKHRENKVFMRKFKIGYSNNGSDWKMIMDDSKRKAKSFEGNNNYDTPELRTFPALSTRFIRIYPERATHGGLGLRMELLGCEVEAPTAGPTTPNGNLVDECDDDQANCHSGTGGTTVLATEKPTVIDSTIQSEFPTYGFNCEFGWGSHKTFCHWEHDNHVQLKWSVLTSKTGPIQDHTGDGNFIYSQADENQKGKVARLVSPVVYSQNSAHCMTFWYHMSGSHVGTLRVKLRYQKPEEYDQLVWMAIGHQGDHWKEGRVLLHKSLKLYQVIFEGEIGKGNLGGIAVDDISINNHISQEDCAKPADLDKKNPEIKIDETGSTPGYEGEGEGDKNISRKPGNVLKTLDPILITIIAMSALGVLLGAVCGVVLYCACWHNGMSERNLSALENYNFELVDGVKLKKDKLNTQSTYSEA

SEQ ID NO: 2024 - protein, 506 aa, Artificial Sequence
  Synthetic polypeptide
TSGSAWRFYATNLSRTDLHSTWQYYERTVTVPMYRLIPPLNQLELLRNLKSKSGLAFRKDPPPEPSPSQKVSLKDRVFSSPRGVAAKGKGSPQAQTVRRSPSADQSLEDSPSKVPKSWSFGDRSRARQAFRIKGAASRQNSEEASLPGEDIVDDKSCPCEFVTEDLTPGLKVSIRAVCVMRFLVSKRKFKESLRPYDVMDVIEQYSAGHLDMLSRIKSLQSRVDQIVGRGPAITDKDRTKGPAEAELPEDPSMMGRLGKVEKQVLSMEKKLDFLVNIYMQRMGIPPTETEAYFGAKEPEPAPPYHSPEDSREHVDRHGCIVKIVRSSSSTGQKNFSAPPAAPPVQCPPSTSWQPQSHPRQGHGTSPVGDHGSLVRIPPPPAHERSLSAYGGGNRASMEFLRQEDTPGCRPPEGNLRDSDTSISIPSVDHEELERSFSGFSISQSKENLDALNSCYAAVAPCAKVRPYIAEGESDTDSDLCTPCGPPPRSATGEGPFGDVGWAGPRK

SEQ ID NO: 2025 - protein, 505 aa, Artificial Sequence
  Synthetic polypeptide
GRRGGGEDGRGLGEGSALLHPDSRSHPRSLEKSAWRAFKESQCHHMLKHLHNGARITVQMPPTIEGHWVSTGCEVRSGPEFITRSYRFYHNNTFKAYQFYYGSNRCTNPTYTLIIRGKIRLRQASWIIRGGTEADYQLHNVQVICHTEAVAEKLGQQVNRTCPGFLADGGPWVQDVAYDLWREENGCECTKAVNFAMHELQLIRVEKQYLHHNLDHLVEELFLGDIHTDATQRMFYRPSSYQPPLQNAKNHDHACIACRIIYRSDEHHPPILPPKADLTIGLHGEWVSQRCEVRPEVLFLTRHFIFHDNNNTWEGHYYHYSDPVCKHPTFSIYARGRYSRGVLSSRVMGGTEFVFKVNHMKVTPMDAATASLLNVFNGNECGAEGSWQVGIQQDVTHTNGCVALGIKLPHTEYEIFKMEQDARGRYLLFNGQRPSDGSSPDRPEKRATSYQMPLVQCASSSPRAEDLAEDSGSSLYGRAPGRHTWSLLLAALACLVPLLHWNIRR

SEQ ID NO: 2026 - protein, 505 aa, Artificial Sequence
  Synthetic polypeptide
ENILILRRYILNNLLQIQFADDMQEFTKFPTKTGRRSLSRSISQSSTDSYSSAASYTDSSDDEVSPREKQQTNSKGSSNFCVKNIKQAEFGRREIEIAEQDMSALISLRKRAQGEKPLAGAKIVGCTHITAQTAVLIETLCALGAQCRWSACNIYSTQNEVAAALAEAGVAVFAWKGESEDDFWWCIDRCVNMDGWQANMILDDGGDLTHWVYKKYPNVFKKIRGIVEESVTGVHRLYQLSKAGKLCVPAMNVNDSVTKQKFDNLYCCRESILDGLKRTTDVMFGGKQVVVCGYGEVGKGCCAALKALGAIVYITEIDPICALQACMDGFRVVKLNEVIRQVDVVITCTGNKNVVTREHLDRMKNSCIVCNMGHSNTEIDVTSLRTPELTWERVRSQVDHVIWPDGKRVVLLAEGRLLNLSCSTVPTFVLSITATTQALALIELYNAPEGRYKQDVYLLPKKMDEYVASLHLPSFDAHLTELTDDQAKYLGLNKNGPFKPNYYRY

SEQ ID NO: 2027 - protein, 504 aa, Artificial Sequence
  Synthetic polypeptide
RSILLGRKDLNFEISLGAPIPFFHRCAPVNISCYAKFAEALITFVSDNSVLHRLISGVMTSKEIILGLCLLSLVLSMILMVIIRYISRVLVWILTILVILGSLGGTGVLWWLYAKQRRSPKETVTPEQLQIAEDNLRALLIYAISATVFTVILFLIMLVMRKRVALTIALFHVAGKVFIHLPLLVFQPFWTFFALVLFWVYWIMTLLFLGTTGSPVQNEQGFVEFKISGPLQYMWWYHVVGLIWISEFILACQQMTVAGAVVTYYFTRDKRNLPFTPILASVNRLIRYHLGTVAKGSFIITLVKIPRMILMYIHSQLKGKENACARCVLKSCICCLWCLEKCLNYLNQNAYTATAINSTNFCTSAKDAFVILVENALRVATINTVGDFMLFLGKVLIVCSTGLAGIMLLNYQQDYTVWVLPLIIVCLFAFLVAHCFLSIYEMVVDVLFLCFAIDTKYNDGSPGREFYMDKVLMEFVENSRKAMKEAGKGGVADSRELKPMLKKR

SEQ ID NO: 2028 - protein, 503 aa, Artificial Sequence
  Synthetic polypeptide
TSGSAWRFYATNLSRTDLHSTWQYYERTVTVPMYSSQTQTYGASRLIPPLNQLELLRNLKSKSGLAFRKDPPPEPSPSPRGVAAKGKGSPQAQTVRRSPSADQSLEDSPSKVPKSWSFGDRSRARQAFRIKGAASRQNSEASLPGEDIVDDKSCPCEFVTEDLTPGLKVSIRAVCVMRFLVSKRKFKESLRPYDVMDVIEQYSAGHLDMLSRIKSLQSRVDQIVGRGPAITDKDRTKGPAEAELPEDPSMMGRLGKVEKQVLSMEKKLDFLVNIYMQRMGIPPTETEAYFGAKEPEPAPPYHSPEDSREHVDRHGCIVKIVRSSSSTGQKNFSAPPAAPPVQCPPSTSWQPQSHPRQGHGTSPVGDHGSLVRIPPPPAHERSLSAYGGGNRASMEFLRQEDTPGCRPPEGNLRDSDTSISIPSVDHEELERSFSGFSISQSKENLDALNSCYAAVAPCAKVRPYIAEGESDTDSDLCTPCGPPPRSATGEGPFGDVGWAGPRK

SEQ ID NO: 2029 - protein, 502 aa, Artificial Sequence
  Synthetic polypeptide
RSILLGRKDLNFEISLGAPIPFFHRCAPVNISCYAKFAEALITFVSDNSVLHRLISGVMTSKEIILGLCLLSLVLSMILMVIIRYISRVLVWILTILVILGSLGGTGVLWWLYAKQRRSPKETVTPEQLQIAEDNLRALLIYAISATVFTVILFLIMLVMRKRVALTIALFHVAGKVFIHLPLLVFQPFWTFFALVLFWVYWIMTLLFLGTTGSPVQNEQGFVEFKISGPLQYMWWYHVVGLIWISEFILACQQMTVAGAVVTYYFTRDKRNLPFTPILASVNRLIRYHLGTVAKGSFIITLVKIPRMILMYIHSQLKGKENACARCVLKSCICCLWCLEKCLNYLNQNAYTATAINSTNFCTSAKDAFVILVENALRVATINTVGDFMLFLGKVLIVCSTGLAGIMLLNYQQDYTVWVLPLIIVCLFAFLVAHCFLSIYEMVVDVLFLCFAIDTKYNDGSPGREFYMDKVLMEFVENSRKAMKEAGKGGVADSRELKPMIK

SEQ ID NO: 2030 - protein, 502 aa, Artificial Sequence
  Synthetic polypeptide
MSWSKDGHWIWAAPRLNAASPISQSGILFTMLVFGPACGFILGSFCTKIYVDAVFIDTSNLDITPDDPRWIGAWWGGFLLCGALLFFSSLLMFGFPQSLPPHSEPAMESEQAMLSEREYERPKPSNGVLRHPLEPDSSASCFQQLRVIPKVTKHLLSNPVFTCIILAACMEIAVVAGFAAFLGKYLEQQFNLTTSSANQLLGMTAIPCACLGIFLGGLLVKKLSLSALGAIRMAMLVNLVSTACYVSFLFLGCDTGPVAGVTVPYGNSTAPGSALDPYSPCNNNCECQTDSFTPVCGADGITYLSACFAGCNSTNLTGCACLTTVPAENATVVPGKCPSPGCQEAFLTFLCVMCICSLIGAMAQTPSVIILIRTVSPELKSYALGVLFLLLRLLGFIPPPLIFGAGIDSTCLFWSTFCGEQGACVLYDNVVYRYLYVSIAIALKSFAFILYTTTWQCLRKNYKRYIKNHEGGLSTSTEYQDIETEKTCPESHSPSEDSFVRS

SEQ ID NO: 2031 - protein, 502 aa, Artificial Sequence
  Synthetic polypeptide
APLCLEASLSQASARLAPSVNFEDCTGRQRTAYFSLDTRFKVGTDGVITVKRPLRFHNPQIHFLVYAWDSTYRKFSTKVTLNTVGHHHRPPPHQASVSGIQAELLTFPNSSPGLRRQKRDWVIPPISCPENEKGPFPKNLVQIKSNKDKEGKVFYSITGQGADTPPVGVFIIERETGWLKVTEPLDRERIATYTLFSHAVSSNGNAVEDPMEILITVTDQNDNKPEFTQEVFKGSVMEGALPGTSVMEVTATDADDDVNTYNAAIAYTILSQDPELPDKNMFTINRNTGVISVVTTGLDRESFPTYTLVVQAADLQGEGLSTTATAVITVTDTNDNPPIFNPTTYKGQVPENEANVVITTLKVTDADAPNTPAWEAVYTILNDDGGQFVVTTNPVNNDGILKTAKGLDFEAKQQYILHVAVTNVVPFEVSLTTSTATVTVDVLDVNEAPIFVPPEKRVEVSEDFGVGQEITSYTAQEPDTFMEQKITFSSCYWNRDTSADPV

SEQ ID NO: 2032 - protein, 501 aa, Artificial Sequence
  Synthetic polypeptide
GRARWLTPVIPALWEADAGGSRGTASGLVFILRPEQSTCTWYLGTSGIQPVQNMAILLSYSERDPVPGGCNLEFDLDIDPNIYLEYNFFETTIKFAPANLGYARGVDPPPCDAGTDQDSRWRLQYDVYQYFLPENDLTEEMLLKHLQRMVSVPQVKASALKVVTLTANDKTSVSFSSLPGQGVIYNVIVWDPFLNTSAAYIPAHTYACSFEAGEGSCASLGRVSSKVFFTLFALLGFFICFFGHRFWKTELFFIGFIIMGFFFYILITRLTPIKYDVNLILTAVTGSVGGMFLVAVWWRFGILSICMLCVGLVLGFLISSVTFFTPLGNLKIFHDDGVFWVTFSCIAILIPVVFMGCLRILNILTCGVIGSYSVVLAIDSYWSTSLSYITLNVLKRALNKDFHRAFTNVPFQTNDFIILAVWGMLAVSGITLQIRRERGRPFFPPHPYKLWKQERERRVTNILDPSYHIPPLRERLYGRLTQIKGLFQKEQPAGERTPLLL

SEQ ID NO: 2033 - protein, 500 aa, Artificial Sequence
  Synthetic polypeptide
PARLAAPSGREVGGSAPRPASRPVREGGGGVSPQPGQPPRPGGNFMVLWSTCRTTVFKSVTNRFIKNLACSGICASLVCVPFDIILSTSPHCCWWIYTMLFCKVVKFLHKVFCSVTILSFPAIALDRYYSVLYPLERKISDAKSRELVMYIWAHAVVASVPVFAVTNVADIYATSTCTEVWSNSLGHLVYVLVYNITTVIVPVVVVFLFLILIRRALSASQKKKVIIAALRTPQNTISIPYASQREAELHATLLSMVMVFILCSVPYATLVVYQTVLNVPDTSVFLLLTAVWLPKVSLLANPVLFLTVNKSVRKCLIGTLVQLHHRYSRRNVVSTGSGMAEASLEPSIRSGSQLLEMFHIGQQQIFKPTEDEEESEAKYIGSADFQAKEIFSTCLEGEQGPQFAPSAPPLSTVDSVSQVAPAAPVEPETFPDKYSLQFGFGPFELPPQWLSETRNSKKRLLPPLGNTPEELIQTKVPKVGRVERKMSRNNKVSIFPKVDS

SEQ ID NO: 2034 - protein, 500 aa, Artificial Sequence; identical to SEQ ID NO: 2033
  Synthetic polypeptide

SEQ ID NO: 2035 - protein, 500 aa, Artificial Sequence
  Synthetic polypeptide
GASLPGRPSSEMWGAPLPCRPVWDVRSTSARPRPCLGGEEHLCLPPPLRSEETLCPATAPSEKFIKNLACSGICASLVCVPFDIILSTSPHCCWWIYTMLFCKVVKFLHKVFCSVTILSFPAIALDRYYSVLYPLERKISDAKSRELVMYIWAHAVVASVPVFAVTNVADIYATSTCTEVWSNSLGHLVYVLVYNITTVIVPVVVVFLFLILIRRALSASQKKKVIIAALRTPQNTISIPYASQREAELHATLLSMVMVFILCSVPYATLVVYQTVLNVPDTSVFLLLTAVWLPKVSLLANPVLFLTVNKSVRKCLIGTLVQLHHRYSRRNVVSTGSGMAEASLEPSIRSGSQLLEMFHIGQQQIFKPTEDEEESEAKYIGSADFQAKEIFSTCLEGEQGPQFAPSAPPLSTVDSVSQVAPAAPVEPETFPDKYSLQFGFGPFELPPQWLSETRNSKKRLLPPLGNTPEELIQTKVPKVGRVERKMSRNNKVSIFPKVDS

SEQ ID NO: 2036 - protein, 500 aa, Artificial Sequence; identical to SEQ ID NO: 2035
  Synthetic polypeptide

SEQ ID NO: 2037 - protein, 500 aa, Artificial Sequence; identical to SEQ ID NO: 2035
  Synthetic polypeptide

SEQ ID NO: 2038 - protein, 500 aa, Artificial Sequence
  Synthetic polypeptide
NQALCLTFTSYNLVHGNIIGSGIFVSPKGVLENAGSVGLALIVWIVTGFITVVGALCYAELGVTIPKSGGDYSYVKDIFGGLAGFLRLWIAVLVIYPTNQAVIALTFSNYVLQPLFPTCFPPESGLRLLAAICLLLLTWVNCSSVRWATRVQDIFTAGKLLALALIIIMGIVQICKGEYFWLEPKNAFENFQEPDIGLVALAFLQGSFAYGGWNFLNYVTEELVDPYKNLPRAIFISIPLVTFVYVFANVAYVTAMSPQELLASNAVAVTFGEKLLGVMAWIMPISVALSTFGGVNGSLFTSSRLFFAGAREGHLPSVLAMIHVKRCTPIPALLFTCISTLLMLVTSDMYTLINYVGFINYLFYGVTVAGQIVLRWKKPDIPRPIKINLLFPIIYLLFWAFLLVFSLWSEPVVCGIGLAIMLTGVPVYFLGVYWQHKPKCFSDFIELLTLVSQKMCVVVYPEVERGSGTEEANEDMEEQQQPMYQPTPTKDKDVAGQPQP

SEQ ID NO: 2039 - protein, 498 aa, Artificial Sequence
  Synthetic polypeptide
GKQLQALRAAQGFSTQGMIINVMSMNQPNRQKDHIMFSLFEKDDNWGETTTAITGTSEHSISQEDIARISKDMEDSVGLDCKRYLGLTVASFLGLLVFLTPIAFILLPPILWRDELEPCGTICEGLFISMAFKLLILLIGTWALFFRKRRADMPRVFVFRALLLVLIFLFVVSYWLFYGVRILDSRDRNYQGIVQYAVSLVDALLFIHYLAIVLLELRQLQPMFTLQVVRSTDGESRFYSLGHLSIQRAALVVLENYYKDFTIYNPNLLTASKFRAAKHMAGLKVYNVDGPSNNATGQSRAMIAAAARRRDSSHNELYYEEAEHERRVKKRKARLVVAVEEAFIHIQRLQAEEQQKAPGEVMDPREAAQAIFPSMARALQKYLRITRQQNYHSMESILQHLAFCITNGMTPKAFLERYLSAGPTLQYDKDRWLSTQWRLVSDEAVTNGLRDGIVFVLKCLDFSLVVNVKKIPFIILSEEFIDPKSHKFVLRLQSETSV

SEQ ID NO: 2040 - protein, 498 aa, Artificial Sequence; identical to SEQ ID NO: 2039
  Synthetic polypeptide

SEQ ID NO: 2041 - protein, 498 aa, Artificial Sequence; identical to SEQ ID NO: 2039
  Synthetic polypeptide

SEQ ID NO: 2042 - protein, 498 aa, Artificial Sequence; identical to SEQ ID NO: 2039
  Synthetic polypeptide

SEQ ID NO: 2043 - protein, 498 aa, Artificial Sequence
  Synthetic polypeptide
FLLKMTLGFHDVLGNERPSAYMREHNQLNGWSSDENDWNEKLYPVWKRGDMRWKNSWKGGRVQAVLTSDSPALVGSNITFAVNLIFPRCQKEDANGNIVYEKNCRNGQYFQKLGRCSVRVSVNTANVTLGPQLMEVTVYRRHGRAYVPIAQVKDVYVVTDQIPVFVTMFQKNDRNSSDETFLKDLPIMFDVLIHDPSHFLNYSTINYKWSFGDNTGLFVSTNHTVNHTYVLNGTFSLNLTVKAAAPGPCPPPPPPPRPSKPTPSLATTLKSYDSNTPGPAGDNPLELSRIPDENCQINRYGHFQATITIVEGILEVNIIQMTDVLMPVPWPESSLIDFVVTCQGSIPTEVCTIISDPTCEITQNTVCSPVDVDEMCLLTVRRTFNGSGTYCVNLTLGDDTSLALTSTLISVPDRDPASPLRMANSALISVGCLAIFVTVISLLVYKKHKEYNPIENSPGNVVRSKGLSVFLNRAKAVFFPGNQEKDPLLKNQEFKGVS

SEQ ID NO: 2044 - protein, 497 aa, Artificial Sequence
  Synthetic polypeptide
TYQALSNQLQGCSLYLLCSFPRGQHDHLSVPSLCSARYGIALVLHFCNFTTIAQNVIMNITMVAMVNSTSPQSQLNDSSEVLPVDSFGGLSKAPKSLPAKAPVYDWSPQIQGIIFGAVGYGGILTMAPSGYLAGRVGTKRVVGISLFATSFLTLCIPLATDFGIVLLIVTRIVQGLSQSSILGGQFAIWEKWGPPQERSRLCSIALSGMLLGCFTAILIGGFISETLGWPFVFYIFGGVGCVCCLLWFVVIYDDPVSYPWISTSEKEYIISSLKQQVGSSKQPLPIKAMLRSLPIWSICLGCFSHQWLVSTMVVYIPTYISSVYHVNIRDNGLLSALPFIVAWVIGMVGGYLADFLLTKKFRLITVRKIATILGSLPSSALIVSLPYLNSGYITATALLTLSCGLSTLCQSGIYINVLDIAPRYSSFLMGASRGFSSIAPVIVPTVSGFLLSQDPEFGWRNVFFLLFAVNLLGLLFYLIFGEADVQEWAKERKLTRL

SEQ ID NO: 2045 - protein, 496 aa, Artificial Sequence
  Synthetic polypeptide
QALWLTPVIPALWEAEAGGSRGQEIETTSTLACARASALCLNFNSTLILLPVCRNLLSFLRGTCSFCSRTLRKQLDHNLTFHKLVAYMICLHTAIHIIAHLFNFDCYSRSRQATDGSLASILSSLSHDEKKGGSWLNPIQSRNTTVEYVTFTSIAGLTGVIMTIALILMVTSATEFIRRSYFEVFWYTHHLFIFYILGLGIHGIGGIVRGQTEESMNESHPRKCAESFEMWDDRDSHCRRPKFEGHPPESWKWILAPVILYICERILRFYRSQQKVVITKVVMHPSKVLELQMNKRGFSMEVGQYIFVNCPSISLLEWHPFTLTSAPEEDFFSIHIRAAGDWTENLIRAFEQQYSPIPRIEVDGPFGTASEDVFQYEVAVLVGAGIGVTPFASILKSIWYKFQCADHNLKTKKVGHAALNFDKATDIVTGLKQKTSFGRPMWDNEFSTIATSHPKSVVGVFLCGPRTLAKSLRKCCHRYSSLDPRKVQFYFNKENF

SEQ ID NO: 2046 - protein, 496 aa, Artificial Sequence
  Synthetic polypeptide
IETWLPPVDVKLTGRLMLAVGGAVLGSLQFGYNTGVINAPQKVIEEFYNQTWVHRYGESILPTTLTTLWSLSVAIFSVGGMIGSFSVGLFVNRFGRRNSMLMMNLLAFVSAVLMGFSKLGKSFEMLILGRFIIGVYCGLTTGFVPMYVGEVSPTALRGALGTLHQLGIVVGILIAQVFGLDSIMGNKDLWPLLLSIIFIPALLQCIVLPFCPESPRFLLINRNEENRAKSVLKKLRGTADVTHDLQEMKEESRQMMREKKVTILELFRSPAYRQPILIAVVLQLSQQLSGINAVFYYSTSIFEKAGVQQPVYATIGSGIVNTAFTVVSLFVVERAGRRTLHLIGLAGMAGCAILMTIALALLEQLPWMSYLSIVAIFGFVAFFEVGPGPIPWFIVAELFSQGPRPAAIAVAGFSNWTSNFIVGMCFQYVEQLCGPYVFIIFTVLLVLFFIFTYFKVPETKGRTFDEIASGFRQGGASQSDKTPEELFHPLGADSQV

SEQ ID NO: 2047 - protein, 496 aa, Artificial Sequence
  Synthetic polypeptide
ATQKTGDFCISIRGCLSLLVTVQHTERYVTLFASIILKCDYTTSAQLQDVVVTWRFKSFCKDPIFDYYSASYQAALSLGQDPSNDCNDNQREVRIVAQRRGQNEPVLGVDYRQRKITIQNRADLVINEVMWWDHGVYYCTIEAPGDTSGDPDKEVKLIVLHWLTVIFIILGALLLLLLIGVCWCQCCPQYCCCYIRCPCCPAHCCCPEEDLSLPSSLPQMPMTQTTNQPPIANGVLEYLEKELRNLNLAQPLPPDLKGRFGHPCSMLSSLGSEVVERRIIHLPPLIRDLSSSRRTSDSLHQQWLTPIPSRPWDLREGRSHHHYPDFHQELQDRGPKSWALERRELDPSWSGRHRSSRLNGSPIHWSDRDSLSDVPSSSEARWRPSHPPFRSRCQERPRRPSPRESTQRHGRRRRHRSYSPPLPSGLSSWSSEEDKERQPQSWRAHRRGSHSPHWPEEKPPSYRSLDITPGKNSRKKGSVERRSEKDSSHSGRSVVI

SEQ ID NO: 2048 - protein, 496 aa, Artificial Sequence; identical to SEQ ID NO: 2047
  Synthetic polypeptide

SEQ ID NO: 2049 - protein, 496 aa, Artificial Sequence
  Synthetic polypeptide
MDMVAQACDPSTLGGQNDYPCSGMLGMVSGLISDSQITSSNQGDRNWMPENIRLVTSRSGWALPPAPHSYINEWLQIDLGEEKIVRGIIIQGGKHRENKVFMRKFKIGYSNNGSDWKMIMDDSKRKAKSFEGNNNYDTPELRTFPALSTRFIRIYPERATHGGLGLRMELLGCEVEAPTAGPTTPNGNLVDECDDDQANCHSGTGDDFQLTGGTTVLATEKPTVIDSTIQSEFPTYGFNCEFGWGSHKTFCHWEHDNHVQLKWSVLTSKTGPIQDHTGDGNFIYSQADENQKGKVARLVSPVVYSQNSAHCMTFWYHMSGSHVGTLRVKLRYQKPEEYDQLVWMAIGHQGDHWKEGRVLLHKSLKLYQVIFEGEIGKGNLGGIAVDDISINNHISQEDCARSTPGYEGEGEGDKNISRKPGNVLKTLDPILITIIAMSALGVLLGAVCGVVLYCACWHNGMSERNLSALENYNFELVDGVKLKKDKLNTQSTYSEA

SEQ ID NO: 2050 - protein, 495 aa, Artificial Sequence
  Synthetic polypeptide
GASLPGRPSSEMWGAPLPCRPVWDVRSTSARPRPCLGGNFMVLWSTCRTTVFKSVTNRFIKNLACSGICASLVCVPFDIILSTSPHCCWWIYTMLFCKVVKFLHKVFCSVTILSFPAIALDRYYSVLYPLERKISDAKSRELVMYIWAHAVVASVPVFAVTNVADIYATSTCTEVWSNSLGHLVYVLVYNITTVIVPVVVVFLFLILIRRALSASQKKKVIIAALRTPQNTISIPYASQREAELHATLLSMVMVFILCSVPYATLVVYQTVLNVPDTSVFLLLTAVWLPKVSLLANPVLFLTVNKSVRKCLIGTLVQLHHRYSRRNVVSTGSGMAEASLEPSIRSGSQLLEMFHIGQQQIFKPTEDEEESEAKYIGSADFQAKEIFSTCLEGEQGPQFAPSAPPLSTVDSVSQVAPAAPVEPETFPDKYSLQFGFGPFELPPQWLSETRNSKKRLLPPLGNTPEELIQTKVPKVGRVERKMSRNNKVSIFPKVDS

SEQ ID NO: 2051 - protein, 495 aa, Artificial Sequence; identical to SEQ ID NO: 2050
  Synthetic polypeptide

SEQ ID NO: 2052 - protein, 495 aa, Artificial Sequence
  Synthetic polypeptide
QAPVVLATWEAEEGGSLEPRSWRLRLQEKAADTIEALQKAGIKVWVLTGDKMETAAATCYACKLFRRNTQLLELTTKRIEEQSLHDVLFELSKTVLRHSGSLTRDNLSGLSADMQDYGLIIDGAALSLIMKPREDGSSGNYRELFLEICRSCSAVLCCRMAPLQKAQIVKLIKFSKEHPITLAIGDGANDVSMILEAHVGIGVIGKEGRQAARNSDYAIPKFKHLKKMLLVHGHFYYIRISELVQYFFYKNVCFIFPQFLYQFFCGFSQQTLYDTAYLTLYNISFTSLPILLYSLMEQHVGIDVLKRDPTLYRDVAKNALLRWRVFIYWTLLGLFDALVFFFGAYFVFENTTVTSNGQIFGNWTFGTLVFTVMVFTVTLKLALDTHYWTWINHFVIWGSLLFYVVFSLLWGGVIWPFLNYQRMYYVFIQMLSSGPAWLAIVLLVTISLLPDVLKKVLCRQLWPTATERVQTKSQCLSVEQSTIFMLSQTSSSLSF

SEQ ID NO: 2053 - protein, 495 aa, Artificial Sequence; identical to SEQ ID NO: 2052
  Synthetic polypeptide

SEQ ID NO: 2054 - protein, 495 aa, Artificial Sequence; identical to SEQ ID NO: 2052
  Synthetic polypeptide

SEQ ID NO: 2055 - protein, 494 aa, Artificial Sequence
  Synthetic polypeptide
SQHFGRPRWADHLRSGVRDQPGQHSENWSLLKRQTKLGRPYFTYWLTFVHVIITLLVICTYGIAPVGFAQHVTTQLVLRNKGVYESVKYIQQENFWVGPSSIDLIHLGAKFSPCIRKDGQIEQLVLRERDLERDSGCCVQNDHSGCIQTQRKDCSETLATFVKWQDDTGPPMDKSDLGQKRTSGAVCHQDPRTCEEPASSGAHIWPDDITKWPICTEQARSNHTGFLHMDCEIKGRPCCIGTKGSCEITTREYCEFMHGYFHEEATLCSQVHCLDKVCGLLPFLNPEVPDQFYRLWLSLFLHAGVVHCLVSVVFQMTILRDLEKLAGWHRIAIIFILSGITGNLASAIFLPYRAEVGPAGSQFGLLACLFVELFQSWPLLERPWKAFLNLSAIVLFLFICGLLPWIDNIAHIFGFLSGLLLAFAFLPYITFGTSDKYRKRALILVSLLAFAGLFAALVLWLYIYPINWPWIEHLTCFPFTSRFCEKYELDQVLH

SEQ ID NO: 2056 - protein, 494 aa, Artificial Sequence; identical to SEQ ID NO: 2055
  Synthetic polypeptide

SEQ ID NO: 2057 - protein, 494 aa, Artificial Sequence; identical to SEQ ID NO: 2055
  Synthetic polypeptide

SEQ ID NO: 2058 - protein, 493 aa, Artificial Sequence
  Synthetic polypeptide
LRVAKPTASKKMETSVRQSPRDESCQQPEEGWKQVLLQSGLEATRAAITQHCTDLGNLLGKENDVALIIDGHTLKYALSFEVRRSFLDLALSCKAVICCRVSPLQKSEIVDVVKKRVKAITLAIGDGANDVGMIQTAHVGVGISGNEGMQATNNSDYAIAQFSYLEKLLLVHGAWSYNRVTKCILYCFYKNVVLYIIELWFAFVNGFSGQILFERWCIGLYNVIFTALPPFTLGIFERSCTQESMLRFPQLYKITQNGEGFNTKVFWGHCINALVHSLILFWFPMKALEHDTVLTSGHATDYLFVGNIVYTYVVVTVCLKAGLETTAWTKFSHLAVWGSMLTWLVFFGIYSTIWPTIPIAPDMRGQATMVLSSAHFWLGLFLVPTACLIEDVAWRAAKHTCKKTLLEEVQELETKSRVLGKAVLRDSNGKRLNERDRLIKRLGRKTPPTLFRGSSLQQGVPHGYAFSQEEHGAVSQEEVIRAYDTTKKKSRKK

SEQ ID NO: 2059 - protein, 491 aa, Artificial Sequence
  Synthetic polypeptide
EERPWNQRVNFEDCTGRQRTAYFSLDTRFKVGTDGVITVKRPLRFHNPQIHFLVYAWDSTYRKFSTKVTLNTVGHHHRPPPHQASVSGIQAELLTFPNSSPGLRRQKRDWVIPPISCPENEKGPFPKNLVQIKSNKDKEGKVFYSITGQGADTPPVGVFIIERETGWLKVTEPLDRERIATYTLFSHAVSSNGNAVEDPMEILITVTDQNDNKPEFTQEVFKGSVMEGALPGTSVMEVTATDADDDVNTYNAAIAYTILSQDPELPDKNMFTINRNTGVISVVTTGLDRESFPTYTLVVQAADLQGEGLSTTATAVITVTDTNDNPPIFNPTTYKGQVPENEANVVITTLKVTDADAPNTPAWEAVYTILNDDGGQFVVTTNPVNNDGILKTAKGLDFEAKQQYILHVAVTNVVPFEVSLTTSTATVTVDVLDVNEAPIFVPPEKRVEVSEDFGVGQEITSYTAQEPDTFMEQKITFSSCYWNRDTSADPV

SEQ ID NO: 2060 - protein, 491 aa, Artificial Sequence
  Synthetic polypeptide
SWAGSRPQFSLLRYEDNTVVRTKGVASVVVSFFLSMYYNVINAWAFWYLFHSFQDPLPWSVCPLNGNHTGYDEECEKASSTQYFWYRKTLNISPSLQENGGVQWEPALCLLLAWLVVYLCILRGTESTGKIEQLANPKAWINAATQIFFSLGLGFGSLIAFASYNEPSNNCQKHAIIVSLINSFTSIFASIVTFSIYGFKATFNYENCLKKVSLLLTNTFDLEDGFLTASNLEQVKGYLASAYPSKYSEMFPQIKNCSLESELDTAVQGTGLAFIVYTEAIKNMEVSQLWSVLYFFMLLMLGIGSMLGNTAAILTPLTDSKIISSHLPKEAISGLVCLVNCAIGMVFTMEAGNYWFDIFNDYAATLSLLLIVLVETIAVCYVYGLRRFESDLKAMTGRAVSWYWKVMWAGVSPLLIVSLFVFYLSDYILTGTLKYQAWDASQGQLVTKDYPAYALAVIGLLVASSTMCIPLAALGTFVQRRLKRGDADPVA

SEQ ID NO: 2061 - protein, 489 aa, Artificial Sequence
  Synthetic polypeptide
EHWKLTGRLMLAVGGAVLGSLQFGYNTGVINAPQKVIEEFYNQTWVHRYGESILPTTLTTLWSLSVAIFSVGGMIGSFSVGLFVNRFGRRNSMLMMNLLAFVSAVLMGFSKLGKSFEMLILGRFIIGVYCGLTTGFVPMYVGEVSPTALRGALGTLHQLGIVVGILIAQVFGLDSIMGNKDLWPLLLSIIFIPALLQCIVLPFCPESPRFLLINRNEENRAKSVLKKLRGTADVTHDLQEMKEESRQMMREKKVTILELFRSPAYRQPILIAVVLQLSQQLSGINAVFYYSTSIFEKAGVQQPVYATIGSGIVNTAFTVVSLFVVERAGRRTLHLIGLAGMAGCAILMTIALALLEQLPWMSYLSIVAIFGFVAFFEVGPGPIPWFIVAELFSQGPRPAAIAVAGFSNWTSNFIVGMCFQYVEQLCGPYVFIIFTVLLVLFFIFTYFKVPETKGRTFDEIASGFRQGGASQSDKTPEELFHPLGADSQV

SEQ ID NO: 2062 - protein, 489 aa, Artificial Sequence
  Synthetic polypeptide
TSQPLKLFIANQKRLEIINEDDVEAYVGLRNLTIVDSGLKFVAHKAFLKNSNLQHINFTRNKLTSLSRKHFRHLDLSELILVGNPFTCSCDIMWIKTLQEAKSSPDTQDLYCLNESSKNIPLANLQIPNCGLPSANLAAPNLTVEEGKSITLSCSVAGDPVPNMYWDVGNLVSKHMNETSHTQGSLRITNISSDDSGKQISCVAENLVGEDQDSVNLTVHFAPTITFLESPTSDHHWCIPFTVKGNPKPALQWFYNGAILNESKYICTKIHVTNHTEYHGCLQLDNPTHMNNGDYTLIAKNEYGKDEKQISAHFMGWPGIDDGANPNYPDVIYEDYGTAANDIGDTTNRSNEIPSTDVTDKTGREHLSVYAVVVIASVVGFCLLVMLFLLKLARHSKFGMKDFSWFGFGKVKSRQGVGPASVISNDDDSASPLHHISNGSNTPSSSEGGPDAVIIGMTKIPVIENPQYFGITNSQLKPDTWPRGSPKTA

SEQ ID NO: 2063 - protein, 486 aa, Artificial Sequence
  Synthetic polypeptide
LSESLHLSASVSLSPMALHGLHEIIFAVHLDQCLAHGAQDVRVQVLPEVRGQLGGTVELPCHLLPPVPGLYISLVTWQRPDAPANHQNVAAFHPKMGPSFPSPKPGSERLSFVSAKQSTGQDTEAELQDATLALHGLTVEDEGNYTCEFATFPKGSVRGMTWLRVIAKPKNQAEAQKVTFSQDPTTVALCISKEGRPPARISWLSSLDWEAKETQVSGTLAGTVTVTSRFTLVPSGRADGVTVTCKVEHESFEEPALIPVTLSVRYPPEVSISGYDDNWYLGRTDATLSCDVRSNPEPTGYDWSTTSGTFPTSAVAQGSQLVIHAVDSLFNTTFVCTVTNAVGMGRAEQVIFVRETPRASPRDVGPLVWGAVGGTLLVLLLLAGGSLAFILLRVRRRRKSPGGAGGGASGDGGFYDPKAQVLGNGDPVFWTPVVPGPMEPDGKDEEEEEEEEKAEKGLMLPPPPALEDDMESQLDGSLISRRAVYV

SEQ ID NO: 2064 - protein, 483 aa, Artificial Sequence
  Synthetic polypeptide
SWAGSRPQFSLLRYEDNTVVRTKGVASVVVSFFLSMYYNVINAWAFWYLFHSFQDPLPWSVCPLNGNHTGYDEECEKASSTQYFWYRKTLNISPSLQENGGVQWEPALCLLLAWLVVYLCILRGTESTGKVVYFTASLPYCVLIIYLIRGLTLHGATNGLMYMFTPKIEQLANPKAWINAATQIFFSLGLGFGSLIAFASYNEPSNNCQKHAIIVSLINSFTSIFASIVTFSIYGFKATFNYENCLKKVSLLLTNTFDLEDGFLTASNLEQVKGYLASAYPSKYSEMFPQIKNCSLESELDTAVQGTGLAFIVYTEAIKNMEVSQLWSVLYFFMLLMLGIGSMLGNTAAILTPLTDSKIISSHLPKEAISGLVCLVNCAIGMVFTMEAGNYWFDIFNDYAATLSLLLIVLVETIAVCYVYGLRRFESDLKAMTGRAVSWYWKVMWAGVSPLLIVSLFVFYLSDYILTGTLKYQAWDASQDDKL

SEQ ID NO: 2065 - protein, 481 aa, Artificial Sequence
  Synthetic polypeptide
QGGTGTILLKLFQSIEKEGILPNSFYEASIILIPKPGRDTTKKENFRPISLMNIDAKILNKILANRIQQHIKKLIHHDQVGFIPGMQGWFNIHKSINVIQHINRAKDKNHMIISIDAEKAFDKIQQPFMLKTLNKLGIDGTYFKIIRAIYDKPTANIILNGQKLEAFPLKTGTRQGCPLSPLLFNIVLEVLARAIRQEKEIKGIQLGKEEVKLSLFADDMIVYLENPIVSAQNLLKLISNFSKVSGYKINVQKSQAFLYTNNRQTESQIMSELPFTIASKRIKYLGIQLTRDVKDLFKENYKPLLKEIKEDTNKWKNIPYSWIGRINIVKMAILPKSTLACARASALCLNFNSTLILLPVCRNLLSFLRGTCSFCSRTLRKQLDHNLTFHKLVAYMICLHTAIHIIAHLFNFDCYSRSRQATDGSLASILSSLSHDEKKGGSWLNPIHPHITPTVYMFTVTFDMVLSSVNSNLFLFLLIKK

SEQ ID NO: 2066 - protein, 481 aa, Artificial Sequence
  Synthetic polypeptide
VQQWLLHFLSLWLWNVRIDPSSLSFNMWKEIPIPFYLSVYFFDVMNPSEILKGEKPQVRERGPYVYREFRHKSNITFNNNDTVSFLEYRTFQFQPSKSHGSESDYIVMPNILVLGAAVMMENKPMTLKLIMTLAFTTLGERAFMNRTVGEIMWGYKDPLVNLINKYFPGMFPFKDKFGLFAELNNSDSGLFTVFTGVQNISRIHLVDKWNGLSKVDFWHSDQCNMINGTSGQMWPPFMTPESSLEFYSPEACRSMKLMYKESGVFEGIPTYRFVAPKTLFANGSIYPPNEGFCPCLESGIQNVSTCRFSAPLFLSHPHFLNADPVLAEAVTGLHPNQEAHSLFLDIHPVTGIPMNCSVKLQLSLYMKSVAGIGQTGKIEPVVLPLLWFAESGAMEGETLHTFYTQLVLMPKVMHYAQYVLLALGCVLLLVPVICQIRSQEKCYLFWSSSKKGSKDKEAIQAYSESLMTSAPKGSVLQEAKL

SEQ ID NO: 2067 - protein, 481 aa, Artificial Sequence
  Synthetic polypeptide
LSEAVGVLYIEWLDAFGEGKGKTAWVGSLASGVGLLASPVCSLCVSSFGARPVTIFSGFMVAGGLMLSSFAPNIYFLFFSYGIVVGLGCGLLYTATVTITCQYFDDRRGLALGLISTGSSVGLFIYAALQRMLVEFYGLDGCLLIVGALALNILACGSLMRPLQSSDCPLPKKIAPEDLPDKYSIYNEKGKNLEENINILDKSYSSEEKCRITLANGDWKQDSLLHKNPTVTHTKEPETYKKKVAEQTYFCKQLAKRKWQLYKNYCGETVALFKNKVFSALFIAILLFDIGGFPPSLLMEDVARSSNVKEEEFIMPLISIIGIMTAVGKLLLGILADFKWINTLYLYVATLIIMGLALCAIPFAKSYVTLALLSGILGFLTGNWSIFPYVTTKTVGIEKLAHAYGILMFFAGLGNSLGPPIVGWFYDWTQTYDIAFYFSGFCVLLGGFILLLAALPSWDTCNKQLPKPAPTTFLYKVASNV

SEQ ID NO: 2068 - protein, 481 aa, Artificial Sequence; identical to SEQ ID NO: 2067
  Synthetic polypeptide

SEQ ID NO: 2069 - protein, 479 aa, Artificial Sequence
  Synthetic polypeptide
RITSSSQRDICTLLFTAALFTVGKRWKQAKRSLINELTLPWKQCDNPWNTDRCFSNYSMVNTTNMTSAVVEFWERNMHQMTDGLDKPGQIRWPLAITLAIAWILVYFCIWKGVGWTGKVVYFSATYPYIMLIILFFRGVTLPGAKEGILFYITPNFRKLSDSEVWLDAATQIFFSYGLGLGSLIALGSYNSFHNNVYRDSIIVCCINSCTSMFAGFVIFSIVGFMAHVTKRSIADVAASGPGLAFLAYPEAVTQLPISPLWAILFFSMLLMLGIDSQFCTVEGFITALVDEYPRLLRNRRELFIAAVCIISYLIGLSNITQGGIYVFKLFDYYSASGMSLLFLVFFECVSISWFYGVNRFYDNIQEMVGSRPCIWWKLCWSFFTPIIVAGVFIFSAVQMTPLTMGNYVFPKWGQGVGWLMALSSMVLIPGYMAYMFLTLKGSLKQRIQVMVQPSEDIVRPENGPEQPQAGSSTSKEAYI

SEQ ID NO: 2070 - protein, 479 aa, Artificial Sequence
  Synthetic polypeptide
PGTVADACNPSTLRGRGGGSRGQEIETILGAQDVRVQVLPEVRGQLGGTVELPCHLLPPVPGLYISLVTWQRPDAPANHQNVAAFHPKMGPSFPSPKPGSERLSFVSAKQSTGQDTEAELQDATLALHGLTVEDEGNYTCEFATFPKGSVRGMTWLRVIAKPKNQAEAQKVTFSQDPTTVALCISKEGRPPARISWLSSLDWEAKETQVSGTLAGTVTVTSRFTLVPSGRADGVTVTCKVEHESFEEPALIPVTLSVRYPPEVSISGYDDNWYLGRTDATLSCDVRSNPEPTGYDWSTTSGTFPTSAVAQGSQLVIHAVDSLFNTTFVCTVTNAVGMGRAEQVIFVRETPRASPRDVGPLVWGAVGGTLLVLLLLAGGSLAFILLRVRRRRKSPGGAGGGASGDGGFYDPKAQVLGNGDPVFWTPVVPGPMEPDGKDEEEEEEEEKAEKGLMLPPPPALEDDMESQLDGSLISRRAVYV

SEQ ID NO: 2071 - protein, 478 aa, Artificial Sequence
  Synthetic polypeptide
VQQWLLHFLSLWLWNVRIDPSSLSFNMWKEIPIPFYLSVYFFDVMNPSEILKGEKPQVRERGPYVYREFRHKSNITFNNNDTVSFLEYRTFQFQPSKSHGSESDYIVMPNILVLGAAVMMENKPMTLKLIMTLAFTTLGERAFMNRTVGEIMWGYKDPLVNLINKYFPGMFPFKDKFGLFAELNNSDSGLFTVFTGVQNISRIHLVDKWNGLSKVDFWHSDQCNMINGTSGQMWPPFMTPESSLEFYSPEACRSMKLMYKESGVFEGIPTYRFVAPKTLFANGSIYPPNEGFCPCLESGIQNVSTCRFSAPLFLSHPHFLNADPVLAEAVTGLHPNQEAHSLFLDIHPVTGIPMNCSVKLQLSLYMKSVAGIGQTGKIEPVVLPLLWFAESGAMEGETLHTFYTQLVLMPKVMHYAQYVLLALGCVLLLVPVICQIRSQGPEDTVSQPGLAAGPDRPPSPYTPLLPDSPSGQPPSPTA

SEQ ID NO: 2072 - protein, 478 aa, Artificial Sequence
  Synthetic polypeptide
SQHFGRLKQADHEVRRSRPSWLTCNIPEITPFLLFIMANIPLPLGTITILCIDLGTDMVPAISLAYEAAESDIMKRQPRNPRTDKLVNERLISMAYGQIGMIQALGGFFSYFVILAENGFLPGNLVGIRLNWDDRTVNDLEDSYGQQWTYEQRKVVEFTCHTAFFVSIVVVQWADLIICKTRRNSVFQQGMKNKILIFGLFEETALAAFLSYCPGMDVALRMYPLKPSWWFCAFPYSFLIFVYDEIRKLILRRNPGGEGARQGSRGGRGAAGSQAAGPRLPSPCWMALPPGSHSSLSSHLSGHPLCLLTGLCLCGFLVSLPLCPSLCWAARLACLSPSLTLSLSFLLCLSRLGGEGNLLLTSAPPHRPSLPRPPGPGPPLSVPPILYSGGRSPLFLWPHLGPHPLHYLLPPPLWLASLPCPKPLSSLFSVSVSLPLLTPLSIPPAPATSLGSFLLPFSPPADAISGSGQLSNISVGRE

SEQ ID NO: 2073 - protein, 477 aa, Artificial Sequence
  Synthetic polypeptide
RDTVAHTCNPSTLGSRGTICNPGPRKSMSKLLYIRLALFFPEMVWASLGAAWVADGVQCDRTVVNGIIATVVVRTQIWCPATLRRASPCFISNRTISGTTKSLPRWSAMPQGAPSCRSRTTDYDLVGGDQLNCHFGSILHTTGLQYRDFIHVSFHDKVYELPFLVALDHRKESVVVAVRGTMSLQDVLTDLSAESEVLDVECEVQDRLAHKGISQAARYVYQRLINDGILSQAFSIAPEYRLVIVGHSLGGGAAALLATMLRAAYPQVRCYAFSPPRGLWSKALQEYSQSFIVSLVLGKDVIPRLSVTNLEDLKRRILRVVAHCNKPKYKILLHGLWYELFGGNPNNLPTELDGGDQEVLTQPLLGEQSLLTRWSPAYSFSSDSPLDSSPKYPPLYPPGRIIHLQEEGASGRFGCCSAAHYSAKWSHEAEFSKILIGPKMLTDHMPDILMRALDSVVSDRAACVSCPAQGVSSVDVA

SEQ ID NO: 2074 - protein, 476 aa, Artificial Sequence
  Synthetic polypeptide
LATAQDLNITCRFAGVFHVEKNGRYSISRTEAADLCKAFNSTLPTMAQMEKALSIGFETCRYGFIEGHVVIPRIHPNSICAANNTGVYILTSNTSQYDTYCFNASAPPEEDCTSVTDLPNAFDGPITITIVNRDGTRYVQKGEYRTNPEDIYPSNPTDDDVSSGSSSERSSTSGGYIFYTFSTVHPIPDEDSPWITDSTDRIPATNMDSSHSITLQPTANPNTGLVEDLDRTGPLSMTTQQSNSQSFSTSHEGLEEDKDHPTTSTLTSSNRNDVTGGRRDPNHSEGSTTLLEGYTSHYPHTKESRTFIPVTSAKTGSFGVTAVTVGDSNSNVNRSLSGDQDTFHPSGGSHTTHGSESDGHSHGSQEGGANTTSGPIRTPQIPEWLIILASLLALALILAVCIAVNSRRRCGQKKKLVINSGNGAVEDRKPSGLNGEASKSQEMVHLVNKESSETPDQFMTADETRNLQNVDMKIGV

SEQ ID NO: 2075 - protein, 476 aa, Artificial Sequence
  Synthetic polypeptide
QHRVKVKEDILWSPRNIGSYPSSASYYYCDYTSYLTSQSLSCLSCKVERRTGCDKGKWYMKKHSAWFMHFLPLANLECSPNIETFLCKAFVPTCIEQIHVVPPCRKLCEKVYSDCKKLIDTFGIRWPEELECDRLQYCDETVPVTFDPHTEFLGPQKKTEQVQRDIGFWCPRHLKTSGGQGYKFLGIDQCAPPCPNMYFKSDELEFAKSFIGTVSIFCLCATLFTFLTFLIDVRRFRYPERPIIYYSVCYSIVSLMYFIGFLLGDSTACNKADEKLELGDTVVLGSQNKACTVLFMLLYFFTMAGTVWWVILTITWFLAAGRKWSCEAIEQKAVWFHAVAWGTPGFLTVMLLAMNKVEGDNISGVCFVGLYDLDASRYFVLLPLCLCVFVGLSLLLAGIISLNHVRQVIQHDGRNQEKLKKFMIRIGVFSGLYLVPLVTLLGCYVYEQVNRITWEITWVSDHCRQYHIPCPYQSNQ

SEQ ID NO: 2076 - protein, 475 aa, Artificial Sequence
  Synthetic polypeptide
HQSLRVEIYKYYSLLASLPLLLGLGFLSLWYPVQLVRSFSRRTGAGSKGLQSSYSEEYLRNLLCRKKLGSSYHTSKHGFLSWARVCLRHCIYTPQPGFHLPLKLVLSATLTGTAIYQVALLLLVGVVPTIQKVRAGVTTDVSYLLAGFGIVLSEDKQEVVELVKHHLWALEVCYISALVLSCLLTFLVLMRSLVTHRTNLRALHRGAALDLSPLHRSPHPSRQAIFCWMSFSAYQTAFICLGLLVQQIIFFLGTTALAFLVLMPVLHGRNLLLFRSLESSWPFWLTLALAVILQNMAAHWVFLETHDGHPQLTNRRVLYAATFLLFPLNVLVGAMVATWRVLLSALYNAIHLGQMDLSLLPPRAATLDPGYYTYRNFLKIEVSQSHPAMTAFCSLLLQAQSLLPRTMAAPQDSLRPGEEDEGMQLLQTKDSMAKGARPGASRGRARWGLAYTLLHNPTLQVFRKTALLGANGAQP

SEQ ID NO: 2077 - protein, 475 aa, Artificial Sequence; identical to SEQ ID NO: 2076
  Synthetic polypeptide

SEQ ID NO: 2078 - protein, 475 aa, Artificial Sequence; identical to SEQ ID NO: 2076
  Synthetic polypeptide

SEQ ID NO: 2079 - protein, 475 aa, Artificial Sequence; identical to SEQ ID NO: 2076
  Synthetic polypeptide

SEQ ID NO: 2080 - protein, 475 aa, Artificial Sequence; identical to SEQ ID NO: 2076
  Synthetic polypeptide

SEQ ID NO: 2081 - protein, 475 aa, Artificial Sequence; identical to SEQ ID NO: 2076
  Synthetic polypeptide

SEQ ID NO: 2082 - protein, 475 aa, Artificial Sequence; identical to SEQ ID NO: 2076
  Synthetic polypeptide

SEQ ID NO: 2083 - protein, 475 aa, Artificial Sequence; identical to SEQ ID NO: 2076
  Synthetic polypeptide

SEQ ID NO: 2084 - protein, 475 aa, Artificial Sequence
  Synthetic polypeptide
ALDRDLNITCRFAGVFHVEKNGRYSISRTEAADLCKAFNSTLPTMAQMEKALSIGFETCRYGFIEGHVVIPRIHPNSICAANNTGVYILTSNTSQYDTYCFNASAPPEEDCTSVTDLPNAFDGPITITIVNRDGTRYVQKGEYRTNPEDIYPSNPTDDDVSSGSSSERSSTSGGYIFYTFSTVHPIPDEDSPWITDSTDRIPATNMDSSHSITLQPTANPNTGLVEDLDRTGPLSMTTQQSNSQSFSTSHEGLEEDKDHPTTSTLTSSNRNDVTGGRRDPNHSEGSTTLLEGYTSHYPHTKESRTFIPVTSAKTGSFGVTAVTVGDSNSNVNRSLSGDQDTFHPSGGSHTTHGSESDGHSHGSQEGGANTTSGPIRTPQIPEWLIILASLLALALILAVCIAVNSRRRCGQKKKLVINSGNGAVEDRKPSGLNGEASKSQEMVHLVNKESSETPDQFMTADETRNLQNVDMKIGV

SEQ ID NO: 2085 - protein, 473 aa, Artificial Sequence
  Synthetic polypeptide
TSQPLKLFIANQKRLEIINEDDVEAYVGLRNLTIVDSGLKFVAHKAFLKNSNLQHINFTRNKLTSLSRKHFRHLDLSELILVGNPFTCSCDIMWIKTLQEAKSSPDTQDLYCLNESSKNIPLANLQIPNCGLPSANLAAPNLTVEEGKSITLSCSVAGDPVPNMYWDVGNLVSKHMNETSHTQGSLRITNISSDDSGKQISCVAENLVGEDQDSVNLTVHFAPTITFLESPTSDHHWCIPFTVKGNPKPALQWFYNGAILNESKYICTKIHVTNHTEYHGCLQLDNPTHMNNGDYTLIAKNEYGKDEKQISAHFMGWPGIDDGANPNYPDVIYEDYGTAANDIGDTTNRSNEIPSTDVTDKTGREHLSVYAVVVIASVVGFCLLVMLFLLKLARHSKFGMKGPASVISNDDDSASPLHHISNGSNTPSSSEGGPDAVIIGMTKIPVIENPQYFGITNSQLKPDTWPRGSPKTA

SEQ ID NO: 2086 - protein, 472 aa, Artificial Sequence
  Synthetic polypeptide
PQEAEEAALIEFHRSYRELFEFFCNNTTIHGAIRLVCSQHNRMKTAFWAVLWLCTFGMMYWQFGLLFGEYFSYPVSLNINLNSDKLVFPAVTICTLNPYRYPEIKEELEELDRITEQTLFDLYKYSSFTTLVAGSRSRRDLRGTLPHPLQRLRVPPPPHGARRARSVASSLRDNNPQVDWKDWKIGFQLCNQNKSDCFYQTYSSGVDAVREWYRFHYINILSRLPETLPSLEEDTLGNFIFACRFNQVSCNQANYSHFHHPMYGNCYTFNDKNNSNLWMSSMPGINNGLSLMLRAEQNDFIPLLSTVTGARVMVHGQDEPAFMDDGGFNLRPGVETSISMRKETLDRLGGDYGDCTKNGSDVPVENLYPSKYTQQVCIHSCFQESMIKECGCAYIFYPRPQNVEYCDYRKHSSWGYCYYKLQVDFSSDHLGCFTKCRKPCRNGSSRCYRDRTITPSTTREMEWPKSTSSSRS

SEQ ID NO: 2087 - protein, 472 aa, Artificial Sequence
  Synthetic polypeptide
EVRRPSARQPPRLRRNFMVLWSTCRTTVFKSVTNRFIKNLACSGICASLVCVPFDIILSTSPHCCWWIYTMLFCKVVKFLHKVFCSVTILSFPAIALDRYYSVLYPLERKISDAKSRELVMYIWAHAVVASVPVFAVTNVADIYATSTCTEVWSNSLGHLVYVLVYNITTVIVPVVVVFLFLILIRRALSASQKKKVIIAALRTPQNTISIPYASQREAELHATLLSMVMVFILCSVPYATLVVYQTVLNVPDTSVFLLLTAVWLPKVSLLANPVLFLTVNKSVRKCLIGTLVQLHHRYSRRNVVSTGSGMAEASLEPSIRSGSQLLEMFHIGQQQIFKPTEDEEESEAKYIGSADFQAKEIFSTCLEGEQGPQFAPSAPPLSTVDSVSQVAPAAPVEPETFPDKYSLQFGFGPFELPPQWLSETRNSKKRLLPPLGNTPEELIQTKVPKVGRVERKMSRNNKVSIFPKVDS

SEQ ID NO: 2088 - protein, 472 aa, Artificial Sequence; identical to SEQ ID NO: 2087
  Synthetic polypeptide

SEQ ID NO: 2089 - protein, 471 aa, Artificial Sequence
  Synthetic polypeptide
RAGWCTPVIPTTQEAEVGGSLEPRSSRPACAIWRDLISTKNKRISQAWWRTPAVPATQEAEYKQVEQYMSFHKLPADFRQKIHDYYEHRYQGKMFDEDSILGELNGPLREEIVNFNCRKLVASMPLFANADPNFVTAMLTKLKFEVFQPGDYIIREGTIGKKMYFIQHGVVSVLTKGNKEMKLSDGSYFGEICLLTRGRRTASVRADTYCRLYSLSVDNFNEVLEEYPMMRRAFETVAIDRLDRIGKKNSILLHKVQHDLNSGVFNNQENAIIQEIVKYDREMVQQAELGQRVGLFPPPPPPPQVTSAIATLQQAAAMSFCPQVARPLVGPLALGSPRLVRRPPPGPAPAAASPGPPPPASPPGAPASPRAPRTSPYGGLPAAPLAGPALPARRLSRASRPLSASQPSLPHGAPGPAASTRPASSSTPRLGPTPAARAAAPSPDRRDSASPGAAGGLDPQDSARSRLSSNL

SEQ ID NO: 2090 - protein, 471 aa, Artificial Sequence
  Synthetic polypeptide
PGTVADACNPSTLRGRGGGSRGAQDVRVQVLPEVRGQLGGTVELPCHLLPPVPGLYISLVTWQRPDAPANHQNVAAFHPKMGPSFPSPKPGSERLSFVSAKQSTGQDTEAELQDATLALHGLTVEDEGNYTCEFATFPKGSVRGMTWLRVIAKPKNQAEAQKVTFSQDPTTVALCISKEGRPPARISWLSSLDWEAKETQVSGTLAGTVTVTSRFTLVPSGRADGVTVTCKVEHESFEEPALIPVTLSVRYPPEVSISGYDDNWYLGRTDATLSCDVRSNPEPTGYDWSTTSGTFPTSAVAQGSQLVIHAVDSLFNTTFVCTVTNAVGMGRAEQVIFVRETPRASPRDVGPLVWGAVGGTLLVLLLLAGGSLAFILLRVRRRRKSPGGAGGGASGDGGFYDPKAQVLGNGDPVFWTPVVPGPMEPDGKDEEEEEEEEKAEKGLMLPPPPALEDDMESQLDGSLISRRAVYV

SEQ ID NO: 2091 - protein, 471 aa, Artificial Sequence
  Synthetic polypeptide
GSPENVRIDPSSLSFNMWKEIPIPFYLSVYFFDVMNPSEILKGEKPQVRERGPYVYREFRHKSNITFNNNDTVSFLEYRTFQFQPSKSHGSESDYIVMPNILVLGAAVMMENKPMTLKLIMTLAFTTLGERAFMNRTVGEIMWGYKDPLVNLINKYFPGMFPFKDKFGLFAELNNSDSGLFTVFTGVQNISRIHLVDKWNGLSKVDFWHSDQCNMINGTSGQMWPPFMTPESSLEFYSPEACRSMKLMYKESGVFEGIPTYRFVAPKTLFANGSIYPPNEGFCPCLESGIQNVSTCRFSAPLFLSHPHFLNADPVLAEAVTGLHPNQEAHSLFLDIHPVTGIPMNCSVKLQLSLYMKSVAGIGQTGKIEPVVLPLLWFAESGAMEGETLHTFYTQLVLMPKVMHYAQYVLLALGCVLLLVPVICQIRSQEKCYLFWSSSKKGSKDKEAIQAYSESLMTSAPKGSVLQEAKL

SEQ ID NO: 2092 - protein, 470 aa, Artificial Sequence
  Synthetic polypeptide
QWFSVRTIWTPRDNWRCLETVWVVTSGEGVLLLGRHRGCCSTSRKAQDSPPTAKNPPETKKALCITLTLGTFLVGAALAAGLLWKFMGSKCSNSGIECDSSGTCINPSNWCDGVSHCPGGEDENRCVRLYGPNFILQVYSSQRKSWHPVCQDDWNENYGRAACRDMGYKNNFYSSQGIVDDSGSTSFMKLNTSAGNVDIYKKLYHSDACSSKAVVSLRCIACGVNLNSSRQSRIVGGESALPGAWPWQVSLHVQNVHVCGGSIITPEWIVTAAHCVEKPLNNPWHWTAFAGILRQSFMFYGAGYQVEKVISHPNYDSKTKNNDIALMKLQKPLTFNDLVKPVCLPNPGMMLQPEQLCWISGWGATEEKGKTSEVLNAAKVLLIETQRCNSRYVYDNLITPAMICAGFLQGNVDSCQGDSGGPLVTSKNNIWWLIGDTSWGSGCAKAYRPGVYGNVMVFTDWIYRQMRADG

SEQ ID NO: 2093 - protein, 470 aa, Artificial Sequence; identical to SEQ ID NO: 2092
  Synthetic polypeptide

SEQ ID NO: 2094 - protein, 470 aa, Artificial Sequence; identical to SEQ ID NO: 2092
  Synthetic polypeptide

SEQ ID NO: 2095 - protein, 470 aa, Artificial Sequence
  Synthetic polypeptide
EEEIRTHRKMPGMCLHRGSTVGGQERRQPSTSQGERPQEKPALPTPGAQTASLQNLSRPRSSPDDLKALTRNVNRLNESFRDLQLRLLQAPLQADLTEQVWKVQDALQNQSDSLLALAGAVQRLEGALWGLQAQAVQTEQAVALLRDRTGQQSDTAQLELYQLQVESNSSQLLLRRHAGLLDGLARRVGILGEELADVGGVLRGLNHSLSYDVALHRTRLQDLRVLVSNASEDTRRLRLAHVGMELQLKQELAMLNAVTEDLRLKDWEHSIALRNISLAKGPPGPKGDQGDEGKEGRPGIPGLPGLRGLPGERGTPGLPGPKGDDGKLGATGPMGMRGFKGDRGPKGEKGEKGDRAGDASGVEAPMMIRLVNGSGPHEGRVEVYHDRRWGTVCDDGWDKKDGDVVCRMLGFRGVEEVYRTARFGQGTGRIWMDDVACKGTEETIFRCSFSKWGVTNCGHAEDASVTCNRH

SEQ ID NO: 2096 - protein, 470 aa, Artificial Sequence
  Synthetic polypeptide
PLQAVPSSETLMDSTTATAELGWMVHPPSGWEEVSGYDENMNTIRTYQVCNVFESSQNNWLRTKFIRRRGAHRIHVEMKFSVRDCSSIPSVPGSCKETFNLYYYEADFDSATKTFPNWMENPWVKVDTIAADESFSQVDLGGRVMKINTEVRSFGPVSRSGFYLAFQDYGGCMSLIAVRVFYRKCPRIIQNGAIFQETLSGAESTSLVAARGSCIANAEEVDVPIKLYCNGDGEWLVPIGRCMCKAGFEAVENGTVCRGCPSGTFKANQGDEACTHCPINSRTTSEGATNCVCRNGYYRADLDPLDMPCTTIPSAPQAVISSVNETSLMLEWTPPRDSGGREDLVYNIICKSCGSGRGACTRCGDNVQYAPRQLGLTEPRIYISDLLAHTQYTFEIQAVNGVTDQSPFSPQFASVNITTNQAAPSAVSIMHQVSRTVDSITLSWSQPDQPNGVILDYELQYYEKMKTQRS

SEQ ID NO: 2097 - protein, 468 aa, Artificial Sequence
  Synthetic polypeptide
LRVAKPTASKKMETSVRQSPRDESCQQPEEGWKQVLLQSGLEATRAAITQHCTDLGNLLGKENDVALIIDGHTLKYALSFEVRRSFLDLALSCKAVICCRVSPLQKSEIVDVVKKRVKAITLAIGDGANDVGMIQTAHVGVGISGNEGMQATNNSDYAIAQFSYLEKLLLVHGAWSYNRVTKCILYCFYKNVVLYIIEIFTALPPFTLGIFERSCTQESMLRFPQLYKITQNGEGFNTKVFWGHCINALVHSLILFWFPMKALEHDTVLTSGHATDYLFVGNIVYTYVVVTVCLKAGLETTAWTKFSHLAVWGSMLTWLVFFGIYSTIWPTIPIAPDMRGQATMVLSSAHFWLGLFLVPTACLIEDVAWRAAKHTCKKTLLEEVQELETKSRVLGKAVLRDSNGKRLNERDRLIKRLGRKTPPTLFRGSSLQQGVPHGYAFSQEEHGAVSQEEVIRAYDTTKKKSRKK

SEQ ID NO: 2098 - protein, 468 aa, Artificial Sequence
  Synthetic polypeptide
PPPGQPPRPGGNFMVLWSTCRTTVFKSVTNRFIKNLACSGICASLVCVPFDIILSTSPHCCWWIYTMLFCKVVKFLHKVFCSVTILSFPAIALDRYYSVLYPLERKISDAKSRELVMYIWAHAVVASVPVFAVTNVADIYATSTCTEVWSNSLGHLVYVLVYNITTVIVPVVVVFLFLILIRRALSASQKKKVIIAALRTPQNTISIPYASQREAELHATLLSMVMVFILCSVPYATLVVYQTVLNVPDTSVFLLLTAVWLPKVSLLANPVLFLTVNKSVRKCLIGTLVQLHHRYSRRNVVSTGSGMAEASLEPSIRSGSQLLEMFHIGQQQIFKPTEDEEESEAKYIGSADFQAKEIFSTCLEGEQGPQFAPSAPPLSTVDSVSQVAPAAPVEPETFPDKYSLQFGFGPFELPPQWLSETRNSKKRLLPPLGNTPEELIQTKVPKVGRVERKMSRNNKVSIFPKVDS

SEQ ID NO: 2099 - protein, 468 aa, Artificial Sequence; identical to SEQ ID NO: 2098
  Synthetic polypeptide

SEQ ID NO: 2100 - protein, 468 aa, Artificial Sequence
  Synthetic polypeptide
GSPENVRIDPSSLSFNMWKEIPIPFYLSVYFFDVMNPSEILKGEKPQVRERGPYVYREFRHKSNITFNNNDTVSFLEYRTFQFQPSKSHGSESDYIVMPNILVLGAAVMMENKPMTLKLIMTLAFTTLGERAFMNRTVGEIMWGYKDPLVNLINKYFPGMFPFKDKFGLFAELNNSDSGLFTVFTGVQNISRIHLVDKWNGLSKVDFWHSDQCNMINGTSGQMWPPFMTPESSLEFYSPEACRSMKLMYKESGVFEGIPTYRFVAPKTLFANGSIYPPNEGFCPCLESGIQNVSTCRFSAPLFLSHPHFLNADPVLAEAVTGLHPNQEAHSLFLDIHPVTGIPMNCSVKLQLSLYMKSVAGIGQTGKIEPVVLPLLWFAESGAMEGETLHTFYTQLVLMPKVMHYAQYVLLALGCVLLLVPVICQIRSQGPEDTVSQPGLAAGPDRPPSPYTPLLPDSPSGQPPSPTA

SEQ ID NO: 2101 - protein, 467 aa, Artificial Sequence
  Synthetic polypeptide
PLIHLSLIAVTFAIVLGVIIYRISMAAALAMNSSPSVRSNIRVTVTATAVIINLVVIILLDEVYGCIARWLTKIEVPKTEKSFEERLIFKAFLLKFVNSYTPIFYVAFFKGRFVGRPGDYVYIFRSFRMEECAPGGCLMELCIQLSIIMLGKQLIQNNLFEIGIPKMKKLIRYLKLKQQSPPDHEECVKRKQRYEVDYNLEPFAGLTPEYMEMIIQFGFVTLFVASFPLAPLFALLNNIIEIRLDAKKFVTELRRPVAVRAKDIGIWYNILRGIGKLAVIINAFVISFTSDFIPRLVYLYMYSKNGTMHGFVNHTLSSFNVSDFQNGTAPNDPLDLGYEVQICRYKDYREPPWSENKYDISKDFWAVLAARLAFVIVFQNLVMFMSDFVDWVIPDIPKDISQQIHKEKVLMVELFMREEQDKQQLLETWMEKERQKDEPPCNHHNTKACPDSLGSPAPSHAYHGGVL

SEQ ID NO: 2102 - protein, 467 aa, Artificial Sequence; identical to SEQ ID NO: 2101
  Synthetic polypeptide

SEQ ID NO: 2103 - protein, 467 aa, Artificial Sequence; identical to SEQ ID NO: 2101
  Synthetic polypeptide

SEQ ID NO: 2104 - protein, 467 aa, Artificial Sequence; identical to SEQ ID NO: 2101
  Synthetic polypeptide

SEQ ID NO: 2105 - protein, 467 aa, Artificial Sequence; identical to SEQ ID NO: 2101
  Synthetic polypeptide

SEQ ID NO: 2106 - protein, 467 aa, Artificial Sequence
  Synthetic polypeptide
QWFSVRTIWTPRDNWRCLETVWVVTSGEGVLLLGRHRGCCSTSRKAQDSPPTAKNPPETKKALCITLTLGTFLVGAALAAGLLWKFMGSKCSNSGIECDSSGTCINPSNWCDGVSHCPGGEDENRCVRLYGPNFILQVYSSQRKSWHPVCQDDWNENYGRAACRDMGYKNNFYSSQGIVDDSGSTSFMKLNTSAGNVDIYKKLYHSDACSSKAVVSLRCIACGVNLNSSRQSRIVGGESALPGAWPWQVSLHVQNVHVCGGSIITPEWIVTAAHCVEKPLNNPWHWTAFAGILRQSFMFYGAGYQVEKVISHPNYDSKTKNNDIALMKLQKPLTFNDLVKPVCLPNPGMMLQPEQLCWISGWGATEEKGKTSEVLNAAKVLLIETQRCNSRYVYDNLITPAMICAGFLQGNVDSCQGDSGGPLVTSKNNIWWLIGDTSWGSGCAKAYRPGVYGNVMVFTDWIYRQMR

SEQ ID NO: 2107 - protein, 466 aa, Artificial Sequence
  Synthetic polypeptide
AGECNQNKSDCFYQTYSSGVDAVREWYRFHYINILSRLPETLPSLEEDTLGNFIFACRFNQVSCNQANYSHFHHPMYGNCYTFNDKNNSNLWMSSMPGINNGLSLMLRAEQNDFIPLLSTVTGARVMVHGQDEPAFMDDGGFNLRPGVETSISMRKETLDRLGGDYGDCTKNGSDVPVENLYPSKYTQQVCIHSCFQESMIKECGCAYIFYPRPQNVEYCDYRKHSSWGQVRSLTPVIPALWEAEAGRSRGYCYYKLQVDFSSDHLGCFTKCRKPCSVTSYQLSAGYSRWPSVTSQEWVFQMLSRQNNYTVNNKRNGVAKVNIFFKELNYKTNSESPSVTMVTLLSNLGSQWSLWFGSSVLSVVEMAELVFDLLVIMFLMLLRRFRSRYWSPGRGGRGAQEVASTLASSPPSHFCPHPMSLSLSQPGPAPSPALTAPPPAYATLGPRPSPGGSAGASSSTCPLGGP

SEQ ID NO: 2108 - protein, 464 aa, Artificial Sequence
  Synthetic polypeptide
DVGSASALPPRLGCEEHLCPAATLSGRFIKNLACSGICASLVCVPFDIILSTSPHCCWWIYTMLFCKVVKFLHKVFCSVTILSFPAIALDRYYSVLYPLERKISDAKSRELVMYIWAHAVVASVPVFAVTNVADIYATSTCTEVWSNSLGHLVYVLVYNITTVIVPVVVVFLFLILIRRALSASQKKKVIIAALRTPQNTISIPYASQREAELHATLLSMVMVFILCSVPYATLVVYQTVLNVPDTSVFLLLTAVWLPKVSLLANPVLFLTVNKSVRKCLIGTLVQLHHRYSRRNVVSTGSGMAEASLEPSIRSGSQLLEMFHIGQQQIFKPTEDEEESEAKYIGSADFQAKEIFSTCLEGEQGPQFAPSAPPLSTVDSVSQVAPAAPVEPETFPDKYSLQFGFGPFELPPQWLSETRNSKKRLLPPLGNTPEELIQTKVPKVGRVERKMSRNNKVSIFPKVDS

SEQ ID NO: 2109 - protein, 464 aa, Artificial Sequence; identical to SEQ ID NO: 2108
  Synthetic polypeptide

SEQ ID NO: 2110 - protein, 464 aa, Artificial Sequence; identical to SEQ ID NO: 2108
  Synthetic polypeptide

SEQ ID NO: 2111 - protein, 464 aa, Artificial Sequence
  Synthetic polypeptide
SNFLLSVCLHTRQWFLEEGAIWFISKACLTGATAVLFAVFVRYNHKTDAALWHRSNHSNADNEFYFRYPSFQDVHAMVFVGFGFLMVFLQRYGFSSVGFTFLLAAFALQWSTLVQGFLHSFHGGHIHVGVESMINADFCAGAVLISFGAVLGKTGPTQLLLMALLEVVLFGINEFVLLHLLGVRDAGGSMTIHTFGAYFGLVLSRVLYRPQLEKSKHRQGSVYHSDLFAMIGTIFLWIFWPSFNAALTALGAGQHRTALNTYYSLAASTLGTFALSALVGEDGRLDMVHIQNAALAGGVVVGTSSEMMLTPFGALAAGFLAGTVSTLGYKFFTPILESKFKVQDTCGVHNLHGMPGVLGALLGVLVAGLATHEAYGDGLESVFPLIAEGQRSATSQAMHQLFGLFVTLMFASVGGGLGGLLLKLPFLDPPDSQHYEDQVHWQVPGEHEDKAQRPLRVEEADTQA

SEQ ID NO: 2112 - protein, 463 aa, Artificial Sequence
  Synthetic polypeptide
SQHFGRPRPYFTYWLTFVHVIITLLVICTYGIAPVGFAQHVTTQLVLRNKGVYESVKYIQQENFWVGPSSIDLIHLGAKFSPCIRKDGQIEQLVLRERDLERDSGCCVQNDHSGCIQTQRKDCSETLATFVKWQDDTGPPMDKSDLGQKRTSGAVCHQDPRTCEEPASSGAHIWPDDITKWPICTEQARSNHTGFLHMDCEIKGRPCCIGTKGSCEITTREYCEFMHGYFHEEATLCSQVHCLDKVCGLLPFLNPEVPDQFYRLWLSLFLHAGVVHCLVSVVFQMTILRDLEKLAGWHRIAIIFILSGITGNLASAIFLPYRAEVGPAGSQFGLLACLFVELFQSWPLLERPWKAFLNLSAIVLFLFICGLLPWIDNIAHIFGFLSGLLLAFAFLPYITFGTSDKYRKRALILVSLLAFAGLFAALVLWLYIYPINWPWIEHLTCFPFTSRFCEKYELDQVLH

SEQ ID NO: 2113 - protein, 463 aa, Artificial Sequence; identical to SEQ ID NO: 2112
  Synthetic polypeptide

SEQ ID NO: 2114 - protein, 463 aa, Artificial Sequence; identical to SEQ ID NO: 2112
  Synthetic polypeptide

SEQ ID NO: 2115 - protein, 463 aa, Artificial Sequence
  Synthetic polypeptide
EHSQALKLRSGHRTPSGAGSSMQPPPSLCGRALVALVLACGLSRIWGEERGFPPDRATPLLQTAEIMTPPTKTLWPKGSNASLARSLAPAEVPKGDRTAGSPPRTISPPPCQGPIEIKETFKYINTVVSCLVFVLGIIGNSTLLRIIYKNKCMRNGPNILIASLALGDLLHIVIDIPINVYKLLAEDWPFGAEMCKLVPFIQKASVGITVLSLCALSIDRYRAVASWSRIKGIGVPKWTAVEIVLIWVVSVVLAVPEAIGFDIITMDYKGSYLRICLLHPVQKTAFMQFYKTAKDWWLFSFYFCLPLAITAFFYTLMTCEMLRKKSGMQIALNDHLKQRREVAKTVFCLVLVFALCWLPLHLSRILKLTLYNQNDPNRCELLSFLLVLDYIGINMASLNSCINPIALYLVSKRFKNCFKSCLCCWCQSFEEKQSLEEKQSCLKFKANDHGYDNFRSSNKYSSS

SEQ ID NO: 2116 - protein, 460 aa, Artificial Sequence
  Synthetic polypeptide
TAEYVCLANPFSVKLLPQPLLLQSACLCSCTKAHFPDCRMAALHLYKKILVDTGSSNFAVAGTPHSYIDTYFDTERSSTYRSKGFDVTVKYTQGSWTGFVGEDLVTIPKGFNTSFLVNIATIFESENFFLPGIKWNGILGLAYATLAKPSSSLETFFDSLVTQANIPNVFSMQMCGAGLPVAGSGTNGGSLVLGGIEPSLYKGDIWYTPIKEEWYYQIEILKLEIGGQSLNLDCREYNADKAIVDSGTTLLRLPQKVFDAVVEAVARASLIPEFSDGFWTGSQLACWTNSETPWSYFPKISIYLRDENSSRSFRITILPQLYIQPMMGAGLNYECYRFGISPSTNALVIGATVMEGFYVIFDRAQKRVGFAASPCAEIAGAAVSEISGPFSTEDVASNCVPAQSLSEPILWIVSYALMSVCGAILLVLIVLLLLPFRCQRRPRDPEVVNDESSLVRHRWK

SEQ ID NO: 2117 - protein, 459 aa, Artificial Sequence
  Synthetic polypeptide
NLRLPPGHAELHMPLNQKAKRELCIGWGDPSGLPRRSYRLLLLHQEETKKALCITLTLGTFLVGAALAAGLLWKFMGSKCSNSGIECDSSGTCINPSNWCDGVSHCPGGEDENRCVRLYGPNFILQVYSSQRKSWHPVCQDDWNENYGRAACRDMGYKNNFYSSQGIVDDSGSTSFMKLNTSAGNVDIYKKLYHSDACSSKAVVSLRCIACGVNLNSSRQSRIVGGESALPGAWPWQVSLHVQNVHVCGGSIITPEWIVTAAHCVEKPLNNPWHWTAFAGILRQSFMFYGAGYQVEKVISHPNYDSKTKNNDIALMKLQKPLTFNDLVKPVCLPNPGMMLQPEQLCWISGWGATEEKGKTSEVLNAAKVLLIETQRCNSRYVYDNLITPAMICAGFLQGNVDSCQGDSGGPLVTSKNNIWWLIGDTSWGSGCAKAYRPGVYGNVMVFTDWIYRQMRADG

SEQ ID NO: 2118 - protein, 459 aa, Artificial Sequence; identical to SEQ ID NO: 2117
  Synthetic polypeptide

SEQ ID NO: 2119 - protein, 459 aa, Artificial Sequence; identical to SEQ ID NO: 2117
  Synthetic polypeptide

SEQ ID NO: 2120 - protein, 459 aa, Artificial Sequence
  Synthetic polypeptide
GGRHCHALMPKEPVAVSSHVVTISSLLPATAYNCSVTSFSHDSPSVPTFIAVSTMVTEMNPNVVVISVLAILSTLLIGLLLVTLIILRKKHLQMARECGAGTFVNFASLERDGKLPYNWRRSIFAFLTLLPSCLWTDYLLAFYINPWSKNGLKKRKLTNPVQLDDFDAYIKDMAKDSDYKFSLQFEELKLIGLDIPHFAADLPLNRCKNRYTNILPYDFSRVRLVSMNEEEGADYINANYIPGYNSPQEYIATQGPLPETRNDFWKMVLQQKSQIIVMLTQCNEKRRVKCDHYWPFTEEPIAYGDITVEMISEEEQDDWACRHFRINYADEMQDVMHFNYTAWPDHGVPTANAAESILQFVHMVRQQATKSKGPMIIHCSAGVGRTGTFIALDRLLQHIRDHEFVDILGLVSEMRSYRMSMVQTEEQYIFIHQCVQLMWMKKKQQFCISDVIYENVSKS

SEQ ID NO: 2121 - protein, 458 aa, Artificial Sequence
  Synthetic polypeptide
QRAWRMAMFSTIRITPTDSRWVGAWWLNFLVSGLFSIISSIPFFFLPQTPNKPQKERKASLSLHVLETNDEKDQTANLTNQGKNITKNVTGFFQSFKSILTNPLYVMFVLLTLLQVSSYIGAFTYVFKYVEQQYGQPSSKANILLGVITIPIFASGMFLGGYIIKKFKLNTVGIAKFSCFTAVMSLSFYLLYFFILCENKSVAGLTMTYDGNNPVTSHRDVPLSYCNSDCNCDESQWEPVCGNNGITYISPCLAGCKSSSGNKKPIVFYNCSCLEVTGLQNRNYSAHLGECPRDDACTRKFYFFVAIQVLNLFFSALGGTSHVMLIVKIVQPELKSLALGFHSMVIRALGGILAPIYFGALIDTTCIKWSTNNCGTRGSCRTYNSTSFSRVYLGLSSMLRVSSLVLYIILIYAMKKKYQEKDINASENGSVMDEANLESLNKNKHFVPSAGADSETHC

SEQ ID NO: 2122 - protein, 457 aa, Artificial Sequence
  Synthetic polypeptide
WTVETTKGAQDVRVQVLPEVRGQLGGTVELPCHLLPPVPGLYISLVTWQRPDAPANHQNVAAFHPKMGPSFPSPKPGSERLSFVSAKQSTGQDTEAELQDATLALHGLTVEDEGNYTCEFATFPKGSVRGMTWLRVIAKPKNQAEAQKVTFSQDPTTVALCISKEGRPPARISWLSSLDWEAKETQVSGTLAGTVTVTSRFTLVPSGRADGVTVTCKVEHESFEEPALIPVTLSVRYPPEVSISGYDDNWYLGRTDATLSCDVRSNPEPTGYDWSTTSGTFPTSAVAQGSQLVIHAVDSLFNTTFVCTVTNAVGMGRAEQVIFVRETPRASPRDVGPLVWGAVGGTLLVLLLLAGGSLAFILLRVRRRRKSPGGAGGGASGDGGFYDPKAQVLGNGDPVFWTPVVPGPMEPDGKDEEEEEEEEKAEKGLMLPPPPALEDDMESQLDGSLISRRAVYV

SEQ ID NO: 2123 - protein, 457 aa, Artificial Sequence
  Synthetic polypeptide
TQDLARTQGVNLGSVAPCLGFHVIPTISSIVPESCLLIVVGLLVGGLIKGVGETPPFLQSDVFFLFLLPPIILDAGYFLPLRQFTENLGTILIFAVVGTLWNAFFLGGLMYAVCLVGGEQINNIGLLDNLLFGSIISAVDPVAVLAVFEEIHINELLHILVFGESLLNDAVTVVLYHLFEEFANYEHVGIVDIFLGFLSFFVVALGGVLVGVVYGVIAAFTSRFTSHIRVIEPLFVFLYSYMAYLSAELFHLSGIMALIASGVVMRPYVEANISHKSHTTIKYFLKMWSSVSETLIFIFLGVSTVAGSHHWNWTFVISTLLFCLIARVLGVLGLTWFINKFRIVKLTPKDQFIIAYGGLRGAIAFSLGYLLDKKHFPMCDLFLTAIITVIFFTVFVQVLGQGRAGPCLGDPHRLFPWKERKACDLKCDSSPSSTTNLLCDLGRATPPFWASVSSIVK

SEQ ID NO: 2124 - protein, 456 aa, Artificial Sequence
  Synthetic polypeptide
NLRLPPGHAELHMPLNQKAKRELCIGWGDPSGLPRRSYRLLLLHQEETKKALCITLTLGTFLVGAALAAGLLWKFMGSKCSNSGIECDSSGTCINPSNWCDGVSHCPGGEDENRCVRLYGPNFILQVYSSQRKSWHPVCQDDWNENYGRAACRDMGYKNNFYSSQGIVDDSGSTSFMKLNTSAGNVDIYKKLYHSDACSSKAVVSLRCIACGVNLNSSRQSRIVGGESALPGAWPWQVSLHVQNVHVCGGSIITPEWIVTAAHCVEKPLNNPWHWTAFAGILRQSFMFYGAGYQVEKVISHPNYDSKTKNNDIALMKLQKPLTFNDLVKPVCLPNPGMMLQPEQLCWISGWGATEEKGKTSEVLNAAKVLLIETQRCNSRYVYDNLITPAMICAGFLQGNVDSCQGDSGGPLVTSKNNIWWLIGDTSWGSGCAKAYRPGVYGNVMVFTDWIYRQMR

SEQ ID NO: 2125 - protein, 456 aa, Artificial Sequence
  Synthetic polypeptide
PDGTTTGLRVPGAGTNPCHHHHREPQIRVMVDLCNSTKGICLTGPSGPPGPPGAGGLPGHNGLDGQPGPQGPKGEKGANGKRGKMGIPGAAGNPGERGEKGDHGELGLQGNEGPPGQKGEKGDKGDVSNDVLLAGAKGDQGPPGPPGPPGPPGPPGPPGSRRAKGPRQPSMFNGQCPGETCAIPNDDTLVGKADEKASEHHSPQAESMITSIGNPVQVLKVTETFGTWIRESANKSDDRIWVTEHFSGIMVKEFKDQPSLLNGSYTFIHLPYYFHGCGHVVYNNSLYYHKGGSNTLVRFEFGQETSQTLKLENALYFDRKYLFANSKTYFNLAVDEKGLWIIYASSVDGSSILVAQLDERTFSVVQHVNTTYPKSKAGNAFIARGILYVTDTKDMRVTFAFDLLGGKQINANFDLRTSQSVLAMLAYNMRDQHLYSWEDGHLMLYPVQFLSTTLNQ

SEQ ID NO: 2126 - protein, 455 aa, Artificial Sequence
  Synthetic polypeptide
KTVERGNLLLGNTFSLVATKETDSARSRSAPMSPSDFLDKLMGRTSGYDARIRPNFKGPPVNVTCNIFINSFGSIAETTMDYRVNIFLRQKWNDPRLAYSEYPDDSLDLDPSMLDSIWKPDLFFANEKGANFHEVTTDNKLLRIFKNGNVLYSIRLTLTLSCPMDLKNFPMDVQTCIMQLESFGYTMNDLIFEWQDEAPVQVAEGLTLPQFLLKEEKDLRYCTKHYNTGKFTCIEVRFHLERQMGYYLIQMYIPSLLIVILSWVSFWINMDAAPARVALGITTVLTMTTQSSGSRASLPKVSYVKAIDIWMAVCLLFVFSALLEYAAVNFVSRQHKELLRFRRKRKNKTEAFALEKFYRFSDMDDEVRESRFSFTAYGMGPCLQAKDGMTPKGPNHPVQVMPKSPDEMRKVFIDRAKKIDTISRACFPLAFLIFNIFYWVIYKILRHEDIHQQQD

SEQ ID NO: 2127 - protein, 454 aa, Artificial Sequence
  Synthetic polypeptide
GLLELRNPRPAWATWEVPSCHTSIPPGLYHACLASLSILVLLLLAMLVRRRQLWPDCVRGRPGLPSPVDFLAGDRPRAVPAAVFMVLLSSLCLLLPDEDALPFLTLASAPSQDGKTEAPRGAWKILGLFYYAALYYPLAACATAGHTAAHLLGSTLSWAHLGVQVWQRAECPQVPKIYKYYSLLASLPLLLGLGFLSLWYPVQLVRSFSRRTGAGSKGLQSSYSEEYLRNLLCRKKLGSRMAAVEDWLLLPRILVIKRDNYQLGTAGRPWPGLGHLGSCWPFSWAPWEGGGLPGLSGAVHHTPSFEDYRIPSPAEAGAFSYTDRDGHLPGGPAAAGGRGTHYPEGEGRGHHGCLLPAGRLWNRALRGQAGGGGAGEAPSVGSGSVLHLSLGLVLLTHLPGPDALTGDTQDQPSSSAPRSCPGLESLASESPSLPPSHILLDELQCLPDSLYLPW

SEQ ID NO: 2128 - protein, 454 aa, Artificial Sequence
  Synthetic polypeptide
DTGNKARNRCSLNRTQCTFRNFTSATQALTEWYILQATNIFAQVPQQELVEMSYPGEQMILACLFGAEPCNYRNFTSIFYPHYGNCYIFNWGMTEKALPSANPGTEFGLKLILDIGQEDYVPFLASTAGVRLMLHEQRSYPFIRDEGIYAMSGTETSIGVLVDKLQRMGEPYSPCTVNGSEVPVQNFYSDYNTTYSIQACLRSCFQDHMIRNCNCGHYLYPLPRGEKYCNNRDFPDWAHCYSDLQMSVAQRETCIGMCKESCNDTQYKMTISMADWPSEASEDWIFHVLSQERDQSTNITLSRKGIVKLNIYFQEFNYRTIEESAANNIVWLLSNLGGQFGFWMGGSVLCLIEFGEIIIDFVWITIIKLVALAKSLRQRRAQASYAGPPPTVAELVEAHTNFGFQPDTAPRSPNTGPYPSEQALPIPGTPPPNYDSLRLQPLDVIESDSEGDAI

SEQ ID NO: 2129 - protein, 454 aa, Artificial Sequence; identical to SEQ ID NO: 2128
  Synthetic polypeptide

SEQ ID NO: 2130 - protein, 453 aa, Artificial Sequence
  Synthetic polypeptide
VQQWLLHFLSLWLWNVRIDPSSLSFNMWKEIPIPFYLSVYFFDVMNPSEILKGEKPQVRERGPYVYREFRHKSNITFNNNDTVSFLEYRTFQFQPSKSHGSESDYIVMPNILVLGAAVMMENKPMTLKLIMTLAFTTLGERAFMNRTVGEIMWGYKDPLVNLINKYFPGMFPFKDKFGLFAELNNSDSGLFTVFTGVQNISRIHLVDKWNGLSKVDFWHSDQCNMINGTSGQMWPPFMTPESSLEFYSPEACRSMKLMYKESGVFEGIPTYRFVAPKTLFANGSIYPPNEGFCPCLESGIQNVSTCRFSAPLFLSHPHFLNADPVLAEAVTGLHPNQEAHSLFLDIHPVTGIPMNCSVKLQLSLYMKSVAGIGQTGKIEPVVLPLLWFAESGAMEGETLHTFYTQLVLMPKEKCYLFWSSSKKGSKDKEAIQAYSESLMTSAPKGSVLQEAKL

SEQ ID NO: 2131 - protein, 453 aa, Artificial Sequence
  Synthetic polypeptide
ICRLIRIPVGEFVSDALLVPDKCKFLHQERMDVCETHLHWHTVAKETCSEKSTNLHDYGMLLPCGIDKFRGVEFVCCPLAEESDNVDSADAEEDDSDVWWGGADTDYADGSEDKVVEVAEEEEVAEVEEEEADDDEDDEDGDEVEEEAEEPYEEATERTTSIATTTTTTTESVEEVVREVCSEQAETGPCRAMISRWYFDVTEGKCAPFFYGGCGGNRNNFDTEEYCMAVCGSAIPTTAASTPDAVDKYLETPGDENEHAHFQKAKERLEAKHRERMSQVMREWEEAERQAKNLPKADKKAVIQHFQEKVESLEQEAANERQQLVETHMARVEAMLNDRRRLALENYITALQAVPPRPRHVFNMLKKYVRAEQKDRQHTLKHFEHVRMVDPKKAAQIRSQVMTHLRVIYERMNQSLSLLYNVPAVAEEIQDEVGAVAHACNSSILGGQGGQMT

SEQ ID NO: 2132 - protein, 451 aa, Artificial Sequence
  Synthetic polypeptide
ATQKTGDFCISIRGCLSLLVTVQHTERYVTLFASIILKCDYTTSAQLQDVVVTWRFKSFCKDPIFDYYSASYQAALSLGQDPSNDCNDNQREVRIVAQRRGQNEPVLGVDYRQRKITIQNPLARHRYMKQAQALGPQMMGKPLYWGADRSSQVSSYPMHPLLQRDLSLPSSLPQMPMTQTTNQPPIANGVLEYLEKELRNLNLAQPLPPDLKGRFGHPCSMLSSLGSEVVERRIIHLPPLIRDLSSSRRTSDSLHQQWLTPIPSRPWDLREGRSHHHYPDFHQELQDRGPKSWALERRELDPSWSGRHRSSRLNGSPIHWSDRDSLSDVPSSSEARWRPSHPPFRSRCQERPRRPSPRESTQRHGRRRRHRSYSPPLPSGLSSWSSEEDKERQPQSWRAHRRGSHSPHWPEEKPPSYRSLDITPGKNSRKKGSVERRSEKDSSHSGRSVVI

SEQ ID NO: 2133 - protein, 451 aa, Artificial Sequence
  Synthetic polypeptide
PGAVAHTCNPSTLAGRAFLLSCADGINGTVNWKTRQANNFIISRKMAAGMKDVYSIFSKVHSDRNVYPSAGVLFVHVLEREYFKGEFPPYPKPGEISNDPITFNTNLMGYPDRPGWLRYIQRTPYSDGVLYGSPTAENVGKPTIIEITAYNRRTFETARHNLIINIMSAEDFPLPYQAEFFIKNMNVEEMLASEVLGDFLGAVKNVWQPERLNAINITSALDRGGRVPLPINDLKEGVYVMVGADVPFSSCLREVENPQNQLRCSQEMEPVITCDKKFRTQFYIDWCKISLVDKTKQVSTYQEVIRGEGILPDGGEYKPPSDSLKSRDYYTDFLITLAVPSAVALVLFLILAYIMCCRREGVEKRNMQTPDIQLVHHSAIQKSTKELRDMSKNREIAWPLSTLPVFHPVTGEIIPPLHTDNYDSTNMPLMQTQQNLPHQTQIPQQQTTGEC

SEQ ID NO: 2134 - protein, 448 aa, Artificial Sequence
  Synthetic polypeptide
SHMPNQKLDGLAKIRTAREAPSECVCPPGPPGRRGKPGRRGDPGPPGQSGRDGYPGPLGLDGKPGLPGPKGEKGAPGDFGPRGDQGQDGAAGPPGPPGPPGARGPPGDTGKDGPRGAQGPAGPKGEPGQDGEMGPKGPPGPKGEPGVPGKKGDDGTPSQPGPPGPKGEPGSMGPRGENGVDGAPGPKGEPGHRGTDGAAGPRGAPGLKGEQGDTVVIDYDGRILDALKGPPGPQGPPGPPGIPGAKGELGLPGAPGIDGEKGPKGQKGDPGEPGPAGLKGEAGEMGLSGLPGADGLKGEKGESASDSLQESLAQLIVEPGPPGPPGPPGPMGLQGIQGPKGLDGAKGEKGASGERGPSGLPGPVGPPGLIGLPGTKGEKGRPGEPGLDGFPGPRGEKGDRSERGEKGERGVPGRKGVKGQKGEPGPPGLDQPCPVGPDGLPVPGCWHK

SEQ ID NO: 2135 - protein, 448 aa, Artificial Sequence
  Synthetic polypeptide
SNFLLSVCLHTRQWFLEEGAIWFISKACLTGATAVLFAVFVRYNHKTDAALWHRSNHSNADNEFYFRYPSFQDVHAMVFVGFGFLMVFLQRYGFSSVGFTFLLAAFALQWSTLVQGFLHSFHGGHIHVGVESMINADFCAGAVLISFGAVLGKTGPTQLLLMALLEVVLFGINEFVLLHLLGVRDAGGSMTIHTFGAYFGLVLSRVLYRPQLEKSKHRQGSVYHSDLFAMIGTIFLWIFWPSFNAALTALGAGQHRTALNTYYSLAASTLGTFALSALVGEDGRLDMVHIQNAALAGGVVVGTSSEMMLTPFGALAAGFLAGTVSTLGYKFFTPILESKFKVQDTCGVHNLHGMPGVLGALLGVLVAGLATHEAYGDGLESVFPLIAEGQRSATSQAMHQLFGLFVTLMFASVGGGLGGLLLKLPFLDSPPRLPALRGPSSLAGAWRA

SEQ ID NO: 2136 - protein, 447 aa, Artificial Sequence
  Synthetic polypeptide
QENKLGAPIDSTLCFSQMPTSSVKDETNDNITIFTRILDGLLDGYDNRLRPGLGERITQVRTDIYVTSFGPVSDTEMEYTIDVFFRQSWKDERLRFKGPMQRLPLNNLLASKIWTPDTFFHNGKKSIAHNMTTPNKLLRLEDDGTLLYTMRLTISAECPMQLEDFPMDAHACPLKFGSYAYPNSEVVYVWTNGSTKSVVVAEDGSRLNQYHLMGQTVGTENISTSTGEYTIMTAHFHLKRKIGYFVIQTYLPCIMTVILSQVSFWLNRESVPARTVFGVTTVLTMTTLSISARNSLPKVAYATAMDWFIAVCYAFVFSALIEFATVNYFTKRGWAWDGKKALEAAKIKKKREVILNKSTNAFTTGKMSHPPNIPKEQTPAGTSNTTSVSVKPSEEKTSESKKTYNSISKIDKMSRIVFPVLFGTFNLVYWATYLNREPVIKGAASPK

SEQ ID NO: 2137 - protein, 447 aa, Artificial Sequence; identical to SEQ ID NO: 2136
  Synthetic polypeptide

SEQ ID NO: 2138 - protein, 447 aa, Artificial Sequence; identical to SEQ ID NO: 2136
  Synthetic polypeptide

SEQ ID NO: 2139 - protein, 446 aa, Artificial Sequence
  Synthetic polypeptide
AQDLEKVNGYVVNLFWAFDTHKQERRTLNFRGSILSHKVGNLTAHTSYEISAWAKTDLGDSPLAFEHVMTRGVRPPAPSLKAKAINQTAVECTWTGPRNVVYGIFYATSFLDLYRNPKSLTTSLHNKTVIVSKDEQYLFLVRVVVPYQGPSSDYVVVKMIPDSRLPPRHLHVVHTGKTSVVIKWESPYDSPDQDLLYAVAVKDLIRKTDRSYKVKSRNSTVEYTLNKLEPGGKYHIIVQLGNMSKDSSIKITTVSLSAPDALKIITENDHVLLFWKSLALKEKHFNESRGYEIHMFDSAMNITAYLGNTTDNFFKISNLKMGHNYTFTVQARCLFGNQICGEPAILLYDELGSGADASATQAARSTDVAAVVVPILFLILLSLGVGFAILYTKHRRLQSSFTAFANSHYSSRLGSAIFSSGDDLGEDDEDAPMITGFSDDVPMVIA

SEQ ID NO: 2140 - protein, 446 aa, Artificial Sequence; identical to SEQ ID NO: 2139
  Synthetic polypeptide

SEQ ID NO: 2141 - protein, 446 aa, Artificial Sequence; identical to SEQ ID NO: 2139
  Synthetic polypeptide

SEQ ID NO: 2142 - protein, 446 aa, Artificial Sequence; identical to SEQ ID NO: 2139
  Synthetic polypeptide

SEQ ID NO: 2143 - protein, 446 aa, Artificial Sequence; identical to SEQ ID NO: 2139
  Synthetic polypeptide

SEQ ID NO: 2144 - protein, 444 aa, Artificial Sequence
  Synthetic polypeptide
GKRLFYLQDTKSSNGTFINSQRLSRGSEESPPCEILSGDIIQFGVDVTENTRKVTHGCIVSTIKLFLPDGMEARLRSDVIHAPLPSPVDKVAANTPSMYSQELFQLSQYLQEALHREQMLEQKLATLQRLLAITQEASDTSWQALIDEDRLLSRLEVMGNQLQACSKNQTEDSLRKELIALQEDKHNYETTAKESLRRVLQEKIEVVRKLSEVERSLSNTEDECTHLKEMNERTQEELRELANKYNGAVNEIKDLSDKLKVAEGKQEEIQQKGQAEKKELQHKIDEMEEKEQELQAKIEALQADNDFTNERLTALQVRLEHLQEKTLKECSSLGIQVDDFLPKINGSTEKEKLIVEGHLTKAVEETKLSKENQTRAKESDFSDTLSPSKEKSSDDTTDAQMDEQDLNEPLAKVSLLKGTLTCFYDIVNQGIKSPFAIKSVLDIM

SEQ ID NO: 2145 - protein, 444 aa, Artificial Sequence
  Synthetic polypeptide
AGECNQNKSDCFYQTYSSGVDAVREWYRFHYINILSRLPETLPSLEEDTLGNFIFACRFNQVSCNQANYSHFHHPMYGNCYTFNDKNNSNLWMSSMPGINNGLSLMLRAEQNDFIPLLSTVTGARVMVHGQDEPAFMDDGGFNLRPGVETSISMRKETLDRLGGDYGDCTKNGSDVPVENLYPSKYTQQVCIHSCFQESMIKECGCAYIFYPRPQNVEYCDYRKHSSWGYCYYKLQVDFSSDHLGCFTKCRKPCSVTSYQLSAGYSRWPSVTSQEWVFQMLSRQNNYTVNNKRNGVAKVNIFFKELNYKTNSESPSVTMVTLLSNLGSQWSLWFGSSVLSVVEMAELVFDLLVIMFLMLLRRFRSRYWSPGRGGRGAQEVASTLASSPPSHFCPHPMSLSLSQPGPAPSPALTAPPPAYATLGPRPSPGGSAGASSSTCPLGGP

SEQ ID NO: 2146 - protein, 444 aa, Artificial Sequence; identical to SEQ ID NO: 2145
  Synthetic polypeptide

SEQ ID NO: 2147 - protein, 444 aa, Artificial Sequence; identical to SEQ ID NO: 2145
  Synthetic polypeptide

SEQ ID NO: 2148 - protein, 443 aa, Artificial Sequence
  Synthetic polypeptide
GSPENVRIDPSSLSFNMWKEIPIPFYLSVYFFDVMNPSEILKGEKPQVRERGPYVYREFRHKSNITFNNNDTVSFLEYRTFQFQPSKSHGSESDYIVMPNILVLGAAVMMENKPMTLKLIMTLAFTTLGERAFMNRTVGEIMWGYKDPLVNLINKYFPGMFPFKDKFGLFAELNNSDSGLFTVFTGVQNISRIHLVDKWNGLSKVDFWHSDQCNMINGTSGQMWPPFMTPESSLEFYSPEACRSMKLMYKESGVFEGIPTYRFVAPKTLFANGSIYPPNEGFCPCLESGIQNVSTCRFSAPLFLSHPHFLNADPVLAEAVTGLHPNQEAHSLFLDIHPVTGIPMNCSVKLQLSLYMKSVAGIGQTGKIEPVVLPLLWFAESGAMEGETLHTFYTQLVLMPKEKCYLFWSSSKKGSKDKEAIQAYSESLMTSAPKGSVLQEAKL

SEQ ID NO: 2149 - protein, 442 aa, Artificial Sequence
  Synthetic polypeptide
ARECKCPLGTGKGKKMDSAPDPRGGVQTCQPSFQASDLQKRKVWMEECALSSVLQTHLREDHEGTIRGVLGRLGGLTEESTRCVLQGHDLLLRSALRRLALRGNALATLTQMRLSGKKHLLQELREQRALEQGSSQCLDEHQWQLLRALEARVLEEASRLEEEAQQTRLQLQQRLLAEAQEVGQLLQQHMECAIGQALLVHARNAATKSRAKDRDDFKRTLMEAAVESVYVTSAGVSRLVQAYYQQIGRIMEDHEERKLQHLKTLQGERMENYKLRKKQELSNPSSGSRTAGGAHETSQAVHQRMLSQQKRFLAQFPVHQQMRLHAQQQQAGVMDLLEAQLETQLQEAEQNFISELAALARVPLAESKLLPAKRGLLEKPLRTKRKKPLPQERGDLGVPNNEDLASGDQTSGSLSSKRLSQQESEAGDSGNSKKMLKRRSNL

SEQ ID NO: 2150 - protein, 442 aa, Artificial Sequence; identical to SEQ ID NO: 2149
  Synthetic polypeptide

SEQ ID NO: 2151 - protein, 442 aa, Artificial Sequence
  Synthetic polypeptide
PGAVAHTCNPSTLAGRVYSIFSKVHSDRNVYPSAGVLFVHVLEREYFKGEFPPYPKPGEISNDPITFNTNLMGYPDRPGWLRYIQRTPYSDGVLYGSPTAENVGKPTIIEITAYNRRTFETARHNLIINIMSAEDFPLPYQAEFFIKNMNVEEMLASEVLGDFLGAVKNVWQPERLNAINITSALDRGGRVPLPINDLKEGVYVMVGADVPFSSCLREVENPQNQLRCSQEMEPVITCDKKFRTQFYIDWCKISLVDKTKQVSTYQEVIRGEGILPDGGEYKPPSDSLKSRDYYTDFLITLAVPSAVALVLFLILAYIMCCRREGVEKRNMQTPDIQLVHHSAIQKSTKELRDMSKNREIAWPLSTLPVFHPVTGEIIPPLHTDNYDSTNMPLMQTQQWSFAPVAQAGVQWSDLGSLQPPPPRNLPHQTQIPQQQTTGKWYP

SEQ ID NO: 2152 - protein, 442 aa, Artificial Sequence
  Synthetic polypeptide
VKYKTSCPSHLHSPCFNPGEVRGTVMSKLQILVDTGSSNFAVAGTPHSYIDTYFDTERSSTYRSKGFDVTVKYTQGSWTGFVGEDLVTIPKGFNTSFLVNIATIFESENFFLPGIKWNGILGLAYATLAKPSSSLETFFDSLVTQANIPNVFSMQMCGAGLPVAGSGTNGGSLVLGGIEPSLYKGDIWYTPIKEEWYYQIEILKLEIGGQSLNLDCREYNADKAIVDSGTTLLRLPQKVFDAVVEAVARASLIPEFSDGFWTGSQLACWTNSETPWSYFPKISIYLRDENSSRSFRITILPQLYIQPMMGAGLNYECYRFGISPSTNALVIGATVMEGFYVIFDRAQKRVGFAASPCAEIAGAAVSEISGPFSTEDVASNCVPAQSLSEPILWIVSYALMSVCGAILLVLIVLLLLPFRCQRRPRDPEVVNDESSLVRHRWK

SEQ ID NO: 2153 - protein, 442 aa, Artificial Sequence
  Synthetic polypeptide
TFGISPACTHSILPLCEEGFSFAFHHDCSQGQFPLTQNVTVVEGGTAILTCRVDQNDNTSLQWSNPAQQTLYFDDKKALRDNRIELVRASWHELSISVSDVSLSDEGQYTCSLFTMPVKTSKAYLTVLGVPEKPQISGFSSPVMEGDLMQLTCKTSGSKPAADIRWFKNDKEIKDVKYLKEEDANRKTFTVSSTLDFRVDRSDDGVAVICRVDHESLNATPQVAMQVLEIHYTPSVKIIPSTPFPQEGQPLILTCESKGKPLPEPVLWTKDGGELPDPDRMVVSGRELNILFLNKTDNGTYRCEATNTIGQSSAEYVLIVHDVPNTLLPTTIIPSLTTATVTTTVAITTSPTTSATTSSIRDPNALAGQNGPDHALIGGIVAVVVFVTLCSIFLLGRYLARHKGTYLTNEAKGAEDAPDADTAIINAEGSQVNAEEKKEYFI

SEQ ID NO: 2154 - protein, 442 aa, Artificial Sequence; identical to SEQ ID NO: 2153
  Synthetic polypeptide

SEQ ID NO: 2155 - protein, 441 aa, Artificial Sequence
  Synthetic polypeptide
FWGPVWDFSKAIRVMVDLCNSTKGICLTGPSGPPGPPGAGGLPGHNGLDGQPGPQGPKGEKGANGKRGKMGIPGAAGNPGERGEKGDHGELGLQGNEGPPGQKGEKGDKGDVSNDVLLAGAKGDQGPPGPPGPPGPPGPPGPPGSRRAKGPRQPSMFNGQCPGETCAIPNDDTLVGKADEKASEHHSPQAESMITSIGNPVQVLKVTETFGTWIRESANKSDDRIWVTEHFSGIMVKEFKDQPSLLNGSYTFIHLPYYFHGCGHVVYNNSLYYHKGGSNTLVRFEFGQETSQTLKLENALYFDRKYLFANSKTYFNLAVDEKGLWIIYASSVDGSSILVAQLDERTFSVVQHVNTTYPKSKAGNAFIARGILYVTDTKDMRVTFAFDLLGGKQINANFDLRTSQSVLAMLAYNMRDQHLYSWEDGHLMLYPVQFLSTTLNQ

SEQ ID NO: 2156 - protein, 441 aa, Artificial Sequence
  Synthetic polypeptide
SLTGFHVIPTISSIVPESCLLIVVGLLVGGLIKGVGETPPFLQSDVFFLFLLPPIILDAGYFLPLRQFTENLGTILIFAVVGTLWNAFFLGGLMYAVCLVGGEQINNIGLLDNLLFGSIISAVDPVAVLAVFEEIHINELLHILVFGESLLNDAVTVVLYHLFEEFANYEHVGIVDIFLGFLSFFVVALGGVLVGVVYGVIAAFTSRFTSHIRVIEPLFVFLYSYMAYLSAELFHLSGIMALIASGVVMRPYVEANISHKSHTTIKYFLKMWSSVSETLIFIFLGVSTVAGSHHWNWTFVISTLLFCLIARVLGVLGLTWFINKFRIVKLTPKDQFIIAYGGLRGAIAFSLGYLLDKKHFPMCDLFLTAIITVIFFTVFVQVLGQGRAGPCLGDPHRLFPWKERKACDLKCDSSPSSTTNLLCDLGRATPPFWASVSSIVK

SEQ ID NO: 2157 - protein, 440 aa, Artificial Sequence
  Synthetic polypeptide
GRFQDGRIRTAPVHSSQHERRRRRMISAFPTETLDGHMVVRSHARVSSLTLKSIQYTDAGEYICTASNTIGQDSQSMYLEVQYAPKLQGPVAVYTWEGNQVNITCEVFAYPSATISWFRDGQLLPSSNYSNIKIYNTPSASYLEVTPDSENDFGNYNCTAVNRIGQESLEFILVQADTPSSPSIDQVEPYSSTAQVQFDEPEATGGVPILKYKAEWRAVGEEVWHSKWYDAKEASMEGIVTIVGLKPETTYAVRLAALNGKGLGEISAASEFKTQPVHSPPPPASASSSTPVPLSPPDTTWPLPALATTEPAKGEPSAPKLEGQMGEDGNSIKVNLIKQDDGGSPIRHYLVRYRALSSEWKPEIRLPSGSDHVMLKSLDWNAEYEVYVVAENQQGKSKAAHFVFRTSAQPTAIPATLGGNSASYTFVSLLFSAVTLLLLC

SEQ ID NO: 2158 - protein, 440 aa, Artificial Sequence
  Synthetic polypeptide
KTVERGNLLLGNTFSLVATKETDSARSRSAPMSPSDFLDKLMGRTSGYDARIRPNFKGPPVNVTCNIFINSFGSIAETTMDYRVNIFLRQKWNDPRLAYSEYPDDSLDLDPSMLDSIWKPDLFFANEKGANFHEVTTDNKLLRIFKNGNVLYSIRLTLTLSCPMDLKNFPMDVQTCIMQLESFGYTMNDLIFEWQDEAPVQVAEGLTLPQFLLKEEKDLRYCTKHYNTGKFTCIEVRFHLERQMGYYLIQMYIPSLLIVILSWVSFWINMDAAPARVALGITTVLTMTTQSSGSRASLPKVSYVKAIDIWMAVCLLFVFSALLEYAAVNFVSRQHKELLRFRRKRKNKDDEVRESRFSFTAYGMGPCLQAKDGMTPKGPNHPVQVMPKSPDEMRKVFIDRAKKIDTISRACFPLAFLIFNIFYWVIYKILRHEDIHQQQD

SEQ ID NO: 2159 - protein, 440 aa, Artificial Sequence
  Synthetic polypeptide
ICIGSSIVTKLECQDALETAARAEGLSLDASMHSQLRILDEEHPKGKYHHGLSALKPIRTTSKHQHPVDNAGLFSCMTFSWLSSLARVAHKKGELSMEDVWSLSKHESSDVNCRRLERLWQEELNEVGPDAASLRRVVWIFCRTRLILSIVCLMITQLAGFSGPAFMVKHLLEYTQATESNLQYSLLLVLGLLLTEIVRSWSLALTWALNYRTGVRLRGAILTMAFKKILKLKNIKEKSLGELINICSNDGQRMFEAAAVGSLLAGGPVVAILGMIYNVIILGPTGFLGSAVFILFYPAMMFASRLTAYFRRKCVAATDERVQKMNEVLTYIKFIKMYAWVKAFSQSVQKIREEERRILEKAGYFQSITVGVAPIVVVIASVVTFSVHMTLGFDLTAAQAFTVVTVFNSMTFALKVTPFSVKSLSEASVAVDRFKLPSTV

SEQ ID NO: 2160 - protein, 433 aa, Artificial Sequence
  Synthetic polypeptide
TRAGCVFQTPSHPQYPARVENMSMRLEEINERETFMKTSLQTVDLRLAQLEELSNRMVNALENLAGIDRSDLIQARSRASSECEATYLLRQSSINSADGYSLYRYHFNGEELLFEDTSLSTSPGTGVRKKTCSFRIKEEKDVKTHLVPECQNSLHLSLGTSTSATPDGSHLAVDDLKNAEESKLGPDIGISKEDDERQTDSKKEETISPSLNKTDVIHGQDKSDVQNTQLTVETTNIEGTISYPLEETKITRYFPDETINACKTMKSRSFVYSRGRKLVGGVNQDVEYSSITDQQLTTEWQCQVQKITRSHSTDIPYIVSEAAVQAEHKEQFADMQDEHHVAEAIPRIPRLSLTITDRNGMENLLSVKPDQTLGFPSLRSKSLHGHPRNVKSIQGKLDRSGHASSVSSLVIVSGMTAEEKKVKKEKASTETEC

SEQ ID NO: 2161 - protein, 433 aa, Artificial Sequence; identical to SEQ ID NO: 2160
  Synthetic polypeptide

SEQ ID NO: 2162 - protein, 433 aa, Artificial Sequence; identical to SEQ ID NO: 2160
  Synthetic polypeptide

SEQ ID NO: 2163 - protein, 433 aa, Artificial Sequence; identical to SEQ ID NO: 2160
  Synthetic polypeptide

SEQ ID NO: 2164 - protein, 433 aa, Artificial Sequence
  Synthetic polypeptide
FNPLSVKCHLDSLWDLGIRGPETKMLLPYCLLTKLGRRVVLWATSSSMFLFGIAAAFAVDYYTFMAARFFLAMVASGYLVVGFVYVMEFIGMKSRTWASVHLHSFFAVGTLLVALTGYLVRTWWLYQMILSTVTVPFILCCWVLPETPFWLLSEGRYEEAQKIVDIMAKWNRASSCKLSELLSLDLQGPVSNSPTEVQKHNLSYLFYNWSITKRTLTVWLIWFTGSLGFYSFSLNSVNLGGNEYLNLFLLGVVEIPAYTFVCIAMDKVGRRTVLAYSLFCSALACGVVMVIPQKHYILGVVTAMVGKFAIGAAFGLIYLYTAELYPTIVRSLAVGSGSMVCRLASILAPFSVDLSSIWIFIPQLFVGTMALLSGVLTLKLPETLGKRLATTWEEAAKLESENESKSSKLLLTTNNSGLEKTEAITPRDSGLGE

SEQ ID NO: 2165 - protein, 433 aa, Artificial Sequence; identical to SEQ ID NO: 2164
  Synthetic polypeptide

SEQ ID NO: 2166 - protein, 432 aa, Artificial Sequence
  Synthetic polypeptide
ELGPGLAVGLDPQGYGNPDFCWLSLQDTLIWSFAGPIGAVIIINTVTSVLSAKVSCQRKHHYYGKKGIVSLLRTAFLLLLLISATWLLGLLAVNRDALSFHYLFAIFSGLQGPFVLLFHCVLNQEVRKHLKGVLGGRKLHLEDSATTRATLLTRSLNCNTTFGDGPDMLRTDLGESTASLDSIVRDEGIQKLGVSSGLVRGSHGEPDASLMPRSCKDPPGHDSDSDSELSLDEQSSSYASSHSSDSEDDGVGAEEKWDPARGAVHSTPKGDAVANHVPAGWPDQSLAESDSEDPSGKPRLKVETKVSVELHREEQGSHRGEYPPDQESGGAARLASSQPPEQRKGILKNKVTYPPPLTLTEQTLKGRLREKLADCEQSPTSSRTSSLGSGGPDCAITVKSPGREPGRDHLNGVAMNVRTGSAQADGSDSEKP

SEQ ID NO: 2167 - protein, 431 aa, Artificial Sequence
  Synthetic polypeptide
PGAVAHTCNPSTLAGRVYSIFSKVHSDRNVYPSAGVLFVHVLEREYFKGEFPPYPKPGEISNDPITFNTNLMGYPDRPGWLRYIQRTPYSDGVLYGSPTAENVGKPTIIEITAYNRRTFETARHNLIINIMSAEDFPLPYQAEFFIKNMNVEEMLASEVLGDFLGAVKNVWQPERLNAINITSALDRGGRVPLPINDLKEGVYVMVGADVPFSSCLREVENPQNQLRCSQEMEPVITCDKKFRTQFYIDWCKISLVDKTKQVSTYQEVIRGEGILPDGGEYKPPSDSLKSRDYYTDFLITLAVPSAVALVLFLILAYIMCCRREGVIQLVHHSAIQKSTKELRDMSKNREIAWPLSTLPVFHPVTGEIIPPLHTDNYDSTNMPLMQTQQNLPHQTQIPQQQTTGDFRLTTFQRFEVNGIPEERKLTEAMNL

SEQ ID NO: 2168 - protein, 431 aa, Artificial Sequence
  Synthetic polypeptide
GGRHCHALMPKEPVAVSSHVVTISSLLPATAYNCSVTSFSHDSPSVPTFIAVSTMVTEMNPNVVVISVLAILSTLLIGLLLVTLIILRKKHLQMARECGAGTFVNFASLERDGKLPYNWSKNGLKKRKLTNPVQLDDFDAYIKDMAKDSDYKFSLQFEELKLIGLDIPHFAADLPLNRCKNRYTNILPYDFSRVRLVSMNEEEGADYINANYIPGYNSPQEYIATQGPLPETRNDFWKMVLQQKSQIIVMLTQCNEKRRVKCDHYWPFTEEPIAYGDITVEMISEEEQDDWACRHFRINYADEMQDVMHFNYTAWPDHGVPTANAAESILQFVHMVRQQATKSKGPMIIHCSAGVGRTGTFIALDRLLQHIRDHEFVDILGLVSEMRSYRMSMVQTEEQYIFIHQCVQLMWMKKKQQFCISDVIYENVSKS

SEQ ID NO: 2169 - protein, 431 aa, Artificial Sequence
  Synthetic polypeptide
TPDLPVPWSWTSSLQNLSRPRSSPDDLKALTRNVNRLNESFRDLQLRLLQAPLQADLTEQVWKVQDALQNQSDSLLALAGAVQRLEGALWGLQAQAVQTEQAVALLRDRTGQQSDTAQLELYQLQVESNSSQLLLRRHAGLLDGLARRVGILGEELADVGGVLRGLNHSLSYDVALHRTRLQDLRVLVSNASEDTRRLRLAHVGMELQLKQELAMLNAVTEDLRLKDWEHSIALRNISLAKGPPGPKGDQGDEGKEGRPGIPGLPGLRGLPGERGTPGLPGPKGDDGKLGATGPMGMRGFKGDRGPKGEKGEKGDRAGDASGVEAPMMIRLVNGSGPHEGRVEVYHDRRWGTVCDDGWDKKDGDVVCRMLGFRGVEEVYRTARFGQGTGRIWMDDVACKGTEETIFRCSFSKWGVTNCGHAEDASVTCNRH

SEQ ID NO: 2170 - protein, 431 aa, Artificial Sequence
  Synthetic polypeptide
WLHNVVNILEAGALFPSKMIKMDERNQILTAYLWIRQIWHDAYLTWDRDQYDGLDSIRIPSDLVWRPDIVLYNKADDESSEPVNTNVVLRYDGLITWDAPAITKSSCVVDVTYFPFDNQQCNLTFGSWTYNGNQVDIFNALDSGDLSDFIEDVEWEVHGMPAVKNVISYGCCSEPYPDVTFTLLLKRRSSFYIVNLLIPCVLISFLAPLSFYLPAASGEKVSLGVTILLAMTVFQLMVAEIMPASENVPLIGKYYIATMALITASTALTIMVMNIHFCGAEARPVPHWARVVILKYMSRVLFVYDVGESCLSPHHSRERDHLTKVYSKLPESNLKAARNKDLSRKKDMNKRLKNDLGCQGKNPQEAESYCAQYKVLTRNIEYIAKCLKDHKATNSKGSEWKKVAKVIDRFFMWIFFIMVFVMTILIIARAD

SEQ ID NO: 2171 - protein, 430 aa, Artificial Sequence
  Synthetic polypeptide
CLPLPPDDVKPLRKPRIPMETFRKVGIPIIIALLSLASIIIVVVLIKVILDKYYFLCGQPLHFIPRKQLCDGELDCPLGEDEEHCVKSFPEGPAVAVRLSKDRSTLQVLDSATGNWFSACFDNFTEALAETACRQMGYSSKPTFRAVEIGPDQDLDVVEITENSQELRMRNSSGPCLSGSLVSLHCLACGKSLKTPRVVGVEEASVDSWPWQVSIQYDKQHVCGGSILDPHWVLTAAHCFRKHTDVFNWKVRAGSDKLGSFPSLAVAKIIIIEFNPMYPKDNDIALMKLQFPLTFSGTVRPICLPFFDEELTPATPLWIIGWGFTKQNGGKMSDILLQASVQVIDSTRCNADDAYQGEVTEKMMCAGIPEGGVDTCQGDSGGPLMYQSDQWHVVGIVSWGYGCGGPSTPGVYTKVSAYLNWIYNVWKAEL

SEQ ID NO: 2172 - protein, 430 aa, Artificial Sequence; identical to SEQ ID NO: 2171
  Synthetic polypeptide

SEQ ID NO: 2173 - protein, 430 aa, Artificial Sequence
  Synthetic polypeptide
IEVSASWFGTHAKTHQLQILVDTGSSNFAVAGTPHSYIDTYFDTERSSTYRSKGFDVTVKYTQGSWTGFVGEDLVTIPKGFNTSFLVNIATIFESENFFLPGIKWNGILGLAYATLAKPSSSLETFFDSLVTQANIPNVFSMQMCGAGLPVAGSGTNGGSLVLGGIEPSLYKGDIWYTPIKEEWYYQIEILKLEIGGQSLNLDCREYNADKAIVDSGTTLLRLPQKVFDAVVEAVARASLIPEFSDGFWTGSQLACWTNSETPWSYFPKISIYLRDENSSRSFRITILPQLYIQPMMGAGLNYECYRFGISPSTNALVIGATVMEGFYVIFDRAQKRVGFAASPCAEIAGAAVSEISGPFSTEDVASNCVPAQSLSEPILWIVSYALMSVCGAILLVLIVLLLLPFRCQRRPRDPEVVNDESSLVRHRWK

SEQ ID NO: 2174 - protein, 430 aa, Artificial Sequence
  Synthetic polypeptide
ADGIGKGTLESGQNAVAQQVLTLLCIRKHTLLANNGFAISAALLMACSLQAGAFEMLIVGRFIMGIDGGVALSVLPMYLSEISPKEIRGSLGQVTAIFICIGVFTGQLLGLPELLGKESTWPYLFGVIVVPAVVQLLSLPFLPDSPRYLLLEKHNEARAVKAFQTFLGKADVSQEVEEVLAESRVQRSIRLVSVLELLRAPYVRWQVVTVIVTMACYQLCGLNAIWFYTNSIFGKAGIPPAKIPYVTLSTGGIETLAAVFSGLVIEHLGRRPLLIGGFGLMGLFFGTLTITLTLQDHAPWVPYLSIVGILAIIASFCSGPGGIPFILTGEFFQQSQRPAAFIIAGTVNWLSNFAVGLLFPFIQKSLDTYCFLVFATICITGAIYLYFVLPETKNRTYAEISQAFSKRNKAYPPEEKIDSAVTDGKINGRP

SEQ ID NO: 2175 - protein, 430 aa, Artificial Sequence; identical to SEQ ID NO: 2174
  Synthetic polypeptide

SEQ ID NO: 2176 - protein, 430 aa, Artificial Sequence; identical to SEQ ID NO: 2174
  Synthetic polypeptide

SEQ ID NO: 2177 - protein, 430 aa, Artificial Sequence
  Synthetic polypeptide
GQEFQTSLGNIGRPSLYKKVEKLARTFLKAFPLMGETQERERVLTHFSRRYCQCNPDDSTSEDGIHTLTCALMLLNTDLHGHNIGKKMSCQQFIANLDQLNDGQDFAKDLLKTLYNSIKNEKLEWAIDEDELRKSLSELVDDKFGTGTKKVTRILDGGNPFLDVPQALSATTYKHGVLTRKTHADMDGKRTPRGRRGWKKFYAVLKGTILYLQKDEYRPDKALSEGDLKNAIRVHHALATRASDYSKKSNVLKLKTADWRVFLFQAPSKEEMLSWILRINLVAAIFSAPAFPAAVSSMKKFCRPLLPSCTTRLCQEEQLRSHENKLRQLTAELAEHRCHPVERGIKSKEAEEYRLKEHYLTFEKSRYETYIHLLAMKIKVGSDDLERIEARLATLEGDDPSLRKTHSSPALSQGHVTGSKTTKDATGPDT

SEQ ID NO: 2178 - protein, 429 aa, Artificial Sequence
  Synthetic polypeptide
GQVQWLTPVIPALWEAEAGGSPEATFSCTCEEQYVGTFCEEYDACQRKPCQNNASCIDANEKQDGSNFTCVCLPGYTGELCQSKIDYCILDPCRNGATCISSLSGFTCQCPEGYFGSACEEKVDPCASSPCQNNGTCYVDGVHFTCNCSPGFTGPTCAQLIDFCALSPCAHGTCRSVGTSYKCLCDPGYHGLYCEEEYNECLSAPCLNAATCRDLVNGYECVCLAEYKGTHCELYKDPCANVSCLNGATCDSDGLNGTCICAPGFTGEECDIDINECDSNPCHHGGSCLDQPNGYNCHCPHGWVGANCEIHLQWKSGHMAESLTNMPRHSLYIIIGALCVAFILMLIILIVGICRISRIEYQGSSRPAYEEFYNCRSIDSEFSNAIASIRHARFGKKSRPAMYDVSPIAYEDYSPDDKPLVTLIKTKDL

SEQ ID NO: 2179 - protein, 428 aa, Artificial Sequence
  Synthetic polypeptide
IEVSASWFGTHAKTHQILVDTGSSNFAVAGTPHSYIDTYFDTERSSTYRSKGFDVTVKYTQGSWTGFVGEDLVTIPKGFNTSFLVNIATIFESENFFLPGIKWNGILGLAYATLAKPSSSLETFFDSLVTQANIPNVFSMQMCGAGLPVAGSGTNGGSLVLGGIEPSLYKGDIWYTPIKEEWYYQIEILKLEIGGQSLNLDCREYNADKAIVDSGTTLLRLPQKVFDAVVEAVARASLIPEFSDGFWTGSQLACWTNSETPWSYFPKISIYLRDENSSRSFRITILPQLYIQPMMGAGLNYECYRFGISPSTNALVIGATVMEGFYVIFDRAQKRVGFAASPCAEIAGAAVSEISGPFSTEDVASNCVPAQSLSEPILWIVSYALMSVCGAILLVLIVLLLLPFRCQRRPRDPEVVNDESSLVRHRWK

SEQ ID NO: 2180 - protein, 426 aa, Artificial Sequence
  Synthetic polypeptide
YRAQHIGPLTTQYLWHRFSADLGYNGTRQRGGCSNRSADPTMQEVETLTSHWTLYMNVGGFLVGLFSSTLLGAWSDSVGRRPLLVLASLGLLLQALVSVFVVQLQLHVGYFVLGRILCALLGDFGGLLAASFASVADVSSSRSRTFRMALLEASIGVAGMLASLLGGHWLRAQGYANPFWLALALLIAMTLYAAFCFGETLKEPKSTRLFTFRHHRSIVQLYVAPAPEKSRKHLALYSLAIFVVITVHFGAQDILTLYELSTPLCWDSKLIGYGSAAQHLPYLTSLLALKLLQYCLADAWVAEIGLAFNILGMVVFAFATITPLMFTGYGLLFLSLVITPVIRAKLSKLVRETEQGALFSAVACVNSLAMLTASGIFNSLYPATLNFMKGFPFLLGAGLLLIPAVLIGMLEKADPHLEFQQFPQSP

SEQ ID NO: 2181 - protein, 425 aa, Artificial Sequence
  Synthetic polypeptide
CLPLPPDDVKPLRKPRIPMETFRKVGIPIIIALLSLASIIIVVVLIKVILDKYYFLCGQPLHFIPRKQLCDGELDCPLGEDEEHCVKSFPEGPAVAVRLSKDRSTLQVLDSATGNWFSACFDNFTEALAETACRQMGYSRAVEIGPDQDLDVVEITENSQELRMRNSSGPCLSGSLVSLHCLACGKSLKTPRVVGVEEASVDSWPWQVSIQYDKQHVCGGSILDPHWVLTAAHCFRKHTDVFNWKVRAGSDKLGSFPSLAVAKIIIIEFNPMYPKDNDIALMKLQFPLTFSGTVRPICLPFFDEELTPATPLWIIGWGFTKQNGGKMSDILLQASVQVIDSTRCNADDAYQGEVTEKMMCAGIPEGGVDTCQGDSGGPLMYQSDQWHVVGIVSWGYGCGGPSTPGVYTKVSAYLNWIYNVWKAEL

SEQ ID NO: 2182 - protein, 422 aa, Artificial Sequence
  Synthetic polypeptide
RKKRTKEELKSPPPVILIGNSPSDESEERERDPKVLTFPEYITSLSDSGTKHMAAGVRMECHSKGRCPSSCPLCHVTSSPDTPAEPVLLEVTKAAPIYELVTNNQTQRLLQEATMSSLWCSGTGDVIEDWCRCDSTAFGADGLPTCAPLPQPVLRLSTVHEPSSTLVVLEWEHSEPPIGVQIVDYLLRQEKVTDRMDHSKVETETVLSFVDDIISGAKSPCAMPSQVPDKQLTTISLIIRCLEPDTIYMFTLWGVDNTGRRSRPSDVIVKTPCPVVDDVKAQEIADKIYNLFNGYTSGKEQQTAYNTLLDLGSPTLHRVLYHYNQHYESFGEFTWRCEDELGPRKAGLILSQLGDLSSWCNGLLQEPKISLRRSSLKYLGCRYSEIKPYGLDWAELSRDLRKTCEEQTLSIPYNDYGDSKEI

SEQ ID NO: 2183 - protein, 422 aa, Artificial Sequence; identical to SEQ ID NO: 2182
  Synthetic polypeptide

SEQ ID NO: 2184 - protein, 422 aa, Artificial Sequence
  Synthetic polypeptide
GLSTMQNCSQGQFPLTQNVTVVEGGTAILTCRVDQNDNTSLQWSNPAQQTLYFDDKKALRDNRIELVRASWHELSISVSDVSLSDEGQYTCSLFTMPVKTSKAYLTVLGVPEKPQISGFSSPVMEGDLMQLTCKTSGSKPAADIRWFKNDKEIKDVKYLKEEDANRKTFTVSSTLDFRVDRSDDGVAVICRVDHESLNATPQVAMQVLEIHYTPSVKIIPSTPFPQEGQPLILTCESKGKPLPEPVLWTKDGGELPDPDRMVVSGRELNILFLNKTDNGTYRCEATNTIGQSSAEYVLIVHDVPNTLLPTTIIPSLTTATVTTTVAITTSPTTSATTSSIRDPNALAGQNGPDHALIGGIVAVVVFVTLCSIFLLGRYLARHKGTYLTNEAKGAEDAPDADTAIINAEGSQVNAEEKKEYFI

SEQ ID NO: 2185 - protein, 422 aa, Artificial Sequence; identical to SEQ ID NO: 2184
  Synthetic polypeptide

SEQ ID NO: 2186 - protein, 421 aa, Artificial Sequence
  Synthetic polypeptide
IVESDRLAFCLSPMGLGYYAVLYPMVYPMKITGNRAVMALVYIWLHSLIGCLPPLFGWSSVEFDEFKWMCVAAWHREPGYTAFWQIWCALFPFLVMLVCYGFIFRVARVKARKVHCGTVVIVEEDAQRTGRKNSSTSTSSSGSRRNAFQGVVYSANQCKALITILVVLGAFMVTWGPYMVVIASEALWGKSSVSPSLETWATWLSFASAVCHPLIYGLWNKTVRKELLGMCFGDRYYREPFVQRQRTSRLFSISNRITDLGLSPHLTALMAGGQPLGHSSSTGDTGFSCSQDSGTDMMLLEDYTSDDNPPSHCTCPPKRRSSVTFEDEVEQIKEAAKNSILHVKAEVHKSLDSYAASLAKAIEAEAKINLFGEEALPGVLVTARTVPGGGFGGRRGSRTLVSQRLQLQSIEEGDVLAAEQR

SEQ ID NO: 2187 - protein, 421 aa, Artificial Sequence; identical to SEQ ID NO: 2186
  Synthetic polypeptide

SEQ ID NO: 2188 - protein, 421 aa, Artificial Sequence; identical to SEQ ID NO: 2186
  Synthetic polypeptide

SEQ ID NO: 2189 - protein, 421 aa, Artificial Sequence; identical to SEQ ID NO: 2186
  Synthetic polypeptide

SEQ ID NO: 2190 - protein, 421 aa, Artificial Sequence; identical to SEQ ID NO: 2186
  Synthetic polypeptide

SEQ ID NO: 2191 - protein, 421 aa, Artificial Sequence; identical to SEQ ID NO: 2186
  Synthetic polypeptide

SEQ ID NO: 2192 - protein, 421 aa, Artificial Sequence; identical to SEQ ID NO: 2186
  Synthetic polypeptide

SEQ ID NO: 2193 - protein, 421 aa, Artificial Sequence
  Synthetic polypeptide
LQCCLHIGDAPILVGNPFTCSCDIMWIKTLQEAKSSPDTQDLYCLNESSKNIPLANLQIPNCGLPSANLAAPNLTVEEGKSITLSCSVAGDPVPNMYWDVGNLVSKHMNETSHTQGSLRITNISSDDSGKQISCVAENLVGEDQDSVNLTVHFAPTITFLESPTSDHHWCIPFTVKGNPKPALQWFYNGAILNESKYICTKIHVTNHTEYHGCLQLDNPTHMNNGDYTLIAKNEYGKDEKQISAHFMGWPGIDDGANPNYPDVIYEDYGTAANDIGDTTNRSNEIPSTDVTDKTGREHLSVYAVVVIASVVGFCLLVMLFLLKLARHSKFGMKDFSWFGFGKVKSRQGVGPASVISNDDDSASPLHHISNGSNTPSSSEGGPDAVIIGMTKIPVIENPQYFGITNSQLKPDTWPRGSPKTA

SEQ ID NO: 2194 - protein, 419 aa, Artificial Sequence
  Synthetic polypeptide
SSFPNPSSFKVPVSVLAQRHTSQTAGWPPCTFIRRSSTYRSKGFDVTVKYTQGSWTGFVGEDLVTIPKGFNTSFLVNIATIFESENFFLPGIKWNGILGLAYATLAKPSSSLETFFDSLVTQANIPNVFSMQMCGAGLPVAGSGTNGGSLVLGGIEPSLYKGDIWYTPIKEEWYYQIEILKLEIGGQSLNLDCREYNADKAIVDSGTTLLRLPQKVFDAVVEAVARASLIPEFSDGFWTGSQLACWTNSETPWSYFPKISIYLRDENSSRSFRITILPQLYIQPMMGAGLNYECYRFGISPSTNALVIGATVMEGFYVIFDRAQKRVGFAASPCAEIAGAAVSEISGPFSTEDVASNCVPAQSLSEPILWIVSYALMSVCGAILLVLIVLLLLPFRCQRRPRDPEVVNDESSLVRHRWK

SEQ ID NO: 2195 - protein, 419 aa, Artificial Sequence
  Synthetic polypeptide
TYQALSNQLQGCSLYLLCSFPRGQHDHLSVPSLCSARYGIALVLHFCNFTTIAQNVIMNITMVAMVNSTSPQSQLNDSSEVLPVDSFGGLSKAPKSLPAKSSILGGQFAIWEKWGPPQERSRLCSIALSGMLLGCFTAILIGGFISETLGWPFVFYIFGGVGCVCCLLWFVVIYDDPVSYPWISTSEKEYIISSLKQQVGSSKQPLPIKAMLRSLPIWSICLGCFSHQWLVSTMVVYIPTYISSVYHVNIRDNGLLSALPFIVAWVIGMVGGYLADFLLTKKFRLITVRKIATILGSLPSSALIVSLPYLNSGYITATALLTLSCGLSTLCQSGIYINVLDIAPRYSSFLMGASRGFSSIAPVIVPTVSGFLLSQDPEFGWRNVFFLLFAVNLLGLLFYLIFGEADVQEWAKERKLTRL

SEQ ID NO: 2196 - protein, 419 aa, Artificial Sequence; identical to SEQ ID NO: 2195
  Synthetic polypeptide

SEQ ID NO: 2197 - protein, 418 aa, Artificial Sequence
  Synthetic polypeptide
LSHLLQVIMVTGDHPITAKAIAASVGIISEGSETVEDIAARLRVPVDQVNRKDARACVINGMQLKDMDPSELVEALRTHPEMVFARTSPQQKLVIVESCQRLGAIVAVTGDGVNDSPALKKADIGVAMGIAGSDAAKNAADMILLDDNFASIVTGVEQGRLIFDNLKKSIAYTLTKNIPELTPYLIYITVSVPLPLGCITILFIELCTDIFPSVSLAYEKAESDIMHLRPRNPKRDRLVNEPLAAYSYFQIGAIQSFAGFTDYFTAMAQEGWFPLLCVGLRAQWEDHHLQDLQDSYGQEWTFGQRLYQQYTCYTVFFISIEVCQIADVLIRKTRRLSAFQQGFFRNKILVIAIVFQVCIGCFLCYCPGMPNIFNFMPIRFQWWLVPLPYGILIFVYDEIRKLGVRCCPGSWWDQELYY

SEQ ID NO: 2198 - protein, 418 aa, Artificial Sequence
  Synthetic polypeptide
DTGNKARNRCSLNRTQCTFRNFTSATQALTEWYILQATNIFAQVPQQELVEMSYPGEQMILACLFGAEPCNYRNFTSIFYPHYGNCYIFNWGMTEKALPSANPGTEFGLKLILDIGQEDYVPFLASTAGVRLMLHEQRSYPFIRDEGIYAMSGTETSIGVLVACLRSCFQDHMIRNCNCGHYLYPLPRGEKYCNNRDFPDWAHCYSDLQMSVAQRETCIGMCKESCNDTQYKMTISMADWPSEASEDWIFHVLSQERDQSTNITLSRKGIVKLNIYFQEFNYRTIEESAANNIVWLLSNLGGQFGFWMGGSVLCLIEFGEIIIDFVWITIIKLVALAKSLRQRRAQASYAGPPPTVAELVEAHTNFGFQPDTAPRSPNTGPYPSEQALPIPGTPPPNYDSLRLQPLDVIESDSEGDAI

SEQ ID NO: 2199 - protein, 417 aa, Artificial Sequence
  Synthetic polypeptide
AGHGGSCLQSQHFGRPRGADHEVKRSRPSWPTWSSTYRSKGFDVTVKYTQGSWTGFVGEDLVTIPKGFNTSFLVNIATIFESENFFLPGIKWNGILGLAYATLAKPSSSLETFFDSLVTQANIPNVFSMQMCGAGLPVAGSGTNGGSLVLGGIEPSLYKGDIWYTPIKEEWYYQIEILKLEIGGQSLNLDCREYNADKAIVDSGTTLLRLPQKVFDAVVEAVARASLIPEFSDGFWTGSQLACWTNSETPWSYFPKISIYLRDENSSRSFRITILPQLYIQPMMGAGLNYECYRFGISPSTNALVIGATVMEGFYVIFDRAQKRVGFAASPCAEIAGAAVSEISGPFSTEDVASNCVPAQSLSEPILWIVSYALMSVCGAILLVLIVLLLLPFRCQRRPRDPEVVNDESSLVRHRWK

SEQ ID NO: 2200 - protein, 417 aa, Artificial Sequence
  Synthetic polypeptide
ARCDDSHLQSQHFGRLRWVDHKVKRSRPSWPTWSSTYRSKGFDVTVKYTQGSWTGFVGEDLVTIPKGFNTSFLVNIATIFESENFFLPGIKWNGILGLAYATLAKPSSSLETFFDSLVTQANIPNVFSMQMCGAGLPVAGSGTNGGSLVLGGIEPSLYKGDIWYTPIKEEWYYQIEILKLEIGGQSLNLDCREYNADKAIVDSGTTLLRLPQKVFDAVVEAVARASLIPEFSDGFWTGSQLACWTNSETPWSYFPKISIYLRDENSSRSFRITILPQLYIQPMMGAGLNYECYRFGISPSTNALVIGATVMEGFYVIFDRAQKRVGFAASPCAEIAGAAVSEISGPFSTEDVASNCVPAQSLSEPILWIVSYALMSVCGAILLVLIVLLLLPFRCQRRPRDPEVVNDESSLVRHRWK

SEQ ID NO: 2201 - protein, 417 aa, Artificial Sequence
  Synthetic polypeptide
PGAVAHTCNPSTLAGRVYSIFSKVHSDRNVYPSAGVLFVHVLEREYFKGEFPPYPKPGEISNDPITFNTNLMGYPDRPGWLRYIQRTPYSDGVLYGSPTAENVGKPTIIEITAYNRRTFETARHNLIINIMSAEDFPLPYQAEFFIKNMNVEEMLASEVLGDFLGAVKNVWQPERLNAINITSALDRGGRVPLPINDLKEGVYVMVGADVPFSSCLREVENPQNQLRCSQEMEPVITCDKKFRTQFYIDWCKISLVDKTKQVSTYQEVIRGEGILPDGGEYKPPSDSLKSRDYYTDFLITLAVPSAVALVLFLILAYIMCCRREGVEKRNMQTPDIQLVHHSAIQKSTKELRDMSKNREIAWPLSTLPVFHPVTGEIIPPLHTDNYDSTNMPLMQTQQNLPHQTQIPQQQTTGKWYP

SEQ ID NO: 2202 - protein, 415 aa, Artificial Sequence
  Synthetic polypeptide
PGAVAHTCNPSTLAGRVYSIFSKVHSDRNVYPSAGVLFVHVLEREYFKGEFPPYPKPGEISNDPITFNTNLMGYPDRPGWLRYIQRTPYSDGVLYGSPTAENVGKPTIIEITAYNRRTFETARHNLIINIMSAEDFPLPYQAEFFIKNMNVEEMLASEVLGDFLGAVKNVWQPERLNAINITSALDRGGRVPLPINDLKEGVYVMVGADVPFSSCLREVENPQNQLRCSQEMEPVITCDKKFRTQFYIDWCKISLVDKTKQVSTYQEVIRGEGILPDGGEYKPPSDSLKSRDYYTDFLITLAVPSAVALVLFLILAYIMCCRREGVEKRNMQTPDIQLVHHSAIQKSTKELRDMSKNREIAWPLSTLPVFHPVTGEIIPPLHTDNYDSTNMPLMQTQQNLPHQTQIPQQQTTGEC

SEQ ID NO: 2203 - protein, 414 aa, Artificial Sequence
  Synthetic polypeptide
RGAWHIASLCYYAVLYPMVYPMKITGNRAVMALVYIWLHSLIGCLPPLFGWSSVEFDEFKWMCVAAWHREPGYTAFWQIWCALFPFLVMLVCYGFIFRVARVKARKVHCGTVVIVEEDAQRTGRKNSSTSTSSSGSRRNAFQGVVYSANQCKALITILVVLGAFMVTWGPYMVVIASEALWGKSSVSPSLETWATWLSFASAVCHPLIYGLWNKTVRKELLGMCFGDRYYREPFVQRQRTSRLFSISNRITDLGLSPHLTALMAGGQPLGHSSSTGDTGFSCSQDSGTDMMLLEDYTSDDNPPSHCTCPPKRRSSVTFEDEVEQIKEAAKNSILHVKAEVHKSLDSYAASLAKAIEAEAKINLFGEEALPGVLVTARTVPGGGFGGRRGSRTLVSQRLQLQSIEEGDVLAAEQR

SEQ ID NO: 2204 - protein, 414 aa, Artificial Sequence; identical to SEQ ID NO: 2203
  Synthetic polypeptide

SEQ ID NO: 2205 - protein, 414 aa, Artificial Sequence; identical to SEQ ID NO: 2203
  Synthetic polypeptide

SEQ ID NO: 2206 - protein, 414 aa, Artificial Sequence; identical to SEQ ID NO: 2203
  Synthetic polypeptide

SEQ ID NO: 2207 - protein, 414 aa, Artificial Sequence; identical to SEQ ID NO: 2203
  Synthetic polypeptide

SEQ ID NO: 2208 - protein, 414 aa, Artificial Sequence; identical to SEQ ID NO: 2203
  Synthetic polypeptide

SEQ ID NO: 2209 - protein, 414 aa, Artificial Sequence; identical to SEQ ID NO: 2203
  Synthetic polypeptide

SEQ ID NO: 2210 - protein, 413 aa, Artificial Sequence
  Synthetic polypeptide
TSQPLKLFIANQKRLEIINEDDVEAYVGLRNLTIVDSGLKFVAHKAFLKNSNLQHINFTRNKLTSLSRKHFRHLDLSELILVGNPFTCSCDIMWIKTLQEAKSSPDTQDLYCLNESSKNIPLANLQIPNCGLPSANLAAPNLTVEEGKSITLSCSVAGDPVPNMYWDVGNLVSKHMNETSHTQGSLRITNISSDDSGKQISCVAENLVGEDQDSVNLTVHFAPTITFLESPTSDHHWCIPFTVKGNPKPALQWFYNGAILNESKYICTKIHVTNHTEYHGCLQLDNPTHMNNGDYTLIAKNEYGKDEKQISAHFMGWPGIDDGANPNYPDVIYEDYGTAANDIGDTTNRSNEIPSTDVTDKTGREHLSVYAVVVIASVVGFCLLVMLFLLKLARHSKFGMKGFVLFHKIPLDG

SEQ ID NO: 2211 - protein, 413 aa, Artificial Sequence; identical to SEQ ID NO: 2210
  Synthetic polypeptide

SEQ ID NO: 2212 - protein, 412 aa, Artificial Sequence
  Synthetic polypeptide
LATAQDLNITCRFAGVFHVEKNGRYSISRTEAADLCKAFNSTLPTMAQMEKALSIGFETCRYGFIEGHVVIPRIHPNSICAANNTGVYILTSNTSQYDTYCFNASAPPEEDCTSVTDLPNAFDGPITITIVNRDGTRYVQKGEYRTNPEDIYPSNPTDDDVSSGSSSERSSTSGGYIFYTFSTVHPIPDEDSPWITDSTDRIPATNRNDVTGGRRDPNHSEGSTTLLEGYTSHYPHTKESRTFIPVTSAKTGSFGVTAVTVGDSNSNVNRSLSGDQDTFHPSGGSHTTHGSESDGHSHGSQEGGANTTSGPIRTPQIPEWLIILASLLALALILAVCIAVNSRRRCGQKKKLVINSGNGAVEDRKPSGLNGEASKSQEMVHLVNKESSETPDQFMTADETRNLQNVDMKIGV

SEQ ID NO: 2213 - protein, 412 aa, Artificial Sequence
  Synthetic polypeptide
PRETHFGLVTSGTGTLEAREYRLDKEESPAPWDRQNPLEPKNKARFSIPSMTEDYAGRYRCYYRSPVGWSQPSDPLELVMTGAYSKPTLSALPSPLVTSGKSVTLLCQSRSPMDTFLLIKERAAHPLLHLRSEHGAQQHQAEFPMSPVTSVHGGTYRCFSSHGFSHYLLSHPSDPLELIVSGSLEDPRPSPTRSVSTAAGPEDQPLMPTGSVPHSGLRRHWEVLIGVLVVSILLLSLLLFLLLQHWRQGKHRTLAQRQADFQRPPGAAEPEPKDGGLQRRSSPAADVQGENFSGAAVKNTQPEDGVEMDTRQSPHDEDPQAVTYAKVKHSRPRREMASPPSPLSGEFLDTKDRQAEEDRQMDTEAAASEAPQDVTYAQLHSFTLRQKATEPPPSQEGASPAEPSVYATLAIH

SEQ ID NO: 2214 - protein, 411 aa, Artificial Sequence
  Synthetic polypeptide
GTGDQTRNQDTRDRDSGSASCCCVTLIKVILDKYYFLCGQPLHFIPRKQLCDGELDCPLGEDEEHCVKSFPEGPAVAVRLSKDRSTLQVLDSATGNWFSACFDNFTEALAETACRQMGYSSKPTFRAVEIGPDQDLDVVEITENSQELRMRNSSGPCLSGSLVSLHCLACGKSLKTPRVVGVEEASVDSWPWQVSIQYDKQHVCGGSILDPHWVLTAAHCFRKHTDVFNWKVRAGSDKLGSFPSLAVAKIIIIEFNPMYPKDNDIALMKLQFPLTFSGTVRPICLPFFDEELTPATPLWIIGWGFTKQNGGKMSDILLQASVQVIDSTRCNADDAYQGEVTEKMMCAGIPEGGVDTCQGDSGGPLMYQSDQWHVVGIVSWGYGCGGPSTPGVYTKVSAYLNWIYNVWKAEL

SEQ ID NO: 2215 - protein, 411 aa, Artificial Sequence; identical to SEQ ID NO: 2214
  Synthetic polypeptide

SEQ ID NO: 2216 - protein, 411 aa, Artificial Sequence; identical to SEQ ID NO: 2214
  Synthetic polypeptide

SEQ ID NO: 2217 - protein, 411 aa, Artificial Sequence
  Synthetic polypeptide
ALDRDLNITCRFAGVFHVEKNGRYSISRTEAADLCKAFNSTLPTMAQMEKALSIGFETCRYGFIEGHVVIPRIHPNSICAANNTGVYILTSNTSQYDTYCFNASAPPEEDCTSVTDLPNAFDGPITITIVNRDGTRYVQKGEYRTNPEDIYPSNPTDDDVSSGSSSERSSTSGGYIFYTFSTVHPIPDEDSPWITDSTDRIPATNRNDVTGGRRDPNHSEGSTTLLEGYTSHYPHTKESRTFIPVTSAKTGSFGVTAVTVGDSNSNVNRSLSGDQDTFHPSGGSHTTHGSESDGHSHGSQEGGANTTSGPIRTPQIPEWLIILASLLALALILAVCIAVNSRRRCGQKKKLVINSGNGAVEDRKPSGLNGEASKSQEMVHLVNKESSETPDQFMTADETRNLQNVDMKIGV

SEQ ID NO: 2218 - protein, 411 aa, Artificial Sequence
  Synthetic polypeptide
IIVHTTTWMNLQGIMLSEKKPISKGPSKLNDRADSRRSLWDQGNFPLIIKNLKIEDSDTYICEVEDQKEEVQLLVFGLTANSDTHLLQGQSLTLTLESPPGSSPSVQCRSPRGKNIQGGKTLSVSQLELQDSGTWTCTVLQNQKKVEFKIDIVVLAFQKASSIVYKKEGEQVEFSFPLAFTVEKLTGSGELWWQAERASSSKSWITFDLKNKEVSVKRVTQDPKLQMGKKLPLHLTLPQALPQYAGSGNLTLALEAKTGKLHQEVNLVVMRATQLQKNLTCEVWGPTSPKLMLSLKLENKEAKVSKREKAVWVLNPEAGMWQCLLSDSGQVLLESNIKVLPTWSTPVQPMALIVLGGVAGLLLFIGLGIFFCVRCRHRRRQAERMSQIKRLLSEKKTCQCPHRFQKTCSPI

SEQ ID NO: 2219 - protein, 411 aa, Artificial Sequence
  Synthetic polypeptide
FCVMADCVVIIGGASNEAGKWMDDTCDSKRGYICQTRSDPSLTNPPATIQTDGFVKYGKSSYSLMRQKFQWHEAETYCKLHNSLIASILDPYSNAFAWLQMETSNERVWIALNSNLTDNQYTWTDKWRVRYTNWAADEPKLKSACVYLDLDGYWKTAHCNESFYFLCKRSDEIPATEPPQLPGRCPESDHTAWIPFHGHCYYIESSYTRNWGQASLECLRMGSSLVSIESAAESSFLSYRVEPLKSKTNFWIGLFRNVEGTWLWINNSPVSFVNWNTGDPSGERNDCVALHASSGFWSNIHCSSYKGYICKRPKIIDAKPTHELLTTKADTRKMDPSKPSSNVAGVVIIVILLILTGAGLAAYFFYKKRRVHLPQEGAFENTLYFNSQSSPGTSDMKDLVGNIEQNEHSVI

SEQ ID NO: 2220 - protein, 411 aa, Artificial Sequence; identical to SEQ ID NO: 2219
  Synthetic polypeptide

SEQ ID NO: 2221 - protein, 411 aa, Artificial Sequence; identical to SEQ ID NO: 2219
  Synthetic polypeptide

SEQ ID NO: 2222 - protein, 411 aa, Artificial Sequence
  Synthetic polypeptide
PRETHFGLVTSGTGTLEAREYRLDKEESPAPWDRQNPLEPKNKARFSIPSMTEDYAGRYRCYYRSPVGWSQPSDPLELVMTGAYSKPTLSALPSPLVTSGKSVTLLCQSRSPMDTFLLIKERAAHPLLHLRSEHGAQQHQAEFPMSPVTSVHGGTYRCFSSHGFSHYLLSHPSDPLELIVSGSLEDPRPSPTRSVSTAAGPEDQPLMPTGSVPHSGLRRHWEVLIGVLVVSILLLSLLLFLLLQHWRQGKHRTLAQRQADFQRPPGAAEPEPKDGGLQRRSSPAADVQGENFCAAVKNTQPEDGVEMDTRQSPHDEDPQAVTYAKVKHSRPRREMASPPSPLSGEFLDTKDRQAEEDRQMDTEAAASEAPQDVTYAQLHSFTLRQKATEPPPSQEGASPAEPSVYATLAIH

SEQ ID NO: 2223 - protein, 411 aa, Artificial Sequence; identical to SEQ ID NO: 2222
  Synthetic polypeptide

SEQ ID NO: 2224 - protein, 410 aa, Artificial Sequence
  Synthetic polypeptide
CSRNALRMFVASERKMRAHQVLTFLLLFVITSVASENASTSRGCGLDLLPQYVSLCDLDAIWGIVVEAVAGAGALITLLLMLILLVRLPFIKEKEKKSPVGLHFLFLLGTLGLFGLTFAFIIQEDETICSVRRFLWGVLFALCFSCLLSQAWRVRRLVRHGTGPAGWQLVGLALCLMLVQVIIAVEWLVLTVLRDTRPACAYEPMDFVMALIYDMVLLVVTLGLALFTLCGKFKRWKLNGAFLLITAFLSVLIWVAWMTMYLFGNVKLQQGDAWNDPTLAITLAASGWVFVIFHAIPEIHCTLLPALQENTPNYFDTSQPRMRETAFEEDVQLPRAYMENKAFSMDEHNAALRTAGFPNGSLGKRPSGSLGKRPSAPFRSNVYQPTEMAVVLNGGTIPTAPPSHTGRHLW

SEQ ID NO: 2225 - protein, 410 aa, Artificial Sequence
  Synthetic polypeptide
TAEYVCLANPFSVKLLPQPLLLQSACLCSCTKAHFPDCRMAALHLYKKILVDTGSSNFAVAGTPHSYIDTYFDTERSSTYRSKGFDVTVKYTQGSWTGFVGEDLVTIPKGFNTSFLVNIATIFESENFFLPGIKWNGILGLAYATLAKPSSSLETFFDSLVTQANIPNVFSMQMCGAGLPVAGSGTNGGSLVLGGIEPSLYKGDIWYTPIKEEWYYQIEILKLEIGGQSLNLDCREYNADKAIVDSGTTLLRLPQKVFDAVVEAVARASLLYIQPMMGAGLNYECYRFGISPSTNALVIGATVMEGFYVIFDRAQKRVGFAASPCAEIAGAAVSEISGPFSTEDVASNCVPAQSLSEPILWIVSYALMSVCGAILLVLIVLLLLPFRCQRRPRDPEVVNDESSLVRHRWK

SEQ ID NO: 2226 - protein, 410 aa, Artificial Sequence
  Synthetic polypeptide
PRETHFGLVTSGTGTLEAREYRLDKEESPAPWDRQNPLEPKNKARFSIPSMTEDYAGRYRCYYRSPVGWSQPSDPLELVMTGAYSKPTLSALPSPLVTSGKSVTLLCQSRSPMDTFLLIKERAAHPLLHLRSEHGAQQHQAEFPMSPVTSVHGGTYRCFSSHGFSHYLLSHPSDPLELIVSGSLEDPRPSPTRSVSTAAGPEDQPLMPTGSVPHSGLRRHWEVLIGVLVVSILLLSLLLFLLLQHWRQGKHRTLAQRQADFQRPPGAAEPEPKDGGLQRRSSPAADVQGENFCAAVKNTQPEDGVEMDTRSPHDEDPQAVTYAKVKHSRPRREMASPPSPLSGEFLDTKDRQAEEDRQMDTEAAASEAPQDVTYAQLHSFTLRQKATEPPPSQEGASPAEPSVYATLAIH

SEQ ID NO: 2227 - protein, 410 aa, Artificial Sequence
  Synthetic polypeptide
GLPSHMELCKEGYQGVRCDQFLPKTDSILSDPTDHLGIEFMESEEVYQRQVLSISCIIFGIVIVGMFCAAFYFKSKKQAKQIQEQLKVPQNGKSYSLKASSTMAKSENLVKSHVQLQNYSKVERHPVTALEKMMESSFVGPQSFPEVPSPDRGSQSVKHHRSLSSCCSPGQRSGMLHRNAFRRTPPSPRSRLGGIVGPAYQQLEESRIPDQDTIPCQGIEVRKTISHLPIQLWCVERPLDLKYSSSGLKTQRNTSINMQLPSRETNPYFNSLEQKDLVGYSSTRASSVPIIPSVGLEETCLQMPGISEVKSIKWCKNSYSADVVNVSIPVSDCLIAEQQEVKILLETVQEQIRILTDARRSEDYELASVETEDSASENTAFLPLSPTAKSEREAQFVLRNEIQRDSALTK

SEQ ID NO: 2228 - protein, 410 aa, Artificial Sequence; identical to SEQ ID NO: 2227
  Synthetic polypeptide

SEQ ID NO: 2229 - protein, 409 aa, Artificial Sequence
  Synthetic polypeptide
PGAVAHTCNPSTWRGQCRRIICSQSFEGNNNYDTPELRTFPALSTRFIRIYPERATHGGLGLRMELLGCEVEAPTAGPTTPNGNLVDECDDDQANCHSGTGDDFQLTGGTTVLATEKPTVIDSTIQSEFPTYGFNCEFGWGSHKTFCHWEHDNHVQLKWSVLTSKTGPIQDHTGDGNFIYSQADENQKGKVARLVSPVVYSQNSAHCMTFWYHMSGSHVGTLRVKLRYQKPEEYDQLVWMAIGHQGDHWKEGRVLLHKSLKLYQVIFEGEIGKGNLGGIAVDDISINNHISQEDCAKPADLDKKNPEIKIDETGSTPGYEGEGEGDKNISRKPGNVLKTLDPILITIIAMSALGVLLGAVCGVVLYCACWHNGMSERNLSALENYNFELVDGVKLKKDKLNTQSTYSEA

SEQ ID NO: 2230 - protein, 409 aa, Artificial Sequence; identical to SEQ ID NO: 2229
  Synthetic polypeptide

SEQ ID NO: 2231 - protein, 408 aa, Artificial Sequence
  Synthetic polypeptide
WFSSRMFVASERKMRAHQVLTFLLLFVITSVASENASTSRGCGLDLLPQYVSLCDLDAIWGIVVEAVAGAGALITLLLMLILLVRLPFIKEKEKKSPVGLHFLFLLGTLGLFGLTFAFIIQEDETICSVRRFLWGVLFALCFSCLLSQAWRVRRLVRHGTGPAGWQLVGLALCLMLVQVIIAVEWLVLTVLRDTRPACAYEPMDFVMALIYDMVLLVVTLGLALFTLCGKFKRWKLNGAFLLITAFLSVLIWVAWMTMYLFGNVKLQQGDAWNDPTLAITLAASGWVFVIFHAIPEIHCTLLPALQENTPNYFDTSQPRMRETAFEEDVQLPRAYMENKAFSMDEHNAALRTAGFPNGSLGKRPSGSLGKRPSAPFRSNVYQPTEMAVVLNGGTIPTAPPSHTGRHLW

SEQ ID NO: 2232 - protein, 408 aa, Artificial Sequence
  Synthetic polypeptide
PGAVAHTCNPSTLAGRVYSIFSKVHSDRNVYPSAGVLFVHVLEREYFKGEFPPYPKPGEISNDPITFNTNLMGYPDRPGWLRYIQRTPYSDGVLYGSPTAENVGKPTIIEITAYNRRTFETARHNLIINIMSAEDFPLPYQAEFFIKNMNVEEMLASEVLGDFLGAVKNVWQPERLNAINITSALDRGGRVPLPINDLKEGVYVMVGADVPFSSCLREVENPQNQLRCSQEMEPVITCDKKFRTQFYIDWCKISLVDKTKQVSTYQEVIRGEGILPDGGEYKPPSDSLKSRDYYTDFLITLAVPSAVALVLFLILAYIMCCRREGVIQLVHHSAIQKSTKELRDMSKNREIAWPLSTLPVFHPVTGEIIPPLHTDNYDSTNMPLMQTQQNLPHQTQIPQQQTTGKWYP

SEQ ID NO: 2233 - protein, 407 aa, Artificial Sequence
  Synthetic polypeptide
GASLPGRPSSEMWGAPLPHRPVWDVRSASARPRPRLGGTSRSSKGRSLIGKVDGTSHVTGKGVTVETVFSVDEFSASVLTGKLTTVFLPIVYTIVFVVGLPSNGMALWVFLFRTKKKHPAVIYMANLALADLLSVIWFPLKIAYHIHGNNWIYGEALCNVLIGFFYGNMYCSILFMTCLSVQRYWVIVNPMGHSRKKANIAIGISLAIWLLILLVTIPLYVVKQTIFIPALNITTCHDVLPEQLLVGDMFNYFLSLAIGVFLFPAFLTASAYVLMIRMLRSSAMDENSEKKRKRAIKLIVTVLAMYLICFTPSNLLLVVHYFLIKSQGQSHVYALYIVALCLSTLNSCIDPFVYYFVSHDFRDHAKNALLCRSVRTVKQMQVSLTSKKHSRKSSSYSSSSTTVKTSY

SEQ ID NO: 2234 - protein, 407 aa, Artificial Sequence
  Synthetic polypeptide
TVSSIRAETVGISTAHTGPGTHPGLSEHLLNVCQGTSNKLTQLGTFEDHFLSLQRMFNNCEVVLGNLEITYVQRNYDLSFLKTIQEVAGYVLIALNTVERIPLENLQIIRGNMYYENSYALAVLSNYDANKTGLKELPMRNLQEILHGAVRFSNNPALCNVESIQWRDIVSSDFLSNMSMDFQNHLGSCQKCDPSCPNGSCWGAGEENCQKLTKIICAQQCSGRCRGKSPSDCCHNQCAAGCTGPRESDCLVCRKFRDEATCKDTCPPLMLYNPTTYQMDVNPEGKYSFGATCVKKCPRNYVVTDHGSCVRACGADSYEMEEDGVRKCKKCEGPCRKVCNGIGIGEFKDSLSINATNIKHFKNCTSISGDLHILPVAFRGDSFTHTPPLDPQELDILKTVKEITGLS

SEQ ID NO: 2235 - protein, 406 aa, Artificial Sequence
  Synthetic polypeptide
GTGDQTRNQDTRDRDSGSASCCCVTLIKVILDKYYFLCGQPLHFIPRKQLCDGELDCPLGEDEEHCVKSFPEGPAVAVRLSKDRSTLQVLDSATGNWFSACFDNFTEALAETACRQMGYSRAVEIGPDQDLDVVEITENSQELRMRNSSGPCLSGSLVSLHCLACGKSLKTPRVVGVEEASVDSWPWQVSIQYDKQHVCGGSILDPHWVLTAAHCFRKHTDVFNWKVRAGSDKLGSFPSLAVAKIIIIEFNPMYPKDNDIALMKLQFPLTFSGTVRPICLPFFDEELTPATPLWIIGWGFTKQNGGKMSDILLQASVQVIDSTRCNADDAYQGEVTEKMMCAGIPEGGVDTCQGDSGGPLMYQSDQWHVVGIVSWGYGCGGPSTPGVYTKVSAYLNWIYNVWKAEL

SEQ ID NO: 2236 - protein, 406 aa, Artificial Sequence
  Synthetic polypeptide
PGAVAHACNPSTLGGRGRQITRSSTYRSKGFDVTVKYTQGSWTGFVGEDLVTIPKGFNTSFLVNIATIFESENFFLPGIKWNGILGLAYATLAKPSSSLETFFDSLVTQANIPNVFSMQMCGAGLPVAGSGTNGGSLVLGGIEPSLYKGDIWYTPIKEEWYYQIEILKLEIGGQSLNLDCREYNADKAIVDSGTTLLRLPQKVFDAVVEAVARASLIPEFSDGFWTGSQLACWTNSETPWSYFPKISIYLRDENSSRSFRITILPQLYIQPMMGAGLNYECYRFGISPSTNALVIGATVMEGFYVIFDRAQKRVGFAASPCAEIAGAAVSEISGPFSTEDVASNCVPAQSLSEPILWIVSYALMSVCGAILLVLIVLLLLPFRCQRRPRDPEVVNDESSLVRHRWK

SEQ ID NO: 2237 - protein, 406 aa, Artificial Sequence
  Synthetic polypeptide
HFGRPRQADHKVKRSRPSWPTWSSTYRSKGFDVTVKYTQGSWTGFVGEDLVTIPKGFNTSFLVNIATIFESENFFLPGIKWNGILGLAYATLAKPSSSLETFFDSLVTQANIPNVFSMQMCGAGLPVAGSGTNGGSLVLGGIEPSLYKGDIWYTPIKEEWYYQIEILKLEIGGQSLNLDCREYNADKAIVDSGTTLLRLPQKVFDAVVEAVARASLIPEFSDGFWTGSQLACWTNSETPWSYFPKISIYLRDENSSRSFRITILPQLYIQPMMGAGLNYECYRFGISPSTNALVIGATVMEGFYVIFDRAQKRVGFAASPCAEIAGAAVSEISGPFSTEDVASNCVPAQSLSEPILWIVSYALMSVCGAILLVLIVLLLLPFRCQRRPRDPEVVNDESSLVRHRWK

SEQ ID NO: 2238 - protein, 406 aa, Artificial Sequence
  Synthetic polypeptide
KKGPGIREVSSWLCQEPEPCHPGFDAESYTFTVPRRHLERGRVLGRVNFEDCTGRQRTAYFSLDTRFKVGTDGVITVKRPLRFHNPQIHFLVYAWDSTYRKFSTKVTLNTVGHHHRPPPHQASVSGIQAELLTFPNSSPGLRRQKRDWVIPPISCPENEKGPFPKNLVQLFSHAVSSNGNAVEDPMEILITVTDQNDNKPEFTQEVFKGSVMEGALPGTSVMEVTATDADDDVNTYNAAIAYTILSQDPELPDKNMFTINRNTGVISVVTTGLDRESFPTYTLVVQAADLQGEGLSTTATAVITVTDTNDNPPIFNPTTYKGQVPENEANVVITTLKVTDADAPNTPAWEAVYTILNDDGGQFVVTTNPVNNDGILKTAKVCMVPGKMQKLASSQLFIPLSPGLGF

SEQ ID NO: 2239 - protein, 405 aa, Artificial Sequence
  Synthetic polypeptide
GRFQDGRIRTAPVHSSQHERRRRRMISAFPTETLDGHMVVRSHARVSSLTLKSIQYTDAGEYICTASNTIGQDSQSMYLEVQYAPKLQGPVAVYTWEGNQVNITCEVFAYPSATISWFRDGQLLPSSNYSNIKIYNTPSASYLEVTPDSENDFGNYNCTAVNRIGQESLEFILVQADTPSSPSIDQVEPYSSTAQVQFDEPEATGGVPILKYKAEWRAVGEEVWHSKWYDAKEASMEGIVTIVGLKPETTYAVRLAALNGKGLGEISAASEFKTQPVQGEPSAPKLEGQMGEDGNSIKVNLIKQDDGGSPIRHYLVRYRALSSEWKPEIRLPSGSDHVMLKSLDWNAEYEVYVVAENQQGKSKAAHFVFRTSAQPTAIPATLGGNSASYTFVSLLFSAVTLLLLC

SEQ ID NO: 2240 - protein, 405 aa, Artificial Sequence
  Synthetic polypeptide
LQCCLHIGDAPILVGNPFTCSCDIMWIKTLQEAKSSPDTQDLYCLNESSKNIPLANLQIPNCGLPSANLAAPNLTVEEGKSITLSCSVAGDPVPNMYWDVGNLVSKHMNETSHTQGSLRITNISSDDSGKQISCVAENLVGEDQDSVNLTVHFAPTITFLESPTSDHHWCIPFTVKGNPKPALQWFYNGAILNESKYICTKIHVTNHTEYHGCLQLDNPTHMNNGDYTLIAKNEYGKDEKQISAHFMGWPGIDDGANPNYPDVIYEDYGTAANDIGDTTNRSNEIPSTDVTDKTGREHLSVYAVVVIASVVGFCLLVMLFLLKLARHSKFGMKGPASVISNDDDSASPLHHISNGSNTPSSSEGGPDAVIIGMTKIPVIENPQYFGITNSQLKPDTWPRGSPKTA

SEQ ID NO: 2241 - protein, 403 aa, Artificial Sequence
  Synthetic polypeptide
TREAEVAVSQDPATALQPGSSTYRSKGFDVTVKYTQGSWTGFVGEDLVTIPKGFNTSFLVNIATIFESENFFLPGIKWNGILGLAYATLAKPSSSLETFFDSLVTQANIPNVFSMQMCGAGLPVAGSGTNGGSLVLGGIEPSLYKGDIWYTPIKEEWYYQIEILKLEIGGQSLNLDCREYNADKAIVDSGTTLLRLPQKVFDAVVEAVARASLIPEFSDGFWTGSQLACWTNSETPWSYFPKISIYLRDENSSRSFRITILPQLYIQPMMGAGLNYECYRFGISPSTNALVIGATVMEGFYVIFDRAQKRVGFAASPCAEIAGAAVSEISGPFSTEDVASNCVPAQSLSEPILWIVSYALMSVCGAILLVLIVLLLLPFRCQRRPRDPEVVNDESSLVRHRWK

SEQ ID NO: 2242 - protein, 402 aa, Artificial Sequence
  Synthetic polypeptide
TFGISPACTHSILPLCEEGFSFAFHHDCSQGQFPLTQNVTVVEGGTAILTCRVDQNDNTSLQWSNPAQQTLYFDDKKALRDNRIELVRASWHELSISVSDVSLSDEGQYTCSLFTMPVKTSKAYLTVLGVPEKPQISGFSSPVMEGDLMQLTCKTSGSKPAADIRWFKNDKEIKDVKYLKEEDANRKTFTVSSTLDFRVDRSDDGVAVICRVDHESLNATPQVAMQVLEIHYTPSVKIIPSTPFPQEGQPLILTCESKGKPLPEPVLWTKDGGELPDPDRMVVSGRELNILFLNKTDNGTYRCEATNTIGQSSAEYVLIVHDPNALAGQNGPDHALIGGIVAVVVFVTLCSIFLLGRYLARHKGTYLTNEAKGAEDAPDADTAIINAEGSQVNAEEKKEYFI

SEQ ID NO: 2243 - protein, 402 aa, Artificial Sequence
  Synthetic polypeptide
PGAVAHTCNPSTWRGQCRRIICSQSFEGNNNYDTPELRTFPALSTRFIRIYPERATHGGLGLRMELLGCEVEAPTAGPTTPNGNLVDECDDDQANCHSGTGGTTVLATEKPTVIDSTIQSEFPTYGFNCEFGWGSHKTFCHWEHDNHVQLKWSVLTSKTGPIQDHTGDGNFIYSQADENQKGKVARLVSPVVYSQNSAHCMTFWYHMSGSHVGTLRVKLRYQKPEEYDQLVWMAIGHQGDHWKEGRVLLHKSLKLYQVIFEGEIGKGNLGGIAVDDISINNHISQEDCAKPADLDKKNPEIKIDETGSTPGYEGEGEGDKNISRKPGNVLKTLDPILITIIAMSALGVLLGAVCGVVLYCACWHNGMSERNLSALENYNFELVDGVKLKKDKLNTQSTYSEA

SEQ ID NO: 2244 - protein, 400 aa, Artificial Sequence
  Synthetic polypeptide
DVGSASALPPRLGCEEHLCPAATLSGRYYSVLYPLERKISDAKSRELVMYIWAHAVVASVPVFAVTNVADIYATSTCTEVWSNSLGHLVYVLVYNITTVIVPVVVVFLFLILIRRALSASQKKKVIIAALRTPQNTISIPYASQREAELHATLLSMVMVFILCSVPYATLVVYQTVLNVPDTSVFLLLTAVWLPKVSLLANPVLFLTVNKSVRKCLIGTLVQLHHRYSRRNVVSTGSGMAEASLEPSIRSGSQLLEMFHIGQQQIFKPTEDEEESEAKYIGSADFQAKEIFSTCLEGEQGPQFAPSAPPLSTVDSVSQVAPAAPVEPETFPDKYSLQFGFGPFELPPQWLSETRNSKKRLLPPLGNTPEELIQTKVPKVGRVERKMSRNNKVSIFPKVDS

SEQ ID NO: 2245 - protein, 400 aa, Artificial Sequence; identical to SEQ ID NO: 2244
  Synthetic polypeptide

SEQ ID NO: 2246 - protein, 400 aa, Artificial Sequence; identical to SEQ ID NO: 2244
  Synthetic polypeptide

SEQ ID NO: 2247 - protein, 398 aa, Artificial Sequence
  Synthetic polypeptide
ISQGGASHPETSVQPVLVECQEATLMVMVSKDLFGTGKLIRAADLTLGPEACEPLVSMDTEDVVRFEVGLHECGNSMQVTDDALVYSTFLLHDPRPVGNLSIVRTNRAEIPIECRYPRQGNVSSQAILPTWLPFRTTVFSEEKLTFSLRLMEENWNAEKRSPTFHLGDAAHLQAEIHTGSHVPLRLFVDHCVATPTPDQNASPYHTIVDFHGCLVDGLTDASSAFKVPRPGPDTLQFTVDVFHFANDSRNMIYITCHLKVTLAEQDPDELNKACSFSKPSNSWFPVEGSADICQCCNKGDCGTPSHSRRQPHVMSQWSRSASRNRRHVTEEADVTVGPLIFLDRRGDHEVEQWALPSDTSVVLLGVGLAVVVSLTLTAVILVLTRRCRTASHPVSASE

SEQ ID NO: 2248 - protein, 398 aa, Artificial Sequence
  Synthetic polypeptide
RGMMSSNTLTADGPCALNSLGISEELKEKLRDVMVDRHKVALGKTLGEGEFGAVMEGQLNQDDSILKVAVKTMKIAICTRSELEDFLSEAVCMKEFDHPNVMRLIGVCFQGSERESFPAPVVILPFMKHGDLHSFLLYSRLGDQPVYLPTQMLVKFMADIASGMEYLSTKRFIHRDLAARNCMLNENMSVCVADFGLSKKIYNGDYYRQGRIAKMPVKWIAIESLADRVYTSKSDVWSFGVTMWEIATRGQTPYPGVENSEIYDYLRQGNRLKQPADCLDGLYALMSRCWELNPQDRPSFTELREDLENTLKALPPAQEPDEILYVNMDEGGGYPEPPGAAGGADPPTQPDPKDSCSCLTAAEVHPAGRYVLCPSTTPSPAQPADRGSPAAPGQEDGA

SEQ ID NO: 2249 - protein, 398 aa, Artificial Sequence; identical to SEQ ID NO: 2248
  Synthetic polypeptide

SEQ ID NO: 2250 - protein, 398 aa, Artificial Sequence; identical to SEQ ID NO: 2248
  Synthetic polypeptide

SEQ ID NO: 2251 - protein, 397 aa, Artificial Sequence
  Synthetic polypeptide
YRAQHIGPLTTQYLWHRFSADLGYNGTRQRGGCSNRSADPTMQEVETLTSHWTLYMNVGGFLVGLFSSTLLGAWSDSVGRRPLLVLASLGLLLQALVSVFVVQLQLHVGYFVLGRILCALLGDFGGLLAASFASVADVSSSRSRTFRMALLEASIGVAGMLASLLGGHWLRAQGYANPFWLALALLIAMTLYAAFCFGETLKEPKSTRLFTFRHHRSIVQLYVAPAPEKSRKHLALYSLAIFVVITVHFGAQDILTLYELSTPLCWDSKLIGYGSAAQHLPYLTSLLALKLLQYCLADAWVAEIGLAFNILGMVVFAFATITPLMFTGALFSAVACVNSLAMLTASGFNSLYPATLNFMKGFPFLLGAGLLLIPAVLIGMLEKADPHLEFQQFPQSP

SEQ ID NO: 2252 - protein, 394 aa, Artificial Sequence
  Synthetic polypeptide
GAPLPGRPYWEVRSPSARPPPRLGGTSRSSKGRSLIGKVDGTSHVTGKGVTVETVFSVDEFSASVLTGKLTTVFLPIVYTIVFVVGLPSNGMALWVFLFRTKKKHPAVIYMANLALADLLSVIWFPLKIAYHIHGNNWIYGEALCNVLIGFFYGNMYCSILFMTCLSVQRYWVIVNPMGHSRKKANIAIGISLAIWLLILLVTIPLYVVKQTIFIPALNITTCHDVLPEQLLVGDMFNYFLSLAIGVFLFPAFLTASAYVLMIRMLRSSAMDENSEKKRKRAIKLIVTVLAMYLICFTPSNLLLVVHYFLIKSQGQSHVYALYIVALCLSTLNSCIDPFVYYFVSHDFRDHAKNALLCRSVRTVKQMQVSLTSKKHSRKSSSYSSSSTTVKTSY

SEQ ID NO: 2253 - protein, 393 aa, Artificial Sequence
  Synthetic polypeptide
LGIMAEGNETVEDIAARLNIPVSQVNPRDAKACVVHGSDLKDMTSEQLDDILKYHTEIVFARTSPQQKLIIVEGCQRQGAIVAVTGDGVNDSPALKKADIGVAMGIAGSDVSKQAADMILLDDNFASIVTGVEEGRLIFDNLKKSIAYTLTSNIPEITPFLIFIIANIPLPLGTVTILCIDLGTDMVPAISLAYEQAESDIMKRQPRNPKTDKLVNERLISMAYGQIGMIQALGGFFTYFVILAENGFLPIHLLGLRVDWDDRWINDVEDSYGQQWTYEQRKIVEFTCHTAFFVSIVVVQWADLVICKTRRNSVFQQGMKNKILIFGLFEETALAAFLSYCPGMGVALRMYPLKPTWWFCAFPYSLLIFVYDEVRKLIIRRRPGGWVEKETYY

SEQ ID NO: 2254 - protein, 393 aa, Artificial Sequence; identical to SEQ ID NO: 2253
  Synthetic polypeptide

SEQ ID NO: 2255 - protein, 393 aa, Artificial Sequence; identical to SEQ ID NO: 2253
  Synthetic polypeptide

SEQ ID NO: 2256 - protein, 393 aa, Artificial Sequence
  Synthetic polypeptide
SFKTELQLHLCEAFPEHLPPGNDLFLVAVHELGHALGLEHSSDPSAIMAPFYQYMETHNFKLPQDDLQGIQKIYGPPAEPLEPTRPLPTLPVRRIHSPSERKHERQPRPPRPPLGDRPSTPGTKPNICDGNFNTVALFRGEMFVFKDRWFWRLRNNRVQEGYPMQIEQFWKGLPARIDAAYERADGRFVFFKGDKYWVFKEVTVEPGYPHSLGELGSCLPREGIDTALRWEPVGKTYFFKGERYWRYSEERRATDPGYPKPITVWKGIPQAPQGAFISKEGYYTYFYKGRDYWKFDNQKLSVEPGYPRNILRDWMGCNQKEVERRKERRLPQDDVDIMVTINDVPGSVNAVAVVIPCILSLCILVLVYTIFQFKNKTGPQPVTYYKRPVQEWV

SEQ ID NO: 2257 - protein, 392 aa, Artificial Sequence
  Synthetic polypeptide
VKYKTSCPSHLHSPCFNPGEVRGTVMSKLQILVDTGSSNFAVAGTPHSYIDTYFDTERSSTYRSKGFDVTVKYTQGSWTGFVGEDLVTIPKGFNTSFLVNIATIFESENFFLPGIKWNGILGLAYATLAKPSSSLETFFDSLVTQANIPNVFSMQMCGAGLPVAGSGTNGGSLVLGGIEPSLYKGDIWYTPIKEEWYYQIEILKLEIGGQSLNLDCREYNADKAIVDSGTTLLRLPQKVFDAVVEAVARASLLYIQPMMGAGLNYECYRFGISPSTNALVIGATVMEGFYVIFDRAQKRVGFAASPCAEIAGAAVSEISGPFSTEDVASNCVPAQSLSEPILWIVSYALMSVCGAILLVLIVLLLLPFRCQRRPRDPEVVNDESSLVRHRWK

SEQ ID NO: 2258 - protein, 392 aa, Artificial Sequence
  Synthetic polypeptide
PGAVAHTCNPSTWRGQCRRIICSQSFEGNNNYDTPELRTFPALSTRFIRIYPERATHGGLGLRMELLGCEVEAPTAGPTTPNGNLVDECDDDQANCHSGTGDDFQLTGGTTVLATEKPTVIDSTIQSEFPTYGFNCEFGWGSHKTFCHWEHDNHVQLKWSVLTSKTGPIQDHTGDGNFIYSQADENQKGKVARLVSPVVYSQNSAHCMTFWYHMSGSHVGTLRVKLRYQKPEEYDQLVWMAIGHQGDHWKEGRVLLHKSLKLYQVIFEGEIGKGNLGGIAVDDISINNHISQEDCARSTPGYEGEGEGDKNISRKPGNVLKTLDPILITIIAMSALGVLLGAVCGVVLYCACWHNGMSERNLSALENYNFELVDGVKLKKDKLNTQSTYSEA

SEQ ID NO: 2259 - protein, 392 aa, Artificial Sequence
  Synthetic polypeptide
TVETQCLTAEEIFSLHGFSNATQITSSKFSVICPAVLQQLNFHPCEDRPKHKTRPSHSEVWGYGFLSVTIINLASLLGLILTPLIKKSYFPKILTFFVGLAIGTLFSNAIFQLIPEAFGFDPKVDSYVEKAVAVFGGFYLLFFFERMLKMLLKTYGQNGHTHFGNDNFGPQEKTHQPKALPAINGVTCYANPAVTEANGHIHFDNVSVVSLQDGKKEPSSCTCLKGPKLSEIGTIAWMITLCDALHNFIDGLAIGASCTLSLLQGLSTSIAILCEEFPHELGDFVILLNAGMSTRQALLFNFLSACSCYVGLAFGILVGNNFAPNIIFALAGGMFLYISLADMFPEMNDMLREKVTGRKTDFTFFMIQNAGMLTGFTAILLITLYAGEIELE

SEQ ID NO: 2260 - protein, 392 aa, Artificial Sequence; identical to SEQ ID NO: 2259
  Synthetic polypeptide

SEQ ID NO: 2261 - protein, 390 aa, Artificial Sequence
  Synthetic polypeptide
NLRLPPGHAELHMPLNQKAKRELCIGWGDPSGLPRRSYRLLLLHQEVRLYGPNFILQVYSSQRKSWHPVCQDDWNENYGRAACRDMGYKNNFYSSQGIVDDSGSTSFMKLNTSAGNVDIYKKLYHSDACSSKAVVSLRCIACGVNLNSSRQSRIVGGESALPGAWPWQVSLHVQNVHVCGGSIITPEWIVTAAHCVEKPLNNPWHWTAFAGILRQSFMFYGAGYQVEKVISHPNYDSKTKNNDIALMKLQKPLTFNDLVKPVCLPNPGMMLQPEQLCWISGWGATEEKGKTSEVLNAAKVLLIETQRCNSRYVYDNLITPAMICAGFLQGNVDSCQGDSGGPLVTSKNNIWWLIGDTSWGSGCAKAYRPGVYGNVMVFTDWIYRQMRADG

SEQ ID NO: 2262 - protein, 390 aa, Artificial Sequence; identical to SEQ ID NO: 2261
  Synthetic polypeptide

SEQ ID NO: 2263 - protein, 390 aa, Artificial Sequence; identical to SEQ ID NO: 2261
  Synthetic polypeptide

SEQ ID NO: 2264 - protein, 387 aa, Artificial Sequence
  Synthetic polypeptide
NLRLPPGHAELHMPLNQKAKRELCIGWGDPSGLPRRSYRLLLLHQEVRLYGPNFILQVYSSQRKSWHPVCQDDWNENYGRAACRDMGYKNNFYSSQGIVDDSGSTSFMKLNTSAGNVDIYKKLYHSDACSSKAVVSLRCIACGVNLNSSRQSRIVGGESALPGAWPWQVSLHVQNVHVCGGSIITPEWIVTAAHCVEKPLNNPWHWTAFAGILRQSFMFYGAGYQVEKVISHPNYDSKTKNNDIALMKLQKPLTFNDLVKPVCLPNPGMMLQPEQLCWISGWGATEEKGKTSEVLNAAKVLLIETQRCNSRYVYDNLITPAMICAGFLQGNVDSCQGDSGGPLVTSKNNIWWLIGDTSWGSGCAKAYRPGVYGNVMVFTDWIYRQMR

SEQ ID NO: 2265 - protein, 386 aa, Artificial Sequence
  Synthetic polypeptide
EQLRSTAPSVSDAEDGRFLHFHLRKIITIRIFDREEYEKECSFSLVLEEPKWIRRGMKGGFTITGKYLFGQPVFRKVHAREHPILSTVITIADEYDDKQPLTSKEEEERRIAEMGRPILGEHTKLEVIIEESYEFKSTVDKLIKKTNLALVVGTNSWREQFIEAITVSAGEDDDDDECGEEKLPSCFDYVMHFLTVFWKVLFAFVPPTEYWNGWACFIVSILMIGLLTAFIGDLASHFGCTIGLKDSVTAVVFVALGTSVPDTFASKVAATQDQYADASIGNVTGSNAVNVFLGIGVAWSIAAIYHAANGEQFKVSPGTLAFSVTLFTIFAFINVGVLLYRRRPEIGGELGGPRTAKLLTSCLFVLLWLLYIFFSSLEAYCHIKGF

SEQ ID NO: 2266 - protein, 386 aa, Artificial Sequence
  Synthetic polypeptide
GLPSHMELCKEGYQGVRCDQFLPKTDSILSDPTDHLGIEFMESEEVYQRQVLSISCIIFGIVIVGMFCAAFYFKSKKQAKQIQEQLKVPQNGKSYSLKASSTMAKSENLVKSHVQLQNYSKVERHPVTALEKMMESSFVGPQSFPEVPSPDRGSQSVKHHRSLSSCCSPGQRSGMLHRNAFRRTPPSPRSRLGGIVGPAYQQLEESRIPDQDTIPCQGYSSSGLKTQRNTSINMQLPSRETNPYFNSLEQKDLVGYSSTRASSVPIIPSVGLEETCLQMPGISEVKSIKWCKNSYSADVVNVSIPVSDCLIAEQQEVKILLETVQEQIRILTDARRSEDYELASVETEDSASENTAFLPLSPTAKSEREAQFVLRNEIQRDSALTK

SEQ ID NO: 2267 - protein, 386 aa, Artificial Sequence; identical to SEQ ID NO: 2266
  Synthetic polypeptide

SEQ ID NO: 2268 - protein, 386 aa, Artificial Sequence; identical to SEQ ID NO: 2266
  Synthetic polypeptide

SEQ ID NO: 2269 - protein, 385 aa, Artificial Sequence
  Synthetic polypeptide
WFYNGFAQFSFFSFLPACKEGHVCLLFLHDCYTGELCQSKIDYCILDPCRNGATCISSLSGFTCQCPEGYFGSACEEKVDPCASSPCQNNGTCYVDGVHFTCNCSPGFTGPTCAQLIDFCALSPCAHGTCRSVGTSYKCLCDPGYHGLYCEEEYNECLSAPCLNAATCRDLVNGYECVCLAEYKGTHCELYKDPCANVSCLNGATCDSDGLNGTCICAPGFTGEECDIDINECDSNPCHHGGSCLDQPNGYNCHCPHGWVGANCEIHLQWKSGHMAESLTNMPRHSLYIIIGALCVAFILMLIILIVGICRISRIEYQGSSRPAYEEFYNCRSIDSEFSNAIASIRHARFGKKSRPAMYDVSPIAYEDYSPDDKPLVTLIKTKDL

SEQ ID NO: 2270 - protein, 384 aa, Artificial Sequence
  Synthetic polypeptide
EGRRPSARQPPRLRRTSRSSKGRSLIGKVDGTSHVTGKGVTVETVFSVDEFSASVLTGKLTTVFLPIVYTIVFVVGLPSNGMALWVFLFRTKKKHPAVIYMANLALADLLSVIWFPLKIAYHIHGNNWIYGEALCNVLIGFFYGNMYCSILFMTCLSVQRYWVIVNPMGHSRKKANIAIGISLAIWLLILLVTIPLYVVKQTIFIPALNITTCHDVLPEQLLVGDMFNYFLSLAIGVFLFPAFLTASAYVLMIRMLRSSAMDENSEKKRKRAIKLIVTVLAMYLICFTPSNLLLVVHYFLIKSQGQSHVYALYIVALCLSTLNSCIDPFVYYFVSHDFRDHAKNALLCRSVRTVKQMQVSLTSKKHSRKSSSYSSSSTTVKTSY

SEQ ID NO: 2271 - protein, 384 aa, Artificial Sequence
  Synthetic polypeptide
LPLTRSSPKRHHFQRQRAASESTEQEEGDAPQEDFIQYIARAGDAVAFPHPRPFLASPPPALGRLEAAEAAGGASPDSPPERGAGSAGPEQQQPPLEPDAERDAGPEQAQTSYRDLWSLRASLELHAAASDHSSSGNDRDSVRSGDSSGSGSGGAAPAFPPPSPPAPRPKDGEARRLLQMDSGYASIEGRGAGDDTEPPAAPARPRSPRAWPRRPRRDYSIDEKTDALFHEFLRHDPHFDDTPAAARHRARAHPHARKQWQRGRQHSDPGARAAPALAGTPAPPAGAARPARAPLRRGDSVDGPPDGRTLGGAGDDPAIPVIEEEPGGGGCPGSGLCVLPSGSVLDKLAAGLDERLFPPRLAEPVVATPALVAAAPTSPDHSPA

SEQ ID NO: 2272 - protein, 384 aa, Artificial Sequence
  Synthetic polypeptide
VTLTVEEASLTNHTETITVEEGQTLTLKCVTSLRKNSSLQWLTPSGFTIFLNEYPALKNSKYQLLHHSANQLSITVPNVTLQDEGVYKCLHYSDSVSTKEVKVIVLATPFKPILEASVIRKQNGEEHVVLMCSTMRSKPPPQITWLLGNSMEVSGGTLHEFETDGKKCNTTSTLIIHTYGKNSTVDCIIRHRGLQGRKLVAPFRFEDLVTDEETASDALERNSLSSQDPQQPTSTVSVTEDSSTSEIDKEEKEQTTQDPDLTTEANPQYLGLARKKSGILLLTLVSFLIFILFIIVQLFIMKLRKAHVIWKKENEVSEHTLESYRSRSNNEETSSEEKNGQSSHPMRCMNYITKLYSEAKTKRKENVQHSKLEEKHIQVPESIV

SEQ ID NO: 2273 - protein, 384 aa, Artificial Sequence
  Synthetic polypeptide
SLDQQPWHYLGPYLRSTESEVLAGYVSNQCFTNSQFTAMNEPQCFYNESIAFFYNRSGKHLATEWNTVSKLVMGLGITVCIFIMLANLLVMVAIYVNRRFHFPIYYLMANLAAADFFAGLAYFYLMFNTGPNTRRLTVSTWLLRQGLIDTSLTASVANLLAIAIERHITVFRMQLHTRMSNRRVVVVIVVIWTMAIVMGAIPSVGWNCICDIENCSNMAPLYSDSYLVFWAIFNLVTFVVMVVLYAHIFGYVRQRTMRMSRHSSGPRRNRDTMMSLLKTVVIVLGAFIICWTPGLVLLLLDVCCPQCDVLAYEKFFLLLAEFNSAMNPIIYSYRDKEMSATFRQILCCQRSENPTGPTEGSDRSASSLNHTILAGVHSNDHSVV

SEQ ID NO: 2274 - protein, 384 aa, Artificial Sequence; identical to SEQ ID NO: 2273
  Synthetic polypeptide

SEQ ID NO: 2275 - protein, 384 aa, Artificial Sequence; identical to SEQ ID NO: 2273
  Synthetic polypeptide

SEQ ID NO: 2276 - protein, 384 aa, Artificial Sequence; identical to SEQ ID NO: 2273
  Synthetic polypeptide

SEQ ID NO: 2277 - protein, 384 aa, Artificial Sequence; identical to SEQ ID NO: 2273
  Synthetic polypeptide

SEQ ID NO: 2278 - protein, 383 aa, Artificial Sequence
  Synthetic polypeptide
GASPPGSHPVREGGTSRSSKGRSLIGKVDGTSHVTGKGVTVETVFSVDEFSASVLTGKLTTVFLPIVYTIVFVVGLPSNGMALWVFLFRTKKKHPAVIYMANLALADLLSVIWFPLKIAYHIHGNNWIYGEALCNVLIGFFYGNMYCSILFMTCLSVQRYWVIVNPMGHSRKKANIAIGISLAIWLLILLVTIPLYVVKQTIFIPALNITTCHDVLPEQLLVGDMFNYFLSLAIGVFLFPAFLTASAYVLMIRMLRSSAMDENSEKKRKRAIKLIVTVLAMYLICFTPSNLLLVVHYFLIKSQGQSHVYALYIVALCLSTLNSCIDPFVYYFVSHDFRDHAKNALLCRSVRTVKQMQVSLTSKKHSRKSSSYSSSSTTVKTSY

SEQ ID NO: 2279 - protein, 383 aa, Artificial Sequence
  Synthetic polypeptide
AGHSGSPLSSQHCKRPRREKYPQPKGQKKKKIVKYGMGGLIILFLIAIIWFPLLFMSLVRSVVGVVNQPIDVTVTLKLGGYEPLFTMSAQQPSIIPFTAQAYEELSRQFDPQPLAMQFISQYSPEDIVTAQIEGSSGALWRISPPSRAQMKRELYNGTADITLRFTWNFQRDLAKGGTVEYANEKHMLALAPNSTARRQLASLLEGTSDQSVVIPNLFPKYIRAPNGPEANPVKQLQPNEEADYLGVRIQLRREQGAGATGFLEWWVIELQECRTDCNLLPMVIFSDKVSPPSLGFLAGYGIMGLYVSIVLVIGKFVRGFFSEISHSIMFEELPCVDRILKLCQDIFLVRETRELELEEELYAKLIFLYRSPETMIKWTREKE

SEQ ID NO: 2280 - protein, 382 aa, Artificial Sequence
  Synthetic polypeptide
NLRQLAIGVDPPAQHSSPAEKWLDCLKKKKRKEKKGQAPLKGHQPQRLKADKPTKMRKDQYKNIENSKCHSALFPPNDCITSPARFRNRVEAEMPEMTEVEFIIWIGTKFTELKSPDEGFEGKSLYESWTKKSPSPEFSGMPRISKLGSGNDFEVFFQRLGIASGRARYTKNWETNKFSGYPLYHSVYETYELVEKFYDPMFKYHLTVAQVRGGMVFELANSIVLPFDCRDYAVVLRKYADKIYSISMKHPQEMKTYSVSFDSLFSAVKNFTEIASKFSERLQDFDKSNPIVLRMMNDQLMFLERAFIDPLGLPDRPFYRHVIYAPSSHNKYAGESFPGIYDALFDIESKVDPSKAWGEVKRQIYVAAFTVQAAAETLSEVA

SEQ ID NO: 2281 - protein, 382 aa, Artificial Sequence; identical to SEQ ID NO: 2280
  Synthetic polypeptide

SEQ ID NO: 2282 - protein, 382 aa, Artificial Sequence; identical to SEQ ID NO: 2280
  Synthetic polypeptide

SEQ ID NO: 2283 - protein, 382 aa, Artificial Sequence
  Synthetic polypeptide
GLSTMQNCSQGQFPLTQNVTVVEGGTAILTCRVDQNDNTSLQWSNPAQQTLYFDDKKALRDNRIELVRASWHELSISVSDVSLSDEGQYTCSLFTMPVKTSKAYLTVLGVPEKPQISGFSSPVMEGDLMQLTCKTSGSKPAADIRWFKNDKEIKDVKYLKEEDANRKTFTVSSTLDFRVDRSDDGVAVICRVDHESLNATPQVAMQVLEIHYTPSVKIIPSTPFPQEGQPLILTCESKGKPLPEPVLWTKDGGELPDPDRMVVSGRELNILFLNKTDNGTYRCEATNTIGQSSAEYVLIVHDPNALAGQNGPDHALIGGIVAVVVFVTLCSIFLLGRYLARHKGTYLTNEAKGAEDAPDADTAIINAEGSQVNAEEKKEYFI

SEQ ID NO: 2284 - protein, 381 aa, Artificial Sequence
  Synthetic polypeptide
QAHAMAAVIPKVTKHLLSNPVFTCIILAACMEIAVVAGFAAFLGKYLEQQFNLTTSSANQLLGMTAIPCACLGIFLGGLLVKKLSLSALGAIRMAMLVNLVSTACYVSFLFLGCDTGPVAGVTVPYGNSTAPGSALDPYSPCNNNCECQTDSFTPVCGADGITYLSACFAGCNSTNLTGCACLTTVPAENATVVPGKCPSPGCQEAFLTFLCVMCICSLIGAMAQTPSVIILIRTVSPELKSYALGVLFLLLRLLGFIPPPLIFGAGIDSTCLFWSTFCGEQGACVLYDNVVYRYLYVSIAIALKSFAFILYTTTWQCLRKNYKRYIKNHEGGLSTSEFFASTLTLDNLGRDPVPANQTHRTKFIYNLEDHEWCENMESVL

SEQ ID NO: 2285 - protein, 380 aa, Artificial Sequence
  Synthetic polypeptide
IEVSASWFGTHAKTHQLQILVDTGSSNFAVAGTPHSYIDTYFDTERSSTYRSKGFDVTVKYTQGSWTGFVGEDLVTIPKGFNTSFLVNIATIFESENFFLPGIKWNGILGLAYATLAKPSSSLETFFDSLVTQANIPNVFSMQMCGAGLPVAGSGTNGGSLVLGGIEPSLYKGDIWYTPIKEEWYYQIEILKLEIGGQSLNLDCREYNADKAIVDSGTTLLRLPQKVFDAVVEAVARASLLYIQPMMGAGLNYECYRFGISPSTNALVIGATVMEGFYVIFDRAQKRVGFAASPCAEIAGAAVSEISGPFSTEDVASNCVPAQSLSEPILWIVSYALMSVCGAILLVLIVLLLLPFRCQRRPRDPEVVNDESSLVRHRWK

SEQ ID NO: 2286 - protein, 380 aa, Artificial Sequence
  Synthetic polypeptide
GSPTPVPQTGTGPWPVRNWAAQQEVSCGSIEPLYLTYGIIFACGCSFAYQPSLVILGHYFKKRLGLVNGIVTAGSSVFTILLPLLLRVLIDSVGLFYTLRVLCIFMFVLFLAGFTYRPLATSTKDKESGGSGSSLFSRKKFSPPKKIFNFAIFKVTAYAVWAVGIPLALFGYFVPYVHLMKHVNERFQDEKNKEVVLMCIGVTSGVGRLLFGRIADYVPGVKKVYLQVLSFFFIGLMSMMIPLCSIFGALIAVCLIMGLFDGCFISIMAPIAFELVGAQDVSQAIGFLLGFMSIPMTVGPPIAGLLRDKLGSYDVAFYLAGVPPLIGGAVLCFIPWIHSKKQREISKTTGKEKMEKMLENQNSLLSSSSGMFKKESDSII

SEQ ID NO: 2287 - protein, 379 aa, Artificial Sequence
  Synthetic polypeptide
LATAQDLNITCRFAGVFHVEKNGRYSISRTEAADLCKAFNSTLPTMAQMEKALSIGFETCRYGFIEGHVVIPRIHPNSICAANNTGVYILTSNTSQYDTYCFNASAPPEEDCTSVTDLPNAFDGPITITIVNRDGTRYVQKGEYRTNPEDIYPSNPTDDDVSSGSSSERSSTSGGYIFYTFSTVHPIPDEDSPWITDSTDRIPATNMDSSHSITLQPTANPNTGLVEDLDRTGPLSMTTRRDQDTFHPSGGSHTTHGSESDGHSHGSQEGGANTTSGPIRTPQIPEWLIILASLLALALILAVCIAVNSRRRCGQKKKLVINSGNGAVEDRKPSGLNGEASKSQEMVHLVNKESSETPDQFMTADETRNLQNVDMKIGV

SEQ ID NO: 2288 - protein, 379 aa, Artificial Sequence
  Synthetic polypeptide
APLCLEASLSQASARLAPSVNFEDCTGRQRTAYFSLDTRFKVGTDGVITVKRPLRFHNPQIHFLVYAWDSTYRKFSTKVTLNTVGHHHRPPPHQASVSGIQAELLTFPNSSPGLRRQKRDWVIPPISCPENEKGPFPKNLVQLFSHAVSSNGNAVEDPMEILITVTDQNDNKPEFTQEVFKGSVMEGALPGTSVMEVTATDADDDVNTYNAAIAYTILSQDPELPDKNMFTINRNTGVISVVTTGLDRESFPTYTLVVQAADLQGEGLSTTATAVITVTDTNDNPPIFNPTTYKGQVPENEANVVITTLKVTDADAPNTPAWEAVYTILNDDGGQFVVTTNPVNNDGILKTAKVCMVPGKMQKLASSQLFIPLSPGLGF

SEQ ID NO: 2289 - protein, 378 aa, Artificial Sequence
  Synthetic polypeptide
RALVTGPHAKQLITKRVRVPDCAKASGDLSLSVHGLVADSGAQTVAGESFIVWCPSYTEPQNLTGVSEFLLLGLSEDPELQPVLAGLFLSMYLVTVLGNLLIILAVSSDSHLHTPMYFFLSNLSLADIGFTSTTVPKMIVDMQTHSRVISYEGCLTQMSFFVLFACMDDMLLSVMAYDRFVAICHPLHYRIIMNPRLCGFLILLSFFISLLDSQLHNLIMLQLTCFKDVDISNFFCDPSQLLHLRCSDTFINEMVIYFMGAIFGCLPISGILFSYYKIVSPILRVPTSDGKYKAFSTCGSHLAVVCLFYGTGLVGYLSSAVLPSPRKSMVASVMYTVVTPMLNPFIYSLRNKDIQSALCRLHGRIIKSHHLHPFCYMG

SEQ ID NO: 2290 - protein, 378 aa, Artificial Sequence
  Synthetic polypeptide
ALDRDLNITCRFAGVFHVEKNGRYSISRTEAADLCKAFNSTLPTMAQMEKALSIGFETCRYGFIEGHVVIPRIHPNSICAANNTGVYILTSNTSQYDTYCFNASAPPEEDCTSVTDLPNAFDGPITITIVNRDGTRYVQKGEYRTNPEDIYPSNPTDDDVSSGSSSERSSTSGGYIFYTFSTVHPIPDEDSPWITDSTDRIPATNMDSSHSITLQPTANPNTGLVEDLDRTGPLSMTTRRDQDTFHPSGGSHTTHGSESDGHSHGSQEGGANTTSGPIRTPQIPEWLIILASLLALALILAVCIAVNSRRRCGQKKKLVINSGNGAVEDRKPSGLNGEASKSQEMVHLVNKESSETPDQFMTADETRNLQNVDMKIGV

SEQ ID NO: 2291 - protein, 378 aa, Artificial Sequence
  Synthetic polypeptide
IEVSASWFGTHAKTHQILVDTGSSNFAVAGTPHSYIDTYFDTERSSTYRSKGFDVTVKYTQGSWTGFVGEDLVTIPKGFNTSFLVNIATIFESENFFLPGIKWNGILGLAYATLAKPSSSLETFFDSLVTQANIPNVFSMQMCGAGLPVAGSGTNGGSLVLGGIEPSLYKGDIWYTPIKEEWYYQIEILKLEIGGQSLNLDCREYNADKAIVDSGTTLLRLPQKVFDAVVEAVARASLLYIQPMMGAGLNYECYRFGISPSTNALVIGATVMEGFYVIFDRAQKRVGFAASPCAEIAGAAVSEISGPFSTEDVASNCVPAQSLSEPILWIVSYALMSVCGAILLVLIVLLLLPFRCQRRPRDPEVVNDESSLVRHRWK

SEQ ID NO: 2292 - protein, 377 aa, Artificial Sequence
  Synthetic polypeptide
KDPQPLCHRLVRVHGLLGIGLHSRSSIEPLYLTYGIIFACGCSFAYQPSLVILGHYFKKRLGLVNGIVTAGSSVFTILLPLLLRVLIDSVGLFYTLRVLCIFMFVLFLAGFTYRPLATSTKDKESGGSGSSLFSRKKFSPPKKIFNFAIFKVTAYAVWAVGIPLALFGYFVPYVHLMKHVNERFQDEKNKEVVLMCIGVTSGVGRLLFGRIADYVPGVKKVYLQVLSFFFIGLMSMMIPLCSIFGALIAVCLIMGLFDGCFISIMAPIAFELVGAQDVSQAIGFLLGFMSIPMTVGPPIAGLLRDKLGSYDVAFYLAGVPPLIGGAVLCFIPWIHSKKQREISKTTGKEKMEKMLENQNSLLSSSSGMFKKESDSII

SEQ ID NO: 2293 - protein, 377 aa, Artificial Sequence
  Synthetic polypeptide
LELTQISFNRYSITRSKVFNINDNGTITTSNSLDREISAWYNLSITATEKYNIEQISSIPLYVQVLNINDHAPEFSQYYETYVCENAGSGQVIQTISAVDRDESIEEHHFYFNLSVEDTNNSSFTIIDNQDNTAVILTNRTGFNLQEEPVFYISILIADNGIPSLTSTNTLTIHVCDCGDSGSTQTCQYQELVLSMGFKTEVIIAILICIMIIFGFIFLTLGLKQRRKQILFPEKSEDFRENIFQYDDEGGGEEDTEAFDIAELRSSTIMRERKTRKTTSAEIRSLYRQSLQVGPDSAIFRKFILEKLEEANTDPCAPPFDSLQTYAFEGTGSLAGSLSSLESAVSDQDESYDYLNELGPRFKRLACMFGSAVQSNN

SEQ ID NO: 2294 - protein, 376 aa, Artificial Sequence
  Synthetic polypeptide
TVETQCLTAEEIFSLHGFSNATQITSSKFSVICPAVLQQLNFHPCEDRPKHKTRPSHSEVWGYGFLSVTIINLASLLGLILTPLIKKSYFPKILTFFVGLAIGTLFSNAIFQLIPEAFGFDPKVDSYVEKAVAVFGGFYLLFFFERMLKMLLKTYGQNGHTHFGNDNFGPQEKTHQPKALPAINGVTCYANPAVTEANGHIHFDNVSVVSLQDGKKEPSSCTCLKGPKLSEIGTIAWMITLCDALHNFIDGLAIGASCTLSLLQGLSTSIAILCEEFPHELGDFVILLNAGMSTRQALLFNFLSACSCYVGLAFGILVGNNFAPNIIFALAGGMFLYISLADMFPEMNDMLREKIIKWATDDIKSQLHLLWIYTAR

SEQ ID NO: 2295 - protein, 375 aa, Artificial Sequence
  Synthetic polypeptide
PPRLGGTSRSSKGRSLIGKVDGTSHVTGKGVTVETVFSVDEFSASVLTGKLTTVFLPIVYTIVFVVGLPSNGMALWVFLFRTKKKHPAVIYMANLALADLLSVIWFPLKIAYHIHGNNWIYGEALCNVLIGFFYGNMYCSILFMTCLSVQRYWVIVNPMGHSRKKANIAIGISLAIWLLILLVTIPLYVVKQTIFIPALNITTCHDVLPEQLLVGDMFNYFLSLAIGVFLFPAFLTASAYVLMIRMLRSSAMDENSEKKRKRAIKLIVTVLAMYLICFTPSNLLLVVHYFLIKSQGQSHVYALYIVALCLSTLNSCIDPFVYYFVSHDFRDHAKNALLCRSVRTVKQMQVSLTSKKHSRKSSSYSSSSTTVKTSY

SEQ ID NO: 2296 - protein, 375 aa, Artificial Sequence
  Synthetic polypeptide
EEEIRTHRKMPGMCLHRGSTVGGQERRQPSTSQGERPQEKPALPTPGAQTASLQNLSRPRSSPDDLKALTRNVNRLNESFRDLQLRLLQAPLQADLTEQVWKVQDALQNQSDSLLALAGAVQRLEGALWGLQAQAVQTEQAVALLRDRTGQQSDTAQLELYQLQVESNSSQLLLRRHAGLLDGLARRVGILGEELADVGGVLRGLNHSLSYDVALHRTRLQDLRVLVSNASEDTRRLRLAHVGMELQLKQELAMLNAVTEDLRLKDWEHSIALRNISLAKGPPGPKGDQGDEGKEGRPGIPGLPGLRGLPGERGTPGLPGPKGDDGKLGATGPMGMRGFKGDRGPKGEKGEKGDRAGDASKDILLGPWDMVLAQG

SEQ ID NO: 2297 - protein, 375 aa, Artificial Sequence; identical to SEQ ID NO: 2296
  Synthetic polypeptide

SEQ ID NO: 2298 - protein, 375 aa, Artificial Sequence; identical to SEQ ID NO: 2296
  Synthetic polypeptide

SEQ ID NO: 2299 - protein, 372 aa, Artificial Sequence
  Synthetic polypeptide
SQLLGRLRHKNHLNPGGRGCSELKSHHCAPAWVTEINGHPGKSTRLAGLWKLEECHASGCMMDLFVQMAIIMGLKQTLSNCVEYLVPWVTHKCRSLRASESGHLPRDPELRDWRRNYLLNPVNTFSLFDEFMEMMIQYGFTTIFVAAFPLAPLLALFSNLVEIRLDAIKMVWLQRRLVPRKAKDIGTWLQVLETIGVLAVIANGMVIAFTSEFIPRVVYKYRYSPCLKEGNSTVDCLKGYVNHSLSVFHTKDFQDPDGIEGSENVTLCRYRDYRNPPDYNFSEQFWFLLAIRLAFVILFEHVALCIKLIAAWFVPDIPQSVKNKVLEVKYQRLREKMWHGRQRLGGVGAGSRPPMPAHPTPASIFSARSTDV

SEQ ID NO: 2300 - protein, 372 aa, Artificial Sequence
  Synthetic polypeptide
SRLALYLHRSCGPPIISSTQTQHALHGEKGQIKCFIRSTPPPDRIAWSWKENVLESGTSGRYTVETISTEEGVISTLTISNIVRADFQTIYNCTAWNSFGSDTEIIRLKEQGSEMKSGAGLEAESVPMAVIIGVAVGAGVAFLVLMATIVAFCCARSQRNLKGVVSAKNDIRVEIVHKEPASGREGEEHSTIKQLMMDRGEFQQDSVLKQLEVLKEEEKEFQNLKDPTNGYYSVNTFKEHHSTPTISLSSCQPDLRPAGKQRVPTGMSFTNIYSTLSGQGRLYDYGQRFVLGMGSSSIELCEREFQRGSLSDSSSFLDTQCDSSVSSSGKQDGYVQFDKASKASASSSHHSQSSSQNSDPSRPLQRRMQTHV

SEQ ID NO: 2301 - protein, 371 aa, Artificial Sequence
  Synthetic polypeptide
FNPLSVKCHLDSLWDLGIRGPETKMLLPYCLLTKLGRRVVLWATSSSMFLFGIAAAFAVDYYTFMAARFFLAMVASGYLVVGFVYVMEFIGMKSRTWASVHLHSFFAVGTLLVALTGYLVRTWWLYQMILSTVTVPFILCCWVLPETPFWLLSEGRYEEAQKIVDIMAKWNRASSCKLSELLSLDLQGPVSNSPTEVQKHNLSYLFYNWSITKRTLTVWLIWFTGSLGFYSFSLNSVNLGGNEYLNLFLLGVVEIPAYTFVCIAMDKVGRRTVLAYSLFCSALACGVVMVIPQKHYILGVVTAMVGKFAIGAAFGLIYLYTAELYPTIVRSLAVGSGSMVCRLASILAPFSVDLSSIWIFIPQLLGQHLQE

SEQ ID NO: 2302 - protein, 371 aa, Artificial Sequence; identical to SEQ ID NO: 2301
  Synthetic polypeptide

SEQ ID NO: 2303 - protein, 370 aa, Artificial Sequence
  Synthetic polypeptide
TGHYHLAHLLRGTGIGIGFYGNSETSDGVSQLSSALLHANHTLSTIDHLVLETVERLGEAVRTELTTLEEVLEPRTELVAAARGARRQAEAAAQQLQGLAFWQGVPLSPLQVAENVSFVEEYRWLAYVLLLLLELLVCLFTLLGLAKQSKWLVIVMTVMSLLVLVLSWGSMGLEAATAVGLSDFCSNPDPYVLNLTQEETGLSSDILSYYLLCNRAVSNPFQQRLTLSQRALANIHSQLLGLEREAVPQFPSAQKPLLSLEETLNVTEGNFHQLVALLHCRSLHKDYGAALRGLCEDALEGLLFLLLFSLLSAGALATALCSLPRAWALFPPRNPSALCSGSRLSEPLLPAGLEPGSPLRSFPGCRRRPH

SEQ ID NO: 2304 - protein, 369 aa, Artificial Sequence
  Synthetic polypeptide
SSFPNPSSFKVPVSVLAQRHTSQTAGWPPCTFIRRSSTYRSKGFDVTVKYTQGSWTGFVGEDLVTIPKGFNTSFLVNIATIFESENFFLPGIKWNGILGLAYATLAKPSSSLETFFDSLVTQANIPNVFSMQMCGAGLPVAGSGTNGGSLVLGGIEPSLYKGDIWYTPIKEEWYYQIEILKLEIGGQSLNLDCREYNADKAIVDSGTTLLRLPQKVFDAVVEAVARASLLYIQPMMGAGLNYECYRFGISPSTNALVIGATVMEGFYVIFDRAQKRVGFAASPCAEIAGAAVSEISGPFSTEDVASNCVPAQSLSEPILWIVSYALMSVCGAILLVLIVLLLLPFRCQRRPRDPEVVNDESSLVRHRWK

SEQ ID NO: 2305 - protein, 368 aa, Artificial Sequence
  Synthetic polypeptide
EERPWNQRVNFEDCTGRQRTAYFSLDTRFKVGTDGVITVKRPLRFHNPQIHFLVYAWDSTYRKFSTKVTLNTVGHHHRPPPHQASVSGIQAELLTFPNSSPGLRRQKRDWVIPPISCPENEKGPFPKNLVQLFSHAVSSNGNAVEDPMEILITVTDQNDNKPEFTQEVFKGSVMEGALPGTSVMEVTATDADDDVNTYNAAIAYTILSQDPELPDKNMFTINRNTGVISVVTTGLDRESFPTYTLVVQAADLQGEGLSTTATAVITVTDTNDNPPIFNPTTYKGQVPENEANVVITTLKVTDADAPNTPAWEAVYTILNDDGGQFVVTTNPVNNDGILKTAKVCMVPGKMQKLASSQLFIPLSPGLGF

SEQ ID NO: 2306 - protein, 368 aa, Artificial Sequence
  Synthetic polypeptide
GVRSAPPRAQSASPSASEHLRRGPGTPSSLSSRRGPACPRPRAARPAPRVPLPAHALPRVLAFGLLLAAATATFAAAQEECVCENYKLAVNCFVNNNRQCQCTSVGAQNTVICSKLAAKCLVMKAEMNGSKLGRRAKPEGALQNNDGLYDPDCDESGLFKAKQCNGTSMCWCVNTAGVRRTDKDTEITCSERVRTYWIIIELKHKAREKPYDSKSLRTALQKEITTRYQLDPKFITSILYENNVITIDLVQNSSQKTQNDVDIADVAYYFEKDVKGESLFHSKKMDLTVNGEQLDLDPGQTLIYYVDEKAPEFSMQGLKAGVIAVIVVVVIAVVAGIVVLVISRKKRMAKYEKAEIKEMGEMHRELNA

SEQ ID NO: 2307 - protein, 367 aa, Artificial Sequence
  Synthetic polypeptide
AGHGGSCLQSQHFGRPRGADHEVKRSRPSWPTWSSTYRSKGFDVTVKYTQGSWTGFVGEDLVTIPKGFNTSFLVNIATIFESENFFLPGIKWNGILGLAYATLAKPSSSLETFFDSLVTQANIPNVFSMQMCGAGLPVAGSGTNGGSLVLGGIEPSLYKGDIWYTPIKEEWYYQIEILKLEIGGQSLNLDCREYNADKAIVDSGTTLLRLPQKVFDAVVEAVARASLLYIQPMMGAGLNYECYRFGISPSTNALVIGATVMEGFYVIFDRAQKRVGFAASPCAEIAGAAVSEISGPFSTEDVASNCVPAQSLSEPILWIVSYALMSVCGAILLVLIVLLLLPFRCQRRPRDPEVVNDESSLVRHRWK

SEQ ID NO: 2308 - protein, 367 aa, Artificial Sequence
  Synthetic polypeptide
ARCDDSHLQSQHFGRLRWVDHKVKRSRPSWPTWSSTYRSKGFDVTVKYTQGSWTGFVGEDLVTIPKGFNTSFLVNIATIFESENFFLPGIKWNGILGLAYATLAKPSSSLETFFDSLVTQANIPNVFSMQMCGAGLPVAGSGTNGGSLVLGGIEPSLYKGDIWYTPIKEEWYYQIEILKLEIGGQSLNLDCREYNADKAIVDSGTTLLRLPQKVFDAVVEAVARASLLYIQPMMGAGLNYECYRFGISPSTNALVIGATVMEGFYVIFDRAQKRVGFAASPCAEIAGAAVSEISGPFSTEDVASNCVPAQSLSEPILWIVSYALMSVCGAILLVLIVLLLLPFRCQRRPRDPEVVNDESSLVRHRWK

SEQ ID NO: 2309 - protein, 367 aa, Artificial Sequence
  Synthetic polypeptide
AGHSGSPLSSQHCKRPRREKYPQPKGQKKKKIVKYGMGGLIILFLIAIIWFPLLFMSLVRSVVGVVNQPIDVTVTLKLGGYEPLFTMSAQQPSIIPFTAQAYEELSRQFDPQPLAMQFISQYSPEDIVTAQIEGSSGALWRISPPSRAQMKRELYNGTADITLRFTWNFQRDLAKGGTVEYANEKHMLALAPNSTARRQLASLLEGTSDQSVVIPNLFPKYIRAPNGPEANPVKQLQPNEEADYLGVRIQLRREQGAGATGFLEWWVIELQECRTDCNLLPMVIFSDKHHGAVRVHRAGHRQVRARILQRDLALHYVRGAAVRGPHPQALPGHLPGAGDSGAGAGGGVVRQAHLPLPLTGDHDQVDS

SEQ ID NO: 2310 - protein, 366 aa, Artificial Sequence
  Synthetic polypeptide
DRGKKETDNLISIFIGQFTAMNEPQCFYNESIAFFYNRSGKHLATEWNTVSKLVMGLGITVCIFIMLANLLVMVAIYVNRRFHFPIYYLMANLAAADFFAGLAYFYLMFNTGPNTRRLTVSTWLLRQGLIDTSLTASVANLLAIAIERHITVFRMQLHTRMSNRRVVVVIVVIWTMAIVMGAIPSVGWNCICDIENCSNMAPLYSDSYLVFWAIFNLVTFVVMVVLYAHIFGYVRQRTMRMSRHSSGPRRNRDTMMSLLKTVVIVLGAFIICWTPGLVLLLLDVCCPQCDVLAYEKFFLLLAEFNSAMNPIIYSYRDKEMSATFRQILCCQRSENPTGPTEGSDRSASSLNHTILAGVHSNDHSVV

SEQ ID NO: 2311 - protein, 366 aa, Artificial Sequence; identical to SEQ ID NO: 2310
  Synthetic polypeptide

SEQ ID NO: 2312 - protein, 366 aa, Artificial Sequence; identical to SEQ ID NO: 2310
  Synthetic polypeptide

SEQ ID NO: 2313 - protein, 366 aa, Artificial Sequence; identical to SEQ ID NO: 2310
  Synthetic polypeptide

SEQ ID NO: 2314 - protein, 366 aa, Artificial Sequence; identical to SEQ ID NO: 2310
  Synthetic polypeptide

SEQ ID NO: 2315 - protein, 363 aa, Artificial Sequence
  Synthetic polypeptide
SQHFGRLRQVDYLRKYFGEKIGLYFAWLGVYTQMLIPASIVGIIVFLYGCATMDENIPSMEMCDQRHNITMCPLCDKTCSYWKMSSACATARASHLFDNPATVFFSVFMALWAATFMEHWKRKQMRLNYRWDLTGFEEEEDHPRAEYEARVLEKSLKKESRNKETDKVKLTWRDRFPAYLTNLVSIIFMIAVTFAIVLGVIIYRISMAAALAMNSSPSVRSNIRVTVTATAVIINLVVIILLDEVYGCIARWLTKIEVPKTEKSFEERLIFKAFLLKFVNSYTPIFYVAFFKGRFVGRPGDYVYIFRSFRMEEVTEILFISGSPFCLAYDLSTPCTWEKQLQHICSAKSSRFLSFLLETFLFP

SEQ ID NO: 2316 - protein, 363 aa, Artificial Sequence
  Synthetic polypeptide
GSFPCSCLLSLACCHVRHASSPFAMSLSFLRPPQPCRTVLTSVARLSSKSVNAQVTDINSKGLELRKTVTTVETQNLEGLHHDGQFCHKPCPPGERKARDCTVNGDEPDCVPCQEGKEYTDKAHFSSKCRRCRLCDEGHGLEVEINCTRTQNTKCRCKPNFFCNSTVCEHCDPCTKCEHGIIKECTLTSNTKCKEEGSRSNLGWLCLLLLPIPLIVWVKRKEVQKTCRKHRKENQGSHESPTLNPETVAINLSDVDLSKYITTIAGVMTLSQVKGFVRKNGVNEAKIDEIKNDNVQDTAEQKVQLLRNWHQLHGKKEAYDTLIKDLKKANLCTLAEKIQTIILKDITSDSENSNFRNEIQSLV

SEQ ID NO: 2317 - protein, 363 aa, Artificial Sequence
  Synthetic polypeptide
RAAICTGIGIGFYGNSETSDGVSQLSSALLHANHTLSTIDHLVLETVERLGEAVRTELTTLEEVLEPRTELVAAARGARRQAEAAAQQLQGLAFWQGVPLSPLQVAENVSFVEEYRWLAYVLLLLLELLVCLFTLLGLAKQSKWLVIVMTVMSLLVLVLSWGSMGLEAATAVGLSDFCSNPDPYVLNLTQEETGLSSDILSYYLLCNRAVSNPFQQRLTLSQRALANIHSQLLGLEREAVPQFPSAQKPLLSLEETLNVTEGNFHQLVALLHCRSLHKDYGAALRGLCEDALEGLLFLLLFSLLSAGALATALCSLPRAWALFPPRNPSALCSGSRLSEPLLPAGLEPGSPLRSFPGCRRRPH

SEQ ID NO: 2318 - protein, 363 aa, Artificial Sequence
  Synthetic polypeptide
QAHAMAAVIPKVTKHLLSNPVFTCIILAACMEIAVVAGFAAFLGKYLEQQFNLTTSSANQLLGMTAIPCACLGIFLGGLLVKKLSLSALGAIRMAMLVNLVSTACYVSFLFLGCDTGPVAGVTVPYGNSTAPGSALDPYSPCNNNCECQTDSFTPVCGADGITYLSACFAGCNSTNLTGCACLTTVPAENATVVPGKCPSPGCQEAFLTFLCVMCICSLIGAMAQTPSVIILIRTVSPELKSYALGVLFLLLRLLGFIPPPLIFGAGIDSTCLFWSTFCGEQGACVLYDNVVYRYLYVSIAIALKSFAFILYTTTWQCLRKNYKRYIKNHEGGLSTSTEYQDIETEKTCPESHSPSEDSFVRS

SEQ ID NO: 2319 - protein, 362 aa, Artificial Sequence
  Synthetic polypeptide
LSHSYVNLTRDVMPGPRQELLCAFWKSDSDRGGHWATEGCQVLGSKNGSTTCQCSHLSSFAILMAHYDVEDWKLTLITRVGLALSLFCLLLCILTFLLVRPIQGSRTTIHLHLCICLFVGSTIFLAGIENEGGQVGLRCRLVAGLLHYCFLAAFCWMSLEGLELYFLVVRVFQGQGLSTRWLCLIGYGVPLLIVGVSAAIYSKGYGRPRYCWLDFEQGFLWSFLGPVTFIILCNAVIFVTTVWKLTQKFSEINPDMKKLKKARALTITAIAQLFLLGCTWVFGLFIFDDRSLVLTYVFTILNCLQGAFLYLLHCLLNKKVREEYRKWACLVAGGSKYSEFTSTTSGTGHNQTRALRASESGI

SEQ ID NO: 2320 - protein, 362 aa, Artificial Sequence; identical to SEQ ID NO: 2319
  Synthetic polypeptide

SEQ ID NO: 2321 - protein, 362 aa, Artificial Sequence; identical to SEQ ID NO: 2319
  Synthetic polypeptide

SEQ ID NO: 2322 - protein, 362 aa, Artificial Sequence
  Synthetic polypeptide
PRETHFGLVTSGTGTLEAREYRLDKEESPAPWDRQNPLEPKNKARFSIPSMTEDYAGRYRCYYRSPVGWSQPSDPLELVMTGAYSKPTLSALPSPLVTSGKSVTLLCQSRSPMDTFLLIKERAAHPLLHLRSEHGAQQHQAEFPMSPVTSVHGGTYRCFSSHGFSHYLLSHPSDPLELIVSGSLEDPRPSPTRSVSTAGPEDQPLMPTGSVPHSGLRRHWEVLIGVLVVSILLLSLLLFLLLQHWRQGKHRTLAQRQADFQRPPGAAEPEPKDGGLQRRSSPAADVQGENFCAAVKNTQPEDGVEMDTRQSPHDEDPQAVTYAKVKHSRPRREMASPPSPLSGEFLDTKDRQAEEDRQMDTE

SEQ ID NO: 2323 - protein, 362 aa, Artificial Sequence
  Synthetic polypeptide
VDGLRSGVRIQPGQHGESPSLLKIQKISQDKVFWTDIINEAIFSANRLTGSDVNLLAENLLSPEDMVLFHNLTQPRGVNWCERTTLSNGGCQYLCLPAPQINPHSPKFTCACPDGMLLARDMRSCLTEAEAAVATQETSTVRLKVSSTAVRTQHTTTRPVPDTSRLPGATPGLTTVEIVTMSHQALGDVAGRGNEKKPSSVRALSIVLPIATELGLWSRGQLCDRACLSLQCSSSSFAWGSSFYGRTGGLRTSTASTLTTPSIRRPQRMRSTFATTRTATATPRDRWSVWRMTWREHLPGVPSLPRTLPETSPALFYSKTEKTKALPARALFYIFIHLGGRTGFGQCPCNGLGWDFGFFLSS

SEQ ID NO: 2324 - protein, 361 aa, Artificial Sequence
  Synthetic polypeptide
TGHYHLAHLLRGTGIGIGFYGNSETSDGVSQLSSALLHANHTLSTIDHLVLETVERLGEAVRTELTTLEEVLEPRTELVAAARGARRQAEAAAQQLQGLAFWQGVPLSPLQVAENVSFVEEYRWLAYVLLLLLELLVCLFTLLGLAKQSKWLVIVMTVMSLLVLVLSWGSMGLEAATAVGLSDFCSNPDPYVLNLTQEETGLSSDILSYYLLCNRAVSNPFQQRLTLSQRALANIHSQLLGLEREAVPQFPSAQKPLLSLEETLNVTEGNFHQLVALLHCRSLHKDYGAALRGLCEDALEGLLFLLLFSLLSAGALATALCSLPRAWALFPPSDDYDDTDDDDPFNPQQESKRFVQWQSSI

SEQ ID NO: 2325 - protein, 361 aa, Artificial Sequence
  Synthetic polypeptide
YSVAFTMDQFPESVTENFEYDDLAEACYIGDIVVFGTVFLSIFYSVIFAIGLVGNLLVVFALTNSKKPKSVTDIYLLNLALSDLLFVATLPFWTHYLINEKGLHNAMCKFTTAFFFIGFFGSIFFITVISIDRYLAIVLAANSMNNRTVQHGVTISLGVWAAAILVAAPQFMFTKQKENECLGDYPEVLQEIWPVLRNVETNFLGFLLPLLIMSYCYFRIIQTLFSCKNHKKAKAIKLILLVVIVFFLFWTPYNVMIFLETLKLYDFFPSCDMRKDLRLALSVTETVAFSHCCLNPLIYAFAGEKFRRYLYHLYGKCLAVLCGRSVHVDFSSSESQRSRHGSVLSSNFTYHTSDGDALLLL

SEQ ID NO: 2326 - protein, 360 aa, Artificial Sequence
  Synthetic polypeptide
TGHYHLAHLLRGTGIGIGFYGNSETSDGVSQLSSALLHANHTLSTIDHLVLETVERLGEAVRTELTTLEEVLEPRTELVAAARGARRQAEAAAQQLQGLAFWQGVPLSPLQVAENVSFVEEYRWLAYVLLLLLELLVCLFTLLGLAKQSKWLVIVMTVMSLLVLVLSWGSMGLEAATAVGLSDFCSNPDPYVLNLTQEETGLSSDILSYYLLCNRAVSNPFQQRLTLSQRALANIHSQLLGLEREAVPQFPSAQKPLLSLEETLNVTEGNFHQLVALLHCRSLHKDYGAALRGLCEDALEGLLFLLLFSLLSAGALATALCSLPRAWALFPPSDDYDDTDDDDPFNPQESKRFVQWQSSI

SEQ ID NO: 2327 - protein, 360 aa, Artificial Sequence
  Synthetic polypeptide
EPCSIAGGEWQDSFNYTTPDYGHYDDKDTLDLNTPVDKTSNTLRVPDILALVIFAVVFLVGVLGNALVVWVTAFEAKRTINAIWFLNLAVADFLSCLALPILFTSIVQHHHWPFGGAACSILPSLILLNMYASILLLATISADRFLLVFKPIWCQNFRGAGLAWIACAVAWGLALLLTIPSFLYRVVREEYFPPKVLCGVDYSHDKRRERAVAIVRLVLGFLWPLLTLTICYTFILLRTWSRRATRSTKTLKVVVAVVASFFIFWLPYQVTGIMMSFLEPSSPTFLLLKKLDSLCVSFAYINCCINPIIYVVAGQGFQGRLRKSLPSLLRNVLTEESVVRESKSFTRSTVDTMAQKTQAV

SEQ ID NO: 2328 - protein, 360 aa, Artificial Sequence
  Synthetic polypeptide
AMLSWELITAAHELGVAHPPGYPLFTLVAKLAITLFPFGSIAYRVNLLCGLFGAVAASLLFFTVFRLSGSSAGGILAAGVFSFSRLTWQWSIAAEVFSLNNLFVGLLMALTVHFEEAATAKERSKVAKIGAFCCGLSLCNQHTIILYVLCIIPWILFQLLKKKELSLGSLLKLSLYFSAGLLPYVHLPISSYLNHARWTWGDQTTLQGFLTHFLREEYGTFSLAKSEIGSSMSEILLSQVTNMRTELSFNIQALAVCANICLATKDRQNPSLVWLFTGMFCIYSLFFAWRANLDISKPLFMGVVERFWMQSNAVVAVLAGIGLAAVVSETNRVLNSNGLQCLEWLSATLFVVYQIYSNYR

SEQ ID NO: 2329 - protein, 360 aa, Artificial Sequence
  Synthetic polypeptide
SRLALYLHRSCGPPIISSTQTQHALHGEKGQIKCFIRSTPPPDRIAWSWKENVLESGTSGRYTVETISTEEGVISTLTISNIVRADFQTIYNCTAWNSFGSDTEIIRLKEQESVPMAVIIGVAVGAGVAFLVLMATIVAFCCARSQRNLKGVVSAKNDIRVEIVHKEPASGREGEEHSTIKQLMMDRGEFQQDSVLKQLEVLKEEEKEFQNLKDPTNGYYSVNTFKEHHSTPTISLSSCQPDLRPAGKQRVPTGMSFTNIYSTLSGQGRLYDYGQRFVLGMGSSSIELCEREFQRGSLSDSSSFLDTQCDSSVSSSGKQDGYVQFDKASKASASSSHHSQSSSQNSDPSRPLQRRMQTHV

SEQ ID NO: 2330 - protein, 358 aa, Artificial Sequence
  Synthetic polypeptide
GVRSAPPRAQSASPSASEHLRRGPGTPSSLSSRRGPACPRPRAARPAPRVLAFGLLLAAATATFAAAQEECVCENYKLAVNCFVNNNRQCQCTSVGAQNTVICSKLAAKCLVMKAEMNGSKLGRRAKPEGALQNNDGLYDPDCDESGLFKAKQCNGTSMCWCVNTAGVRRTDKDTEITCSERVRTYWIIIELKHKAREKPYDSKSLRTALQKEITTRYQLDPKFITSILYENNVITIDLVQNSSQKTQNDVDIADVAYYFEKDVKGESLFHSKKMDLTVNGEQLDLDPGQTLIYYVDEKAPEFSMQGLKAGVIAVIVVVVIAVVAGIVVLVISRKKRMAKYEKAEIKEMGEMHRELNA

SEQ ID NO: 2331 - protein, 358 aa, Artificial Sequence
  Synthetic polypeptide
EQLRSTAPSVSDAEDGRFLHFHLRKIITIRIFDREEYEKECSFSLVLEEPKWIRRGMKGGFTITDEYDDKQPLTSKEEEERRIAEMGRPILGEHTKLEVIIEESYEFKSTVDKLIKKTNLALVVGTNSWREQFIEAITVSAGEDDDDDECGEEKLPSCFDYVMHFLTVFWKVLFAFVPPTEYWNGWACFIVSILMIGLLTAFIGDLASHFGCTIGLKDSVTAVVFVALGTSVPDTFASKVAATQDQYADASIGNVTGSNAVNVFLGIGVAWSIAAIYHAANGEQFKVSPGTLAFSVTLFTIFAFINVGVLLYRRRPEIGGELGGPRTAKLLTSCLFVLLWLLYIFFSSLEAYCHIKGF

SEQ ID NO: 2332 - protein, 358 aa, Artificial Sequence; identical to SEQ ID NO: 2331
  Synthetic polypeptide

SEQ ID NO: 2333 - protein, 358 aa, Artificial Sequence; identical to SEQ ID NO: 2331
  Synthetic polypeptide

SEQ ID NO: 2334 - protein, 358 aa, Artificial Sequence; identical to SEQ ID NO: 2331
  Synthetic polypeptide

SEQ ID NO: 2335 - protein, 358 aa, Artificial Sequence
  Synthetic polypeptide
EQLRSTAPSVSDAEDGRFLHFHLRKIITIRIFDREEYEKECSFSLVLEEPKWIRRGMKEGFCFTDEYDDKQPLTSKEEEERRIAEMGRPILGEHTKLEVIIEESYEFKSTVDKLIKKTNLALVVGTNSWREQFIEAITVSAGEDDDDDECGEEKLPSCFDYVMHFLTVFWKVLFAFVPPTEYWNGWACFIVSILMIGLLTAFIGDLASHFGCTIGLKDSVTAVVFVALGTSVPDTFASKVAATQDQYADASIGNVTGSNAVNVFLGIGVAWSIAAIYHAANGEQFKVSPGTLAFSVTLFTIFAFINVGVLLYRRRPEIGGELGGPRTAKLLTSCLFVLLWLLYIFFSSLEAYCHIKGF

SEQ ID NO: 2336 - protein, 358 aa, Artificial Sequence
  Synthetic polypeptide
PRETHFGLVTSGTGTLEAREYRLDKEESPAPWDRQNPLEPKNKARFSIPSMTEDYAGRYRCYYRSPVGWSQPSDPLELVMTGAYSKPTLSALPSPLVTSGKSVTLLCQSRSPMDTFLLIKERAAHPLLHLRSEHGAQQHQAEFPMSPVTSVHGGTYRCFSSHGFSHYLLSHPSDPLELIVSGSLEDPRPSPTRSVSTAAGPEDQPLMPTGSVPHSGLRRHWEVLIGVLVVSILLLSLLLFLLLQHWRQGKHRTLAQRQADFQRPPGAAEPEPKDGGLQRRSSPAADVQGENFCAAVKNTQPEDGVEMDTRAAASEAPQDVTYAQLHSFTLRQKATEPPPSQEGASPAEPSVYATLAIH

SEQ ID NO: 2337 - protein, 357 aa, Artificial Sequence
  Synthetic polypeptide
AEIQMKTTYFHLSDLQSNQQMHRKTASLNSPVSCKEKPDRVEEPPDYSLHWPEGLKGEEIKKCGREGITLNKYNQQYHKLFKDVPLEEVVLKVCSCALQRDFLLQGRLYISPNWLCFHASLFGKDIKVVIPVVSVQMIKKHKMARLLPNGLAITTNTSQKYIFVSLLSRDSVYDLLRRVCTHLQPSSKKSLSVREFSGEPESLEVLIPEMKWRKVCPSSRSLSLPDNIPCIPPSSVDSTDSFFPSRKPPMSEKSRAQVASENGGRWAWPMPGWGPACPKKMPNCSPTAKNAVYEEDELEEEPRSTGELRLWDYRLLKVFFVLICFLVMSSSYLAFRISRLEQQLCSLSWDDPVPGHR

SEQ ID NO: 2338 - protein, 356 aa, Artificial Sequence
  Synthetic polypeptide
RKKRTKEELKSPPPVILIGNSPSDESEERERDPKVLTFPEYITSLSDSGTKHMAAGVRMECHSKGRCPSSCPLCHVTSSPDTPAEPVLLEVTKAAPIYELVTNNQTQRLLQEATMSSLWCSGTGDVIEDWCRCDSTAFGADGLPTCAPLPQPVLRLSTVHEPSSTLVVLEWEHSEPPIGVQIVDYLLRQEKVTDRMDHSKVETETVLSFVDDIISGAKSPCAMPSQVPDKQLTTISLIIRCLEPDTIYMFTLWGVDNTGRRSRPSDVIVKTPCPVVDDVKAQEIADKIYNLFNGYTSGKEQQTAYNTLLDLGSPTLHRVLYHYNQHYESFGEFTWRCEDELGPRLPACWDSQRSCR

SEQ ID NO: 2339 - protein, 356 aa, Artificial Sequence
  Synthetic polypeptide
PGAVAHACNPSTLGGRGRQITRSSTYRSKGFDVTVKYTQGSWTGFVGEDLVTIPKGFNTSFLVNIATIFESENFFLPGIKWNGILGLAYATLAKPSSSLETFFDSLVTQANIPNVFSMQMCGAGLPVAGSGTNGGSLVLGGIEPSLYKGDIWYTPIKEEWYYQIEILKLEIGGQSLNLDCREYNADKAIVDSGTTLLRLPQKVFDAVVEAVARASLLYIQPMMGAGLNYECYRFGISPSTNALVIGATVMEGFYVIFDRAQKRVGFAASPCAEIAGAAVSEISGPFSTEDVASNCVPAQSLSEPILWIVSYALMSVCGAILLVLIVLLLLPFRCQRRPRDPEVVNDESSLVRHRWK

SEQ ID NO: 2340 - protein, 356 aa, Artificial Sequence
  Synthetic polypeptide
HFGRPRQADHKVKRSRPSWPTWSSTYRSKGFDVTVKYTQGSWTGFVGEDLVTIPKGFNTSFLVNIATIFESENFFLPGIKWNGILGLAYATLAKPSSSLETFFDSLVTQANIPNVFSMQMCGAGLPVAGSGTNGGSLVLGGIEPSLYKGDIWYTPIKEEWYYQIEILKLEIGGQSLNLDCREYNADKAIVDSGTTLLRLPQKVFDAVVEAVARASLLYIQPMMGAGLNYECYRFGISPSTNALVIGATVMEGFYVIFDRAQKRVGFAASPCAEIAGAAVSEISGPFSTEDVASNCVPAQSLSEPILWIVSYALMSVCGAILLVLIVLLLLPFRCQRRPRDPEVVNDESSLVRHRWK

SEQ ID NO: 2341 - protein, 355 aa, Artificial Sequence
  Synthetic polypeptide
GRMQWLTPVIPAFWEAEAVRSQAVGTLDREDEQFVRNNIYEVMVLAMDNGSPPTTGTGTLLLTLIDVNDHGPVPEPRQITICNQSPVRQVLNITDKDLSPHTSPFQAQLTDDSDIYWTAEVNEEGDTVVLSLKKFLKQDTYDVHLSLSDHGNKEQLTVIRATVCDCHGHVETCPGPWKGGFILPVLGAVLALLFLLLVLLLLVRKKRKIKEPLLLPEDDTRDNVFYYGEEGGGEEDQDYDITQLHRGLEARPEVVLRNDVAPTIIPTPMYRPRPANPDEIGNFIIENLKAANTDPTAPPYDTLLVFDYEGSGSDAASLSSLTSSASDQDQDYDYLNEWGSRFKKLADMYGGGEDD

SEQ ID NO: 2342 - protein, 355 aa, Artificial Sequence; identical to SEQ ID NO: 2341
  Synthetic polypeptide

SEQ ID NO: 2343 - protein, 354 aa, Artificial Sequence
  Synthetic polypeptide
RAAICTGIGIGFYGNSETSDGVSQLSSALLHANHTLSTIDHLVLETVERLGEAVRTELTTLEEVLEPRTELVAAARGARRQAEAAAQQLQGLAFWQGVPLSPLQVAENVSFVEEYRWLAYVLLLLLELLVCLFTLLGLAKQSKWLVIVMTVMSLLVLVLSWGSMGLEAATAVGLSDFCSNPDPYVLNLTQEETGLSSDILSYYLLCNRAVSNPFQQRLTLSQRALANIHSQLLGLEREAVPQFPSAQKPLLSLEETLNVTEGNFHQLVALLHCRSLHKDYGAALRGLCEDALEGLLFLLLFSLLSAGALATALCSLPRAWALFPPSDDYDDTDDDDPFNPQQESKRFVQWQSSI

SEQ ID NO: 2344 - protein, 353 aa, Artificial Sequence
  Synthetic polypeptide
TREAEVAVSQDPATALQPGSSTYRSKGFDVTVKYTQGSWTGFVGEDLVTIPKGFNTSFLVNIATIFESENFFLPGIKWNGILGLAYATLAKPSSSLETFFDSLVTQANIPNVFSMQMCGAGLPVAGSGTNGGSLVLGGIEPSLYKGDIWYTPIKEEWYYQIEILKLEIGGQSLNLDCREYNADKAIVDSGTTLLRLPQKVFDAVVEAVARASLLYIQPMMGAGLNYECYRFGISPSTNALVIGATVMEGFYVIFDRAQKRVGFAASPCAEIAGAAVSEISGPFSTEDVASNCVPAQSLSEPILWIVSYALMSVCGAILLVLIVLLLLPFRCQRRPRDPEVVNDESSLVRHRWK

SEQ ID NO: 2345 - protein, 353 aa, Artificial Sequence
  Synthetic polypeptide
RAAICTGIGIGFYGNSETSDGVSQLSSALLHANHTLSTIDHLVLETVERLGEAVRTELTTLEEVLEPRTELVAAARGARRQAEAAAQQLQGLAFWQGVPLSPLQVAENVSFVEEYRWLAYVLLLLLELLVCLFTLLGLAKQSKWLVIVMTVMSLLVLVLSWGSMGLEAATAVGLSDFCSNPDPYVLNLTQEETGLSSDILSYYLLCNRAVSNPFQQRLTLSQRALANIHSQLLGLEREAVPQFPSAQKPLLSLEETLNVTEGNFHQLVALLHCRSLHKDYGAALRGLCEDALEGLLFLLLFSLLSAGALATALCSLPRAWALFPPSDDYDDTDDDDPFNPQESKRFVQWQSSI

SEQ ID NO: 2346 - protein, 351 aa, Artificial Sequence
  Synthetic polypeptide
NLRQLAIGVDPPAQHSSPAEKWLDCLKKKKRKEKKGQAPLKGHQPQRLKADKPTKMRKDQYKNIENSKCHSALFPPNDCITSPARFRNRVEAEMPEMTEVEFIIWIGTKFTELKSPDEGFEGKSLYESWTKKSPSPEFSGMPRISKLGSGNDFEVFFQRLGIASGRARYTKNWETNKFSGYPLYHSVYETYELVEKFYDPMFKYHLTVAQVRGGMVFELANSIVLPFDCRDYAVVLRKYADKIYSISMKHPQEMKTYSVSFDSLFSAVKNFTEIASKFSERLQDFDKSKHVIYAPSSHNKYAGESFPGIYDALFDIESKVDPSKAWGEVKRQIYVAAFTVQAAAETLSEVA

SEQ ID NO: 2347 - protein, 351 aa, Artificial Sequence; identical to SEQ ID NO: 2346
  Synthetic polypeptide

SEQ ID NO: 2348 - protein, 351 aa, Artificial Sequence
  Synthetic polypeptide
GFPIHVKLTFQDLSKQVEMSYGTVRDSAVYEYFRAKGTNPLEQDSTFAELWRTISKNGGADNCVSSPSEGIRKAKKGNYAFLWDVAVVEYAALTDDDCSVTVIGNSISSKGYGIALQHGSPYRDLFSQRILELQDTGDLDVLKQKWWPHMGRCDLTSHASAQADGKSLKLHSFAGVFCILAIGLLLACLVAALELWWNSNRCHQETPKEDKEVNLEQVHRRMNSLMDEDIAHKQISPASIELSALEMGGLAPTQTLEPTREYQNTQLSVSTFLPEQSSHGTSRTLSSGPSSNLPLPLSSSATMPSMQCKHRSPNGGLFRQSPVKTPIPMSFQPVPGGVLPEALDTSHGTSI

SEQ ID NO: 2349 - protein, 351 aa, Artificial Sequence; identical to SEQ ID NO: 2348
  Synthetic polypeptide

SEQ ID NO: 2350 - protein, 351 aa, Artificial Sequence
  Synthetic polypeptide
GQEIETILANKVVTLTANDKTSVSFSSLPGQGVIYNVIVWDPFLNTSAAYIPAHTYACSFEAGEGSCASLGRVSSKVFFTLFALLGFFICFFGHRFWKTELFFIGFIIMGFFFYILITRLTPIKYDVNLILTAVTGSVGGMFLVAVWWRFGILSICMLCVGLVLGFLISSVTFFTPLGNLKIFHDDGVFWVTFSCIAILIPVVFMGCLRILNILTCGVIGSYSVVLAIDSYWSTSLSYITLNVLKRALNKDFHRAFTNVPFQTNDFIILAVWGMLAVSGITLQIRRERGRPFFPPHPYKLWKQERERRVTNILDPSYHIPPLRERLYGRLTQIKGLFQKEQPAGERTPLLL

SEQ ID NO: 2351 - protein, 350 aa, Artificial Sequence
  Synthetic polypeptide
TIRKRQIHGGREQISGCPVLRAGRVGGDCFTGPDGENSWSKKYPSCGGLLQSPIDLHSDILQYDASLTPLEFQGYNLSANKQFLLTNNGHSVKLNLPSDMHIQGLQSRYSATQLHLHWGNPNDPHGSEHTVSGQHFAAELHIVHYNSDLYPDASTASNKSEGLAVLAVLIEMGSFNPSYDKIFSHLQHVKYKGQEAFVPGFNIEELLPERTAEYYRYRGSLTTPPCNPTVLWTVFRNPVQISQEQLLALETALYCTHMDDPSPREMINNFRQVQKFDERLVYTSFSQVQVCTAAGLSLGIILSLALAGILGICIVVVVSIWLFRRKSIKKGDNKGVIYKPATKMETEAHA

SEQ ID NO: 2352 - protein, 349 aa, Artificial Sequence
  Synthetic polypeptide
AVIALLHPSLRDRYNALLSNMSRIYSTAKVCLPNKTATCWSLDPDLTNILASSRSYAMLLFAWEGWHNAAGIPLKPLYEDFTALSNEAYKQDGFTDTGAYWRSWYNSPTFEDDLEHLYQQLEPLYLNLHAFVRRALHRRYGDRYINLRGPIPAHLLGDMWAQSWENIYDMVVPFPDKPNLDVTSTMLQQGWNATHMFRVAEEFFTSLELSPMPPEFWEGSMLEKPADGREVVCHASAWDFYNRKDFRIKQCTRVTMDQLSTVHHEMGHIQYYLQYKDLPVSLRRGANPGFHEAIGDVLALSVSTPEHLHKIGLLDRVTNDTEPSIRGSVLLLPETKPTLMLELSFMFQM

SEQ ID NO: 2353 - protein, 348 aa, Artificial Sequence
  Synthetic polypeptide
FQLLGRLRWLAIRLELVGNLTVFFSALMMVIYRDTLSGDTVGFVLSNALNITQTLNWLVRMTSEIETNIVAVERITEYTKVENEAPWVTDKRPPPDWPSKGKIQFNNYQVRYRPELDLVLRGITCDIGSMEKIGVVGRTGAGKSSLTNCLFRILEAAGGQIIIDGVDIASIGLHDLREKLTIIPQDPILFSGSLRMNLDPFNNYSDEEIWKALELAHLKSFVASLQLGLSHEVTEAGGNLSIGQRQLLCLGRALLRKSKILVLDEATAAVDLETDNLIQTTIQNEFAHCTVITIAHRLHTIMDSDKVMVLDNGKIIECGSPEELLQIPGPFYFMAKEAGIENVNSTKF

SEQ ID NO: 2354 - protein, 347 aa, Artificial Sequence
  Synthetic polypeptide
APVPWPTVLSLYFVSVSSFFPQSLVPPDEKHPQMQYVFIYQALLEHYLYGDTELEVTSLETHLQKIYNKIPGTSNNGLEEEFKKLTSIKIQNDKMRTGNLPANMKKNRVLQIIPYEFNRVIIPVKRGEENTDYVNASFIDGYRQKDSYIASQGPLLHTIEDFWRMIWEWKSCSIVMLTELEERGQEKCAQYWPSDGLVSYGDITVELKKEEECESYTVRDLLVTNTRENKSRQIRQFHFHGWPEVGIPSDGKGMISIIAAVQKQQQQSGNHPITVHCSAGAGRTGTFCALSTVLERVKAEGILDVFQTVKSLRLQRPHMVQTLEQYEFCYKVVQEYIDAFSDYANFK

SEQ ID NO: 2355 - protein, 347 aa, Artificial Sequence; identical to SEQ ID NO: 2354
  Synthetic polypeptide

SEQ ID NO: 2356 - protein, 347 aa, Artificial Sequence; identical to SEQ ID NO: 2354
  Synthetic polypeptide

SEQ ID NO: 2357 - protein, 347 aa, Artificial Sequence; identical to SEQ ID NO: 2354
  Synthetic polypeptide

SEQ ID NO: 2358 - protein, 347 aa, Artificial Sequence; identical to SEQ ID NO: 2354
  Synthetic polypeptide

SEQ ID NO: 2359 - protein, 347 aa, Artificial Sequence; identical to SEQ ID NO: 2354
  Synthetic polypeptide

SEQ ID NO: 2360 - protein, 347 aa, Artificial Sequence; identical to SEQ ID NO: 2354
  Synthetic polypeptide

SEQ ID NO: 2361 - protein, 345 aa, Artificial Sequence
  Synthetic polypeptide
LQCCLHIGDAPILVGNPFTCSCDIMWIKTLQEAKSSPDTQDLYCLNESSKNIPLANLQIPNCGLPSANLAAPNLTVEEGKSITLSCSVAGDPVPNMYWDVGNLVSKHMNETSHTQGSLRITNISSDDSGKQISCVAENLVGEDQDSVNLTVHFAPTITFLESPTSDHHWCIPFTVKGNPKPALQWFYNGAILNESKYICTKIHVTNHTEYHGCLQLDNPTHMNNGDYTLIAKNEYGKDEKQISAHFMGWPGIDDGANPNYPDVIYEDYGTAANDIGDTTNRSNEIPSTDVTDKTGREHLSVYAVVVIASVVGFCLLVMLFLLKLARHSKFGMKGFVLFHKIPLDG

SEQ ID NO: 2362 - protein, 345 aa, Artificial Sequence; identical to SEQ ID NO: 2361
  Synthetic polypeptide

SEQ ID NO: 2363 - protein, 345 aa, Artificial Sequence
  Synthetic polypeptide
GHRTVHSQIVEMDKVFWTDIINEAIFSANRLTGSDVNLLAENLLSPEDMVLFHNLTQPRGVNWCERTTLSNGGCQYLCLPAPQINPHSPKFTCACPDGMLLARDMRSCLTEAEAAVATQETSTVRLKVSSTAVRTQHTTTRPVPDTSRLPGATPGLTTVEIVTMSHQALGDVAGRGNEKKPSSVRALSIVLPIATELGLWSRGQLCDRACLSLQCSSSSFAWGSSFYGRTGGLRTSTASTLTTPSIRRPQRMRSTFATTRTATATPRDRWSVWRMTWREHLPGVPSLPRTLPETSPALFYSKTEKTKALPARALFYIFIHLGGRTGFGQCPCNGLGWDFGFFLSS

SEQ ID NO: 2364 - protein, 344 aa, Artificial Sequence
  Synthetic polypeptide
RKKRTKEELKSPPPVILIGNSPSDESEERERDPKVLTFPEYITSLSDSGTKHMAAGVRMECHSKGRCPSSCPLCHVTSSPDTPAEPVLLEVTKAAPIYELVTNNQTQRLLQEATMSSLWCSGTGDVIEDWCRCDSTAFGADGLPTCAPLPQPVLRLSTVHEPSSTLVVLEWEHSEPPIGVQIVDYLLRQEKVTDRMDHSKVETETVLSFVDDIISGAKSPCAMPSQVPDKQLTTISLIIRCLEPDTIYMFTLWGVDNTGRRSRPSDVIVKTPCPVVDDVKAQEIADKIYNLFNGYTSGKEQQTAYNTLLDLGSPTLHRVLYHYNQHYESFGEFTWRCEDELGPR

SEQ ID NO: 2365 - protein, 344 aa, Artificial Sequence
  Synthetic polypeptide
PTWRNPISTKNTKLTRRDGSKWTYFGPDGENSWSKKYPSCGGLLQSPIDLHSDILQYDASLTPLEFQGYNLSANKQFLLTNNGHSVKLNLPSDMHIQGLQSRYSATQLHLHWGNPNDPHGSEHTVSGQHFAAELHIVHYNSDLYPDASTASNKSEGLAVLAVLIEMGSFNPSYDKIFSHLQHVKYKGQEAFVPGFNIEELLPERTAEYYRYRGSLTTPPCNPTVLWTVFRNPVQISQEQLLALETALYCTHMDDPSPREMINNFRQVQKFDERLVYTSFSQVQVCTAAGLSLGIILSLALAGILGICIVVVVSIWLFRRKSIKKGDNKGVIYKPATKMETEAHA

SEQ ID NO: 2366 - protein, 344 aa, Artificial Sequence
  Synthetic polypeptide
LATAQDLNITCRFAGVFHVEKNGRYSISRTEAADLCKAFNSTLPTMAQMEKALSIGFETCRYGFIEGHVVIPRIHPNSICAANNTGVYILTSNTSQYDTYCFNASAPPEEDCTSVTDLPNAFDGPITITIVNRDGTRYVQKGEYRTNPEDIYPSNPTDDDVSSGSSSERSSTSGGYIFYTFSTVHPIPDEDSPWITDSTDRIPATRDQDTFHPSGGSHTTHGSESDGHSHGSQEGGANTTSGPIRTPQIPEWLIILASLLALALILAVCIAVNSRRRCGQKKKLVINSGNGAVEDRKPSGLNGEASKSQEMVHLVNKESSETPDQFMTADETRNLQNVDMKIGV

SEQ ID NO: 2367 - protein, 343 aa, Artificial Sequence
  Synthetic polypeptide
ALDRDLNITCRFAGVFHVEKNGRYSISRTEAADLCKAFNSTLPTMAQMEKALSIGFETCRYGFIEGHVVIPRIHPNSICAANNTGVYILTSNTSQYDTYCFNASAPPEEDCTSVTDLPNAFDGPITITIVNRDGTRYVQKGEYRTNPEDIYPSNPTDDDVSSGSSSERSSTSGGYIFYTFSTVHPIPDEDSPWITDSTDRIPATRDQDTFHPSGGSHTTHGSESDGHSHGSQEGGANTTSGPIRTPQIPEWLIILASLLALALILAVCIAVNSRRRCGQKKKLVINSGNGAVEDRKPSGLNGEASKSQEMVHLVNKESSETPDQFMTADETRNLQNVDMKIGV

SEQ ID NO: 2368 - protein, 342 aa, Artificial Sequence
  Synthetic polypeptide
GSFPCSCLLSLACCHVRHASSPFAMSLSFLRPPQPCRTVLTSVARLSSKSVNAQVTDINSKGLELRKTVTTVETQNLEGLHHDGQFCHKPCPPGERKARDCTVNGDEPDCVPCQEGKEYTDKAHFSSKCRRCRLCDEGHGLEVEINCTRTQNTKCRCKPNFFCNSTVCEHCDPCTKCEHGIIKECTLTSNTKCKEEVKRKEVQKTCRKHRKENQGSHESPTLNPETVAINLSDVDLSKYITTIAGVMTLSQVKGFVRKNGVNEAKIDEIKNDNVQDTAEQKVQLLRNWHQLHGKKEAYDTLIKDLKKANLCTLAEKIQTIILKDITSDSENSNFRNEIQSLV

SEQ ID NO: 2369 - protein, 340 aa, Artificial Sequence
  Synthetic polypeptide
STSLAIKFAGMESGYACFCGNNPDYWKYGEAASTECNSVCFGDHTQPCGGDGRIILFDTLVGACGGNYSAMSSVVYSPDFPDTYATGRVCYWTIRVPGASHIHFSFPLFDIRDSADMVELLDGYTHRVLARFHGRSRPPLSFNVSLDFVILYFFSDRINQAQGFAVLYQAVKEELPQERPAVNQTVAEVITEQANLSVSAARSSKVLYVITTSPSHPPQTVPGSNSWAPPMGAGSHRVEGWTVYGLATLLILTVTAIVAKILLHVTFKSHRVPASGDLRDCHQPGTSGEIWSIFYKPSTSISIFKKKLKGQSQQDDRNPLAIQDSEVTSLIWSQGQPRSI

SEQ ID NO: 2370 - protein, 340 aa, Artificial Sequence
  Synthetic polypeptide
RGWWRAAVIPATLETEVQGGAWLLSPRLCDALMAMDVMLCTASIFNLCAISVDRFVAVAVPLRYNRQGGSRRQLLLIGATWLLSAAVAAPVLCGLNDVRGRDPAVCRLEDRDYVVYSSVCSFFLPCPLMLLLYWATFRGLQRWEVARRAKLHGRAPRRPSGPGPPSPTPPAPRLPQDPCGPDCAPPAPGLPRGPCGPDCAPAAPSLPQDPCGPDCAPPAPGLPPDPCGSNCAPPDAVRAAALPPQTPPQTRRRRRAKITGRERKAMRVLPVVVGAFLLCWTPFFVVHITQALCPACSVPPRLVSAVTWLGYVNSALNPVIYTVFNAEFRNVFRKALRACC

SEQ ID NO: 2371 - protein, 339 aa, Artificial Sequence
  Synthetic polypeptide
TIRKRQIHGGREQISGCPVLRAGRVGGDCFTGPDGENSWSKKYPSCGGLLQSPIDLHSDILQYDASLTPLEFQGYNLSANKQFLLTNNGHSVKLNLPSDMHIQGLQSRYSATQLHLHWGNPNDPHGSEHTVSGQHFAAELHIVHYNSDLYPDASTASNKSEGLAVLAVLIEMGSFNPSYDKIFSHLQHVKYKGQEAFVPGFNIEELLPERTAEYYRYRGSLTTPPCNPTVLWTVFRNPVQISQEQLLALETALYCTHMDDPSPREMINNFRQVQKFDERLVYTSFSQGIILSLALAGILGICIVVVVSIWLFRRKSIKKGDNKGVIYKPATKMETEAHA

SEQ ID NO: 2372 - protein, 338 aa, Artificial Sequence
  Synthetic polypeptide
TAEYVCLANPFSVKLLPQPLLLQSACLCSCTKAHFPDCRMAALHLYKKILVDTGSSNFAVAGTPHSYIDTYFDTERSSTYRSKGFDVTVKYTQGSWTGFVGEDLVTIPKGFNTSFLVNIATIFESENFFLPGIKWNGILGLAYATLAKPSSSLETFFDSLVTQANIPNVFSMQMCGAGLPVAGSGTNGGSLVLGGIEPSLYKGDIWYTPIKEEWYYQIEILKLEIGGQSLNLDCREYNADKAIVDSGTTLLRLPQKVFDAVVEAVARASLIPEFSDGFWTGSQLACWTNSETPWSYFPKISIYLRDENSSRSFRITILPQKLQVLQCLKFPGLSQQRM

SEQ ID NO: 2373 - protein, 338 aa, Artificial Sequence
  Synthetic polypeptide
AVKRKAITIMDEYVLYYYSNLSVPIGRFQNRVHLMGDILCNDGSLLLQDVQEADQGTYICEIRLKGESQVFKKAVVLHVLPEEPKELMVHVGGLIQMGCVFQSTEVKHVTKVEWIFSGRRAKEEIVFRYYHKLRMSVEYSQSWGHFQNRVNLVGDIFRNDGSIMLQGVRESDGGNYTCSIHLGNLVFKKTIVLHVSPEEPRTLVTPAALRPLVLGGNQLVIIVGIVCATILLLPVLILIVKKTCGNKSSVNSTVLVKNTKKTNPEIKEKPCHFERCEGEKHIYSPIIVREVIEEEEPSEKSEATYMTMHPVWPSLRSDRNNSLEKKSGGGMPKTQQAF

SEQ ID NO: 2374 - protein, 338 aa, Artificial Sequence; identical to SEQ ID NO: 2373
  Synthetic polypeptide

SEQ ID NO: 2375 - protein, 338 aa, Artificial Sequence; identical to SEQ ID NO: 2373
  Synthetic polypeptide

SEQ ID NO: 2376 - protein, 338 aa, Artificial Sequence
  Synthetic polypeptide
MVPRLRSGDLPWEINPLSSCSLLREKDPLTTSGPQTDQPKEHLTNFKSGNASTTTTVIDSKNGSVPKSPGKVLKRTVTEDIVTTFSSPAAWLLVIALIITWSAVAIVMFDLVDYKNFSASSIAKIGSDPLKLVRDAMEETTDWIYGFFSLLSDIISSEDEEDDDGDEDTDKGEIDEPPLRKKEIHKDKTEKQEKPERKIQTKVTHKEKEKGKEKVREKEKPEKKATHKEKIEKKEKPETKTLAKEQKKAKTAEKSEEKTKKEVKGGKQEKVKQTAAKVKEVQKTPSKPKEKEDKEKAAVSKHEQKGQSPAIPPPLPTEQASRPTPASPALEGKYFFFS

SEQ ID NO: 2377 - protein, 337 aa, Artificial Sequence
  Synthetic polypeptide
RAPVIPTTWEAEAGELLEPGRRRSCREDQKPVMDDQRDLISNNEQLPMLGRRPGAPESKCSRGALYTGFSILVTLLLAGQATTAYFLYQQQGRLDKLTVTSQNLQLENLRMKLPKPPKPVSKMRMATPLLMQALPMGALPQGPMQNATKYGNMTEDHVMHLLQNADPLKVYPPLKGSFPENLRHLKNTMETIDWKVFESWMHHWLLFEMSRHSLEQKPTDAPPKVLTKCQEEVSHIPAVHPGSFRPKCDENGNYLPLQCYGSIGYCWCVFPNGTEVPNTRSRGHHNCSESLELEDPSSGLGVTKQDLGPGKGLAEGHLVTSSSSPAGPAPLWAGEGV

SEQ ID NO: 2378 - protein, 337 aa, Artificial Sequence
  Synthetic polypeptide
KVIFYSTDYDCTRLETMQMFTAGELSCNGYHSTVKEKRDNSLYSEVEKPPRLTLHRKSKMQSDPFFRSAQRWIAALAGTLPVLLLLLGGAGYFLWQQQEEKKTQFRKKKREQELREMAWSTMKQEQSTRVKLLEELRWRSIQYASRGERHSAYNEWKKALFKPADVILDPKTANPILLVSEDQRSVQRAKEPQDLPDNPERFNWHYCVLGCESFISGRHYWEVEVGDRKEWHIGVCSKNVQRKGWVKMTPENGFWTMGLTDGNKYRTLTEPRTNLKLPKPPKKVGVFLDYETGDISFYNAVDGSHIHTFLDVSFSEALYPVFRILTLEPTALTICPA

SEQ ID NO: 2379 - protein, 337 aa, Artificial Sequence; identical to SEQ ID NO: 2378
  Synthetic polypeptide

SEQ ID NO: 2380 - protein, 336 aa, Artificial Sequence
  Synthetic polypeptide
TPDLPVPWSWTSSLQNLSRPRSSPDDLKALTRNVNRLNESFRDLQLRLLQAPLQADLTEQVWKVQDALQNQSDSLLALAGAVQRLEGALWGLQAQAVQTEQAVALLRDRTGQQSDTAQLELYQLQVESNSSQLLLRRHAGLLDGLARRVGILGEELADVGGVLRGLNHSLSYDVALHRTRLQDLRVLVSNASEDTRRLRLAHVGMELQLKQELAMLNAVTEDLRLKDWEHSIALRNISLAKGPPGPKGDQGDEGKEGRPGIPGLPGLRGLPGERGTPGLPGPKGDDGKLGATGPMGMRGFKGDRGPKGEKGEKGDRAGDASKDILLGPWDMVLAQG

SEQ ID NO: 2381 - protein, 336 aa, Artificial Sequence; identical to SEQ ID NO: 2380
  Synthetic polypeptide

SEQ ID NO: 2382 - protein, 336 aa, Artificial Sequence; identical to SEQ ID NO: 2380
  Synthetic polypeptide

SEQ ID NO: 2383 - protein, 335 aa, Artificial Sequence
  Synthetic polypeptide
SQHSGRPRRSDHKFVRNNIYEVMVLAMDNGSPPTTGTGTLLLTLIDVNDHGPVPEPRQITICNQSPVRQVLNITDKDLSPHTSPFQAQLTDDSDIYWTAEVNEEGDTVVLSLKKFLKQDTYDVHLSLSDHGNKEQLTVIRATVCDCHGHVETCPGPWKGGFILPVLGAVLALLFLLLVLLLLVRKKRKIKEPLLLPEDDTRDNVFYYGEEGGGEEDQDYDITQLHRGLEARPEVVLRNDVAPTIIPTPMYRPRPANPDEIGNFIIENLKAANTDPTAPPYDTLLVFDYEGSGSDAASLSSLTSSASDQDQDYDYLNEWGSRFKKLADMYGGGEDD

SEQ ID NO: 2384 - protein, 335 aa, Artificial Sequence; identical to SEQ ID NO: 2383
  Synthetic polypeptide

SEQ ID NO: 2385 - protein, 335 aa, Artificial Sequence
  Synthetic polypeptide
LMLEHFQARVLVTWQGMTIRPLVDLLAVKKKQETKRSINEEIHTQFLDHLLTGIEDICGHYGHHHWKDKLNRFNKKYVKKCLIAGERSKEPQLIAFYHKMEMKQAIELVESGGMGKIPSAVSTVSMQNIHPKSLPSERILPALSKDKEEEIRKILRNNLQKTRQRLRSYNRHTLVADPYEEAWNQMLLRRQKARQLEQKINNYLTVPAHKLDSPTMSRARIGSDPLAYEPKEDLPVITIDPASPQSPESVDLVNEELKGKVLGLSRDPAKVAEEDEDDDGGIMMRSKETSSPGTDDVFTPAPSDSPSSQRIQRCLSDPGPHPEPGEGEPFFPKGQ

SEQ ID NO: 2386 - protein, 335 aa, Artificial Sequence; identical to SEQ ID NO: 2385
  Synthetic polypeptide

SEQ ID NO: 2387 - protein, 334 aa, Artificial Sequence
  Synthetic polypeptide
GRFQDGRIRTAPVHSSQHERRRRRMISAFPTETLDGHMVVRSHARVSSLTLKSIQYTDAGEYICTASNTIGQDSQSMYLEVQYAPKLQGPVAVYTWEGNQVNITCEVFAYPSATISWFRDGQLLPSSNYSNIKIYNTPSASYLEVTPDSENDFGNYNCTAVNRIGQESLEFILVQADTPSSPSIDQVEPYSSTAQVQFDEPEATGGVPILKYKAEWRAVGEEVWHSKWYDAKEASMEGIVTIVGLKPETTYAVRLAALNGKGLGEISAASEFKTQPVQAPPPTASASSSTPVPLSPPDTTWPLPALATTEPAKNIAQNHCCNMFQAGLHNALMK

SEQ ID NO: 2388 - protein, 333 aa, Artificial Sequence
  Synthetic polypeptide
PTWRNPISTKNTKLTRRDGSKWTYFGPDGENSWSKKYPSCGGLLQSPIDLHSDILQYDASLTPLEFQGYNLSANKQFLLTNNGHSVKLNLPSDMHIQGLQSRYSATQLHLHWGNPNDPHGSEHTVSGQHFAAELHIVHYNSDLYPDASTASNKSEGLAVLAVLIEMGSFNPSYDKIFSHLQHVKYKGQEAFVPGFNIEELLPERTAEYYRYRGSLTTPPCNPTVLWTVFRNPVQISQEQLLALETALYCTHMDDPSPREMINNFRQVQKFDERLVYTSFSQGIILSLALAGILGICIVVVVSIWLFRRKSIKKGDNKGVIYKPATKMETEAHA

SEQ ID NO: 2389 - protein, 333 aa, Artificial Sequence
  Synthetic polypeptide
SYENTALLYLKLPSDSRLTLILIFRMKAKNPSSGLWALPELAATAPLTSFFCLPCARPPPAMLTCLQCLRRAKSLPPGHFGPARLSVQQAGFPGLQWLTLSLFKDPSLSEVFLDCPVSEFIVTPYPYTLGLFPIFFLSKALTTPNTLHTCLLSSVSAHLSITSTRAGTSVCFLLCHIPSAQNSAGHTAGHRCRCARRCCRSCATPFLAARRRVPAGADARAARAGPCCHCARSARCASATASSTRPARAGMRAARTGARSASWTTRGPPAEPDPPPPPPAPTCASARSAGASRRCGPRGPARLRVAWASPPKPPARPGRGLAPPAPGSWRSTS

SEQ ID NO: 2390 - protein, 333 aa, Artificial Sequence; identical to SEQ ID NO: 2389
  Synthetic polypeptide

SEQ ID NO: 2391 - protein, 332 aa, Artificial Sequence
  Synthetic polypeptide
GLPSHVELTMGLSNILFVMAFLLSGAAPLKIQAYFNETADLPCQFANSQNQSLSELVVFWQDQENLVLNEVYLGKEKFDSVHSKYMGRTSFDSDSWTLRLHNLQIKDKGLYQCIIHHKKPTGMIRIHQMNSELSVLANFSQPEIVPISNITENVYINLTCSSIHGYPEPKKMSVLLRTKNSTIEYDGVMQKSQDNVTELYDVSISLSVSFPDVTSNMTIFCILETDKTRLLSSPFSIELEDPQPPPDHIPWITAVLPTVIICVMVFCLILWKWKKKKRPRNSYKCGTNTMEREESEQTKKREKIHIPERSDEAQRVFKSSKTSSCDKSDTCF

SEQ ID NO: 2392 - protein, 330 aa, Artificial Sequence
  Synthetic polypeptide
CLPLPPDDVKPLRKPRIPMETFRKVGIPIIIALLSLASIIIVVVLIKVILDKYYFLCGQPLHFIPRKQLCDGELDCPLGEDEEHCVKSFPEGPAVAVRLSKDRSTLQVLDSATGNWFSACFDNFTEALAETACRQMGYSSKPTFRAVEIGPDQDLDVVEITENSQELRMRNSSGPCLSGSLVSLHCLACGKSLKTPRVVGVEEASVDSWPWQVSIQYDKQHVCGGSILDPHWVLTAAHCFRKHTDVFNWKVRAGSDKLGSFPSLAVAKIIIIEFNPMYPKDNDIALMKLQFPLTFSGTVRPICLPFFDEELTPATPLWIIGWGFTKQNGG

SEQ ID NO: 2393 - protein, 328 aa, Artificial Sequence
  Synthetic polypeptide
NNHLTCSYPSFLKSVNFWYVLVMNDEHTERRYLLFFLLSWGLPAFVVILLIVILKGIYHQSMSQIYGLIHGDLCFIPNVYAALFTAALVPLTCLVVVFVVFIHAYQVKPQWKAYDDVFRGRTNAAEIPLILYLFALISVTWLWGGLHMAYRHFWMLVLFVIFNSLQGLYVFMVYFILHNQMCCPMKASYTVEMNGHPGPSTAFFTPGSGMPPAGGEISKSTQNLIGAMEEVPPDWERASFQQGSQASPDLKPSPQNGATFPSSGGYGQGSLIADEESQEFDDLIFALKTGAGLSVSDNESGQGSQEGGTLTDSQIVELRRIPIADTHL

SEQ ID NO: 2394 - protein, 328 aa, Artificial Sequence; identical to SEQ ID NO: 2393
  Synthetic polypeptide

SEQ ID NO: 2395 - protein, 328 aa, Artificial Sequence
  Synthetic polypeptide
DVTCSSLPSARIVRHPQPCGTQSSNGPVKKSMREKAVERRSVNKEHNSNFKAGYIPIDEDRLHKTGLRGRKGNLAICVIILLFILAVINLIITLVIWAVIRIGPNGCDSMEFHESGLLRFKQVSDMGVIHPLYKSTVGGRRNENLVITGNNQPIVFQQGTTKLSVENNKTSITSDIGMQFFDPRTQNILFSTDYETHEFHLPSGVKSLNVQKASTERITSNATSDLNIKVDGRAIVRGNEGVFIMGKTIEFHMGGNMELKAENSIILNGSVMVSTTRLPSSSSGDQLGSGDWVRYKLCMCADGTLFKVQVTSQNMGCQISDNPCGNTH

SEQ ID NO: 2396 - protein, 328 aa, Artificial Sequence
  Synthetic polypeptide
DVTCSSLPPTMIVRPPSPCGTQSSNGPVKKSMREKAVERRSVNKEHNSNFKAGYIPIDEDRLHKTGLRGRKGNLAICVIILLFILAVINLIITLVIWAVIRIGPNGCDSMEFHESGLLRFKQVSDMGVIHPLYKSTVGGRRNENLVITGNNQPIVFQQGTTKLSVENNKTSITSDIGMQFFDPRTQNILFSTDYETHEFHLPSGVKSLNVQKASTERITSNATSDLNIKVDGRAIVRGNEGVFIMGKTIEFHMGGNMELKAENSIILNGSVMVSTTRLPSSSSGDQLGSGDWVRYKLCMCADGTLFKVQVTSQNMGCQISDNPCGNTH

SEQ ID NO: 2397 - protein, 328 aa, Artificial Sequence
  Synthetic polypeptide
THWLSCIWYAIGNMEQPHMDSRIGWLHNLGDQIGKPYNSSGLGGPSIKDKYVTALYFTFSSLTSVGFGNVSPNTNSEKIFSICVMLIGSLMYASIFGNVSAIIQRLYSGTARYHTQMLRVREFIRFHQIPNPLRQRLEEYFQHAWSYTNGIDMNAVLKGFPECLQADICLHLNRSLLQHCKPFRGATKGCLRALAMKFKTTHAPPGDTLVHAGDLLTALYFISRGSIEILRGDVVVAILGMGWGAGTGLEMPSAASRGASLLNMQSLGLWTWDCLQGHWAPLIHLNSGPPSGAMERSPTWGEAAELWGSHILLPFRIRHKQTLFASLK

SEQ ID NO: 2398 - protein, 328 aa, Artificial Sequence
  Synthetic polypeptide
ILSRADGFKVWHFLVLALTLFCHLVKKLPASLSTTIVSFLRPLQPCGNCYGHAAPGTDAGKAFCMFYAVLGIPLTLVMFQSLGERMNTFVRYLLKRIKKCCGMRNTDVSMENMVTVGFFSCMGTLCIGAAAFSQCEEWSFFHAYYYCFITLTTIGFGDYVALQTKGALQKKPLYVAFSFMYILVGLTVIGAFLNLVVLRFLTMNSEDERRDAEERASLAGNRNSMVIHIPEEPRPSRPRYKADVPDLQSVCSCTCYRSQDYGGRSVAPQNSFSAKLAPHYFHSISYKIEEISPSTLKNSLFPSPISSISPGLHSFTDHQRLMKRRKSV

SEQ ID NO: 2399 - protein, 328 aa, Artificial Sequence; identical to SEQ ID NO: 2398
  Synthetic polypeptide

SEQ ID NO: 2400 - protein, 328 aa, Artificial Sequence; identical to SEQ ID NO: 2398
  Synthetic polypeptide

SEQ ID NO: 2401 - protein, 327 aa, Artificial Sequence
  Synthetic polypeptide
AVKRKAITIMDEYVLYYYSNLSVPIGRFQNRVHLMGDILCNDGSLLLQDVQEADQGTYICEIRLKGESQVFKKAVVLHVLPEEPKELMVHVGGLIQMGCVFQSTEVKHVTKEEIVFRYYHKLRMSVEYSQSWGHFQNRVNLVGDIFRNDGSIMLQGVRESDGGNYTCSIHLGNLVFKKTIVLHVSPEEPRTLVTPAALRPLVLGGNQLVIIVGIVCATILLLPVLILIVKKTCGNKSSVNSTVLVKNTKKTNPEIKEKPCHFERCEGEKHIYSPIIVREVIEEEEPSEKSEATYMTMHPVWPSLRSDRNNSLEKKSGGGMPKTQQAF

SEQ ID NO: 2402 - protein, 326 aa, Artificial Sequence
  Synthetic polypeptide
SFGERAPSTRSGDPLVAVLAFGLLLAAATATFAAAQEECVCENYKLAVNCFVNNNRQCQCTSVGAQNTVICSKLAAKCLVMKAEMNGSKLGRRAKPEGALQNNDGLYDPDCDESGLFKAKQCNGTSMCWCVNTAGVRRTDKDTEITCSERVRTYWIIIELKHKAREKPYDSKSLRTALQKEITTRYQLDPKFITSILYENNVITIDLVQNSSQKTQNDVDIADVAYYFEKDVKGESLFHSKKMDLTVNGEQLDLDPGQTLIYYVDEKAPEFSMQGLKAGVIAVIVVVVIAVVAGIVVLVISRKKRMAKYEKAEIKEMGEMHRELNA

SEQ ID NO: 2403 - protein, 325 aa, Artificial Sequence
  Synthetic polypeptide
SGSWMAVLKQVLHMRTFSPAHGEMRKIRTTKGGVYKECVCENYKLAVNCFVNNNRQCQCTSVGAQNTVICSKLAAKCLVMKAEMNGSKLGRRAKPEGALQNNDGLYDPDCDESGLFKAKQCNGTSMCWCVNTAGVRRTDKDTEITCSERVRTYWIIIELKHKAREKPYDSKSLRTALQKEITTRYQLDPKFITSILYENNVITIDLVQNSSQKTQNDVDIADVAYYFEKDVKGESLFHSKKMDLTVNGEQLDLDPGQTLIYYVDEKAPEFSMQGLKAGVIAVIVVVVIAVVAGIVVLVISRKKRMAKYEKAEIKEMGEMHRELNA

SEQ ID NO: 2404 - protein, 325 aa, Artificial Sequence; identical to SEQ ID NO: 2403
  Synthetic polypeptide

SEQ ID NO: 2405 - protein, 325 aa, Artificial Sequence; identical to SEQ ID NO: 2403
  Synthetic polypeptide

SEQ ID NO: 2406 - protein, 323 aa, Artificial Sequence
  Synthetic polypeptide
TPDTPPLRTENVKILQERSIAYINSDSSIEGNYTLRVDCTPLLYQLVYKLTKEIPSPDDGFESKSLYESWLEKDPSPENKNLPRINKLGSGSDFEAYFQRLGIASGRARYTKNKKTDKYSSYPVYHTIYETFELVEKFYDPTFKKQLSVAQLRGALVYELVDSKIIPFNIQDYAEALKNYAASIYNLSKKHDQQLTDHGVSFDSLFSAVKNFSEAASDFHKRLIQVDLNNPIAVRMMNDQLMLLERAFIDPLGLPGKLFYRHIIFAPSSHNKYAGESFPGIYDAIFDIENKANSRLAWKEVKKHISIAAFTIQAAAGTLKEVL

SEQ ID NO: 2407 - protein, 323 aa, Artificial Sequence; identical to SEQ ID NO: 2406
  Synthetic polypeptide

SEQ ID NO: 2408 - protein, 323 aa, Artificial Sequence
  Synthetic polypeptide
STSLAIKFAGMESGYACFCGNNPDYWKYGEAASTECNSVCFGDHTQPCGGDGRIILFDTLVGACGGNYSAMSSVVYSPDFPDTYATGRVCYWTIRVPGASHIHFSFPLFDIRDSADMVELLDGYTHRVLARFHGRSRPPLSFNVSLDFVILYFFSDRINQAQGFAVLYQAVKEELPQERPAVNQTVAEVITEQANLSVSAARSSKVLYVITTSPSHPPQTVPGSNSWAPPMGAGSHRVEGWTVYGLATLLILTVTAIVAKILLHVTFKSHRVPASGDLRDCHQPGTSGEIWSIFYKPSTSISIFKKKLKGQSQQDDRNPLVSD

SEQ ID NO: 2409 - protein, 323 aa, Artificial Sequence; identical to SEQ ID NO: 2408
  Synthetic polypeptide

SEQ ID NO: 2410 - protein, 323 aa, Artificial Sequence
  Synthetic polypeptide
LATAQDLNITCRFAGVFHVEKNGRYSISRTEAADLCKAFNSTLPTMAQMEKALSIGFETCRYGFIEGHVVIPRIHPNSICAANNTGVYILTSNTSQYDTYCFNASAPPEEDCTSVTDLPNAFDGPITITIVNRDGTRYVQKGEYRTNPEDIYPSNPTDDDVSSGSSSERSSTSGGYIFYTFSTVHPIPDEDSPWITDSTDRIPATRHSHGSQEGGANTTSGPIRTPQIPEWLIILASLLALALILAVCIAVNSRRRCGQKKKLVINSGNGAVEDRKPSGLNGEASKSQEMVHLVNKESSETPDQFMTADETRNLQNVDMKIGV

SEQ ID NO: 2411 - protein, 322 aa, Artificial Sequence
  Synthetic polypeptide
PQFLSPAHTTLPSLKAFTWLCRCLQCSSPVLSGLAPGEKISAQMSLPRKGLPRPPTSCLPTPAPTLASPPSPLPASVLHSSHHHLIFLCMHRFAFLAPGFALPPRWKLLNSLSVDPDAECKYGLYFRDGRRKVDYILVYHHKRPSGNRTLVRRVQHSDTPSGARSVKQDHPLPGKGASLDAGSGEPPMDYHEDDKRFRREEYEGNLLEAGLELERDEDMYHINETRGLLKKINSVLQKITDPIQPKVAEHRPQTMKRLSYPFSREKQHLFDLSDKDSFFDSKTRSTIVYEILKRTTCTKAKYSMGITSLLANGVYAAAYPLH

SEQ ID NO: 2412 - protein, 322 aa, Artificial Sequence
  Synthetic polypeptide
SRDRLWYLNGNYLVLLVSLVVILPLSLFRNLGYLGYTSGLSLLCMVFFLIVVICKKFQVPCPVEAALIINETINTTLTQPTALVPALSHNVTENDSCRPHYFIFNSQTVYAVPILIFSFVCHPAVLPIYEELKDRSRRRMMNVSKISFFAMFLMYLLAALFGYLTFYEHVESELLHTYSSILGTDILLLIVRLAVLMAVTLTVPVVIFPIRSSVTHLLCASKDFSWWRHSLITVSILAFTNLLVIFVPTIRDIFGFIGASAASMLIFILPSAFYIKLVKKEPMKSVQKIGALFFLLSGVLVMTGSMALIVLDWVHNAPGGGH

SEQ ID NO: 2413 - protein, 322 aa, Artificial Sequence; identical to SEQ ID NO: 2412
  Synthetic polypeptide

SEQ ID NO: 2414 - protein, 322 aa, Artificial Sequence
  Synthetic polypeptide
ALDRDLNITCRFAGVFHVEKNGRYSISRTEAADLCKAFNSTLPTMAQMEKALSIGFETCRYGFIEGHVVIPRIHPNSICAANNTGVYILTSNTSQYDTYCFNASAPPEEDCTSVTDLPNAFDGPITITIVNRDGTRYVQKGEYRTNPEDIYPSNPTDDDVSSGSSSERSSTSGGYIFYTFSTVHPIPDEDSPWITDSTDRIPATRHSHGSQEGGANTTSGPIRTPQIPEWLIILASLLALALILAVCIAVNSRRRCGQKKKLVINSGNGAVEDRKPSGLNGEASKSQEMVHLVNKESSETPDQFMTADETRNLQNVDMKIGV

SEQ ID NO: 2415 - protein, 322 aa, Artificial Sequence
  Synthetic polypeptide
SQYFWRLRWEDPLKPGVQDQPGQHSWMIDSECRPRFRELVSEFSRMARDPQRFVVIQNEDLGPASPLDSTFYRSLLEDDDMGDLVDAEEYLVPQQGFFCPDPAPGAGGMVHHRHRSSSTRSGGGDLTLGLEPSEEEAPRSPLAPSEGAGSDVFDGDLGMGAAKGLQSLPTHDPSPLQRYSEDPTVPLPSETDGYVAPLTCSPQPEYVNQPDVRPQPPSPREGPLPAARPAGATLERPKTLSPGKNGVVKDVFAFGGAVENPEYLTPQGGAAPQPHPPPAFSPAFDNLYYWDQDPPERGAPPSTFKGTPTAENPEYLGLDVPV

SEQ ID NO: 2416 - protein, 322 aa, Artificial Sequence; identical to SEQ ID NO: 2415
  Synthetic polypeptide

SEQ ID NO: 2417 - protein, 322 aa, Artificial Sequence; identical to SEQ ID NO: 2415
  Synthetic polypeptide

SEQ ID NO: 2418 - protein, 322 aa, Artificial Sequence; identical to SEQ ID NO: 2415
  Synthetic polypeptide

SEQ ID NO: 2419 - protein, 322 aa, Artificial Sequence; identical to SEQ ID NO: 2415
  Synthetic polypeptide

SEQ ID NO: 2420 - protein, 322 aa, Artificial Sequence; identical to SEQ ID NO: 2415
  Synthetic polypeptide

SEQ ID NO: 2421 - protein, 321 aa, Artificial Sequence
  Synthetic polypeptide
EAWILATASTLVSLVISDLFLDLGFSSGKIATQTTTDSSNKTAPTPASSVTIMATDTAQQSTVPTSKANEILASVKATTLGVSSDSPGTTTLAQQVSGPVNTTVARGGGSGNPTTTIESPKSTKSADTTTVATSTATAKPNTTSSQNGAEDTTNSGGKSSHSVTTDLTSTKAEHLTTPHPTSPLSPRQPTSTHPVATPTSSGHDHLMKISSSSSTVAIPGYTFTSPGMTTTLPSSVISQRTQQTSSQMPASSTAPSSQETVQPTSPATALRTPTLPETMSSSPTAASTTHRYPKTPSPTVAHESNWVTPAGVGQVGEPRLG

SEQ ID NO: 2422 - protein, 321 aa, Artificial Sequence
  Synthetic polypeptide
QAPVVLATWEAEEGGSLEPRSWRLRLQEKAADTIEALQKAGIKVWVLTGDKMETAAATCYACKLFRRNTQLLELTTKRIEEQSLHDVLFELSKTVLRHSGSLTRDNLSGLSADMQDYGLIIDGAALSLIMKPREDGSSGNYRELFLEICRSCSAVLCCRMAPLQKAQIVKLIKFSKEHPITLAIGDGANDVSMILEAHVGIGVIGKEGRQAARNSDYAIPKFKHLKKMLLVHGHFYYIRISELVQYFFYKNVCFIFPQFLYQFFCGFSQQTLYDTAYLTLYNISFTSLPILLYSLMEQHVGIDVLKRDPTLYRYHPPNSLS

SEQ ID NO: 2423 - protein, 320 aa, Artificial Sequence
  Synthetic polypeptide
SEARLIEVFHEQGILFGYRHPQSSATACILSLFQMTNETLNIWTHLLPFWFFAWRFVTALYMTDIKNDSYSWPMLVYMCTSCVYPLVSSCAHTFSSMSKNARHICYFLDYGAVNLFSLGSAIAYSAYTFPDALMCTTFHDYYVALAVLNTILSTGLSCYSRFLEIQKPRLCKVIRVLAFAYPYTWDSLPIFYRLFLFPGESAQNEATSYHQKHMIMTLLASFLYSAHLPERLAPGRFDYIGHSHQLFHVCVILATHMQMEAILLDKTLRKEWLLATSKPFSFSQIAGAILLCIIFSLSNIIYFSAALYRIPKPELHKKET

SEQ ID NO: 2424 - protein, 320 aa, Artificial Sequence; identical to SEQ ID NO: 2423
  Synthetic polypeptide

SEQ ID NO: 2425 - protein, 320 aa, Artificial Sequence; identical to SEQ ID NO: 2423
  Synthetic polypeptide

SEQ ID NO: 2426 - protein, 320 aa, Artificial Sequence
  Synthetic polypeptide
VKYKTSCPSHLHSPCFNPGEVRGTVMSKLQILVDTGSSNFAVAGTPHSYIDTYFDTERSSTYRSKGFDVTVKYTQGSWTGFVGEDLVTIPKGFNTSFLVNIATIFESENFFLPGIKWNGILGLAYATLAKPSSSLETFFDSLVTQANIPNVFSMQMCGAGLPVAGSGTNGGSLVLGGIEPSLYKGDIWYTPIKEEWYYQIEILKLEIGGQSLNLDCREYNADKAIVDSGTTLLRLPQKVFDAVVEAVARASLIPEFSDGFWTGSQLACWTNSETPWSYFPKISIYLRDENSSRSFRITILPQKLQVLQCLKFPGLSQQRM

SEQ ID NO: 2427 - protein, 320 aa, Artificial Sequence
  Synthetic polypeptide
VCLSPLNCQLHEVNSRAEMEIGRYHWMYPGSKNHQYHPVPTLGDRASPLSSPGCFECCIKCLGGVPYASLVATILCFSGVALFCGCGHVALAGTVAILEQHFSTNASDHALLSEVIQLMQYVIYGIASFFFLYGIILLAEGFYTTSAVKELHGEFKTTACGRCISGMFVFLTYVLGVAWLGVFGFSAVPVFMFYNIWSTCEVIKSPQTNGTTGVEQICVDIRQYGIIPWNAFPGKICGSALENICNTNEFYMSYHLFIVACAGAGATVIALIHFLMILSSNWAYLKDASKMQAYQDIKAKEEQELQDIQSRSKEQLNSYT

SEQ ID NO: 2428 - protein, 320 aa, Artificial Sequence
  Synthetic polypeptide
CQHFERPRREDHEPVMDDQRDLISNNEQLPMLGRRPGAPESKCSRGALYTGFSILVTLLLAGQATTAYFLYQQQGRLDKLTVTSQNLQLENLRMKLPKPPKPVSKMRMATPLLMQALPMGALPQGPMQNATKYGNMTEDHVMHLLQNADPLKVYPPLKGSFPENLRHLKNTMETIDWKVFESWMHHWLLFEMSRHSLEQKPTDAPPKVLTKCQEEVSHIPAVHPGSFRPKCDENGNYLPLQCYGSIGYCWCVFPNGTEVPNTRSRGHHNCSESLELEDPSSGLGVTKQDLGPGKGLAEGHLVTSSSSPAGPAPLWAGEGV

SEQ ID NO: 2429 - protein, 320 aa, Artificial Sequence
  Synthetic polypeptide
HFRSCLLLTDYDCGRVSLLLWDALEFWLQAGVDGFQVRDIENLKDASSFLAEWQNITKGFSEDRLLIAGTNSSDLQQILSLLESNKDLLLTSSYLSDSGSTGEHTKSLVTQYLNATGNRWCSWSLSQARLLTSFLPAQLLRLYQLMLFTLPGTPVFSYGDEIGLDAAALPGQPMEAPVMLWDESSFPDIPGAVSANMTVKGQSEDPGSLLSLFRRLSDQRSKERSLLHGDFHAFSAGPGLFSYIRHWDQNERFLVVLNFGDVGLSAGLQASDLPASASLPAKADLLLSTQPGREEGSPLELERLKLEPHEGLLLRFPYAA

SEQ ID NO: 2430 - protein, 320 aa, Artificial Sequence; identical to SEQ ID NO: 2429
  Synthetic polypeptide

SEQ ID NO: 2431 - protein, 320 aa, Artificial Sequence; identical to SEQ ID NO: 2429
  Synthetic polypeptide

SEQ ID NO: 2432 - protein, 320 aa, Artificial Sequence; identical to SEQ ID NO: 2429
  Synthetic polypeptide

SEQ ID NO: 2433 - protein, 320 aa, Artificial Sequence; identical to SEQ ID NO: 2429
  Synthetic polypeptide

SEQ ID NO: 2434 - protein, 320 aa, Artificial Sequence; identical to SEQ ID NO: 2429
  Synthetic polypeptide

SEQ ID NO: 2435 - protein, 320 aa, Artificial Sequence
  Synthetic polypeptide
GQEFETSLANLEIYKDRQKFSEQVFKVASSDLVNMGISVVSYTLKDIHDDQDYLHSLGKARTAQVQKDARIGEAEAKRDAGIREAKAKQEKVSAQYLSEIEMAKAQRDYELKKAAYDIEVNTRRAQADLAYQLQVAKTKQQIEEQRVQVQVVERAQQVAVQEQEIARREKELEARVRKPAEAERYKLERLAEAEKSQLIMQAEAEAASVRMRGEAEAFAIGARARAEAEQMAKKAEAFQLYQEAAQLDMLLEKLPQVAEEISGPLTSANKITLVSSGSGTMGAAKVTGEVLDILTRLPESVERLTGVSISQVNHKPLRTA

SEQ ID NO: 2436 - protein, 320 aa, Artificial Sequence; identical to SEQ ID NO: 2435
  Synthetic polypeptide

SEQ ID NO: 2437 - protein, 319 aa, Artificial Sequence
  Synthetic polypeptide
LGGYIPGLAQMPDPSLSSFVTFGKVLFALNQTLLQQESVRAGSLQASYTTEDLIKHYNCGDLSAVIFNHDTSQLPNFINTTLPPHEQVTAQEIDSYFRQELIYKRNERMGKRVMALLRENEDKICFFAFGAGHFLGNNTVIDILRQAGLEVDHTPAGQAIHSPAPQSPAPSPEGTSTSPAPVTPAAAVPEAPSVTPTAPPEDEDPALSPHLLLPDSLSQLEEFGRQRKWHKRQSTHQRPRQFNDLWVRIEDSTTASPPPLPLQPTHSSGTAKPPFQLSDQLQQQDPPGPASSSAPTLGLLPAIATTIAVCFLLHSLGPS

SEQ ID NO: 2438 - protein, 319 aa, Artificial Sequence
  Synthetic polypeptide
VKEARHKRPCIMGFHSCQMSKTDVKSWLVMFGFQLSNIIPGFPRAKMYFVPPPYELSESQASENGQLITGVQQTTERHNQAFMALEGQVITKKLHASIREKAGHWFATTTPIIGKGIMFAIKEGRVTTGVSSIASEDSRKVASVLNNAYYLDKMHYSIEGKDTHYFVKIGSADGDLVTLGTTIGRKVLESGVNVTVSQPTLLVNGRTRRFTNIEFQYSTLLLSIRYGLTPDTLDEEKARVLDQARQRALGTAWAKEQQKARDGREGSRLWTEGEKQQLLSTGRVQGYEGYYVLPVEQYPELADSSSNIQFLRQNEMGKR

SEQ ID NO: 2439 - protein, 319 aa, Artificial Sequence; identical to SEQ ID NO: 2438
  Synthetic polypeptide

SEQ ID NO: 2440 - protein, 319 aa, Artificial Sequence; identical to SEQ ID NO: 2438
  Synthetic polypeptide

SEQ ID NO: 2441 - protein, 319 aa, Artificial Sequence; identical to SEQ ID NO: 2438
  Synthetic polypeptide

SEQ ID NO: 2442 - protein, 319 aa, Artificial Sequence; identical to SEQ ID NO: 2438
  Synthetic polypeptide

SEQ ID NO: 2443 - protein, 319 aa, Artificial Sequence
  Synthetic polypeptide
VTQGGRSCVDGARDHSDTATSQGVARIAATQTTTDSSNKTAPTPASSVTIMATDTAQQSTVPTSKANEILASVKATTLGVSSDSPGTTTLAQQVSGPVNTTVARGGGSGNPTTTIESPKSTKSADTTTVATSTATAKPNTTSSQNGAEDTTNSGGKSSHSVTTDLTSTKAEHLTTPHPTSPLSPRQPTSTHPVATPTSSGHDHLMKISSSSSTVAIPGYTFTSPGMTTTLPSSVISQRTQQTSSQMPASSTAPSSQETVQPTSPATALRTPTLPETMSSSPTAASTTHRYPKTPSPTVAHESNWVTPAGVGQVGEPRLG

SEQ ID NO: 2444 - protein, 318 aa, Artificial Sequence
  Synthetic polypeptide
GWNEKMSISQQPGPHQLSNLLSPKLGLLRLWNSMVVLNNLEPNTTYEIRVAAVNGKGQGDYSKIEIFQTLPVREPSPPSIHGQPSSGKSFKLSITKQDDGGAPILEYIVKYRSKDKEDQWLEKKVQGNKDHIILEHLQWTMGYEVQITAANRLGYSEPTVYEFSMPPKPNIIKDTLFNGLGLGAVIGLGVAALLLILVVTDVSCFFIRQCGLLMCITRRMCGKKSGSSGKSKELEEGKAAYLKDGSKEPIVEMRTEDERVTNHEDGSPVNEPNETTPLTEPEKLPLKEEDGKEALNPETIEIKVSNDIIQSKEDDSKA

SEQ ID NO: 2445 - protein, 318 aa, Artificial Sequence; identical to SEQ ID NO: 2444
  Synthetic polypeptide

SEQ ID NO: 2446 - protein, 318 aa, Artificial Sequence
  Synthetic polypeptide
SLTVLISLFNRESRSKSPSVADVKSWLVMFGFQLSNIIPGFPRAKMYFVPPPYELSESQASENGQLITGVQQTTERHNQAFMALEGQVITKKLHASIREKAGHWFATTTPIIGKGIMFAIKEGRVTTGVSSIASEDSRKVASVLNNAYYLDKMHYSIEGKDTHYFVKIGSADGDLVTLGTTIGRKVLESGVNVTVSQPTLLVNGRTRRFTNIEFQYSTLLLSIRYGLTPDTLDEEKARVLDQARQRALGTAWAKEQQKARDGREGSRLWTEGEKQQLLSTGRVQGYEGYYVLPVEQYPELADSSSNIQFLRQNEMGKR

SEQ ID NO: 2447 - protein, 318 aa, Artificial Sequence; identical to SEQ ID NO: 2446
  Synthetic polypeptide

SEQ ID NO: 2448 - protein, 318 aa, Artificial Sequence; identical to SEQ ID NO: 2446
  Synthetic polypeptide

SEQ ID NO: 2449 - protein, 318 aa, Artificial Sequence; identical to SEQ ID NO: 2446
  Synthetic polypeptide

SEQ ID NO: 2450 - protein, 318 aa, Artificial Sequence; identical to SEQ ID NO: 2446
  Synthetic polypeptide

SEQ ID NO: 2451 - protein, 318 aa, Artificial Sequence
  Synthetic polypeptide
ARMLLSQVITYSSRHVYNNLTEEQKGRVAFASNFLAGDASLQIEPLKPSDEGRYTCKVKNSGRYVWSHVILKVLVRPSKPKCELEGELTEGSDLTLQCESSSGTEPIVYYWQRIREKEGEDERLPPKSRIDYNHPGRVLLQNLTMSYSGLYQCTAGNEAGKESCVVRVTVQYVQSIGMVAGAVTGIVAGALLIFLLVWLLIRRKDKERYEEEERPNEIREDAEAPKARLVKPSSSSSGSRSSRSGSSSTRSTANSASRSQRTLSTDAAPQPGLATQAYSLVGPEVRGSEPKKVHHANLTKAETTPSMIPSQSRAFQTV

SEQ ID NO: 2452 - protein, 317 aa, Artificial Sequence
  Synthetic polypeptide
GTRKAAAWCHGTSHAKAKAEAAEQAALAANQESNIARTLARELAPDFYQPGPEYQKRRLLQEILENSESLLEPPDRGAGAAGLPQPPRESPQLHERETPRPEGGSPSPAGTPPQPKRPRPGVSKDGLLSPGAWNGEPSGEGSRSVTPSEGAGRRSPARPATERMAIEALQAPPAPSREPEVALYQGYHSYAVRTTPPEPPPFEDQPEPEVSGSESAPSSPATAPLQAPTLRGPEPARETPAKLEPKPIIPKAEPRAKARKTEARGLTKAGAKKKARKEAALAAEAEVEVEEVPNTILICMVILLNIGLAILFVHLLT

SEQ ID NO: 2453 - protein, 317 aa, Artificial Sequence
  Synthetic polypeptide
GRARWLTPVIAALGEAEAGGSPEMYPELQIARVEQATQAIPMERWCGGSRSGSCAHPHHQVVPFRCLPGEFVSEALLVPEGCRFLHQERMDQCESSTRRHQEAQEACSSQGLILHGSGMLLPCGSDRFRGVEYVCCPPPGTPDPSGTAVGDPSTRSWPPGSRVEGAEDEEEEESFPQPVDDYFVEPPQAEEEEETVPPPSSHTLAVVGKVTPTPRPTDGVDIYFGMPGEISEHEGFLRAKMDLEERRMRQINEVMREWAMADNQSKNLPKADRQALNEHFQSILQTLEEQVSGERQRLVETHATRVIALINDQRRAA

SEQ ID NO: 2454 - protein, 317 aa, Artificial Sequence
  Synthetic polypeptide
VFFCFPNSSMGISMAGAMSFIHHCVLLECGNLFLVSLALADLVVAFYPYPLILVAIFYDGWALGEEHCKASAFVMGLSVIGSVFNITAIAINRYCYICHSMAYHRIYRRWHTPLHICLIWLLTVVALLPNFFVGSLEYDPRIYSCTFIQTASTQYTAAVVVIHFLLPIAVVSFCYLRIWVLVLQARRKAKPESRLCLKPSDLRSFLTMFVVFVIFAICWAPLNCIGLAVAINPQEMAPQIPEGLFVTSYLLAYFNSCLNAIVYGLLNQNFRREYKRILLALWNPRHCIQDASKGSHAEGLQSPAPPIIGVQHQADAL

SEQ ID NO: 2455 - protein, 315 aa, Artificial Sequence
  Synthetic polypeptide
PCKKFLRIKLKIHLKGYGHAAPSTDGGKVFCMFYALLGIPLTLVMFQSLGERINTLVRYLLHRAKKGLGMRRADVSMANMVLIGFFSCISTLCIGAAAFSHYEHWTFFQAYYYCFITLTTIGFGDYVALQKDQALQTQPQYVAFSFVYILTGLTVIGAFLNLVVLRFMTMNAEDEKRDAEHRALLTRNGQAGGGGGGGSAHTTDTASSTAAAGGGGFRNVYAEVLHFQSMCSCLWYKSREKLQYSIPMIIPRDLSTSDTCVEQSHSSPGGGGRYSDTPSRRCLCSGAPRSAISSVSTGLHSLSTFRGLMKRRSSV

SEQ ID NO: 2456 - protein, 315 aa, Artificial Sequence
  Synthetic polypeptide
FLHFHLRLTIHAECPMHLEDFPMDVHACPLKFGSYAYTTAEVVYSWTLGKNKSVEVAQDGSRLNQYDLLGHVVGTEIIRSSTGEYVVMTTHFHLKRKIGYFVIQTYLPCIMTVILSQVSFWLNRESVPARTVFGVTTVLTMTTLSISARNSLPKVAYATAMDWFIAVCYAFVFSALIEFATVNYFTKRSWAWEGKKVPEALEMKKKTPAAPAKKTSTTFNIVGTTYPINLAKDTEFSTISKGAAPSASSTPTIIASPKATYVQDSPTETKTYNSVSKVDKISRIIFPVLFAIFNLVYWATYVNRESAIKGMIRKQ

SEQ ID NO: 2457 - protein, 315 aa, Artificial Sequence; identical to SEQ ID NO: 2456
  Synthetic polypeptide

SEQ ID NO: 2458 - protein, 315 aa, Artificial Sequence
  Synthetic polypeptide
GCPLSLLLFNILMEVQAKAIRCCCGQFTNQHIPPLPSATPSKNEEESKQVETQPEKWSVAKHTQSYPTDSYGVLEFQGGGYSNKAMYIRVSYDTKPDSLLHLMVKDWQLELPKLLISVHGGLQNFEMQPKLKQVFGKGLIKAAMTTGAWIFTGGVSTGVISHVGDALKDHSSKSRGRVCAIGIAPWGIVENKEDLVGKDVTRVYQTMSNPLSKLSVLNNSHTHFILADNGTLGKYGAEVKLRRLLEKHISLQKINTRLGQGVPLVGLVVEGGPNVVSIVLEYLQEEPPIPVVICDGSGRASDILSFAHKYCEEGG

SEQ ID NO: 2459 - protein, 315 aa, Artificial Sequence
  Synthetic polypeptide
AWRGGSHLNPSTLGGQAEEDEDKEDDFRAPLYKTVEIKGIQVRMKWCATCRFYRPPRCSHCSVCDNCVEVTGKFRGGVNPFTNGCCNNVSRVLCSSPAPRYLGRPKKEKTIVIRPPFLRPEVSDGQITVKIMDNGIQGELRRTKSKGSLEITESQSADAEPPPPPKPDLSRYTGLRTHLGLATNEDSSLLAKDSPPTPTMYKYRPGYSSSSTSAAMPHSSSAKLSRGDSLKEPTSIAESSRHPSYRSEPSLEPESFRSPTFGKSFHFDPLSSGSRSSSLKSAQGTGFELGQLQSIRSEGTTSTSYKSLANQTRNG

SEQ ID NO: 2460 - protein, 314 aa, Artificial Sequence
  Synthetic polypeptide
MGAVAHACNASTLRGRGGKITRRSRSCREDQKPVMDDQRDLISNNEQLPMLGRRPGAPESKCSRGALYTGFSILVTLLLAGQATTAYFLYQQQGRLDKLTVTSQNLQLENLRMKLPKPPKPVSKMRMATPLLMQALPMGALPQGPMQNATKYGNMTEDHVMHLLQNADPLKVYPPLKGSFPENLRHLKNTMETIDWKVFESWMHHWLLFEMSRHSLEQKPTDAPPKVLTKCQEEVSHIPAVHPGSFRPKCDENGNYLPLQCYGSIGYCWCVFPNGTEVPNTRSRGHHNCSESLELEDPSSGLGVTKQDLGPVPM

SEQ ID NO: 2461 - protein, 314 aa, Artificial Sequence
  Synthetic polypeptide
TGHYHLAHLLRGTGIGIGFYGNSETSDGVSQLSSALLHANHTLSTIDHLVLETVERLGEAVRTELTTLEEVLEPRTELVAAARGARRQAEAAAQQLQGLAFWQGVPLSPLQVAENVSFVEEYRWLAYVLLLLLELLVCLFTLLGLAKQSKWLVIVMTVMSLLVLVLSWGSMGLEAATAVGLSDFCSNPDPYVLNLTQEETGLSSEADSVPASSGQHPLPAAGPGARSCASVPFSAEASAVLGGDSECDRRKFPPVGGTATLPQPAQGLWCSPAGPVRRRPGRPALPATLLPAVCRSAGHCPLQPAPSLGPLPTQ

SEQ ID NO: 2462 - protein, 314 aa, Artificial Sequence
  Synthetic polypeptide
GRAGWFMPVIPALWDAKVFKVASSDLVNMGISVVSYTLKDIHDDQDYLHSLGKARTAQVQKDARIGEAEAKRDAGIREAKAKQEKVSAQYLSEIEMAKAQRDYELKKAAYDIEVNTRRAQADLAYQLQVAKTKQQIEEQRVQVQVVERAQQVAVQEQEIARREKELEARVRKPAEAERYKLERLAEAEKSQLIMQAEAEAASVRMRGEAEAFAIGARARAEAEQMAKKAEAFQLYQEAAQLDMLLEKLPQVAEEISGPLTSANKITLVSSGSGTMGAAKVTGEVLDILTRLPESVERLTGVSISQVNHKPLRTA

SEQ ID NO: 2463 - protein, 314 aa, Artificial Sequence; identical to SEQ ID NO: 2462
  Synthetic polypeptide

SEQ ID NO: 2464 - protein, 312 aa, Artificial Sequence
  Synthetic polypeptide
RAPVIPTTWEAEAGELLEPGRRRSCREDQKPVMDDQRDLISNNEQLPMLGRRPGAPESKCSRGALYTGFSILVTLLLAGQATTAYFLYQQQGRLDKLTVTSQNLQLENLRMKLPKPPKPVSKMRMATPLLMQALPMGALPQGPMQNATKYGNMTEDHVMHLLQNADPLKVYPPLKGSFPENLRHLKNTMETIDWKVFESWMHHWLLFEMSRHSLEQKPTDAPPKVLTKCQEEVSHIPAVHPGSFRPKCDENGNYLPLQCYGSIGYCWCVFPNGTEVPNTRSRGHHNCSESLELEDPSSGLGVTKQDLGPVPM

SEQ ID NO: 2465 - protein, 312 aa, Artificial Sequence
  Synthetic polypeptide
PGREIYKDRQKFSEQVFKVASSDLVNMGISVVSYTLKDIHDDQDYLHSLGKARTAQVQKDARIGEAEAKRDAGIREAKAKQEKVSAQYLSEIEMAKAQRDYELKKAAYDIEVNTRRAQADLAYQLQVAKTKQQIEEQRVQVQVVERAQQVAVQEQEIARREKELEARVRKPAEAERYKLERLAEAEKSQLIMQAEAEAASVRMRGEAEAFAIGARARAEAEQMAKKAEAFQLYQEAAQLDMLLEKLPQVAEEISGPLTSANKITLVSSGSGTMGAAKVTGEVLDILTRLPESVERLTGVSISQVNHKPLRTA

SEQ ID NO: 2466 - protein, 312 aa, Artificial Sequence; identical to SEQ ID NO: 2465
  Synthetic polypeptide

SEQ ID NO: 2467 - protein, 311 aa, Artificial Sequence
  Synthetic polypeptide
GTGDQTRNQDTRDRDSGSASCCCVTLIKVILDKYYFLCGQPLHFIPRKQLCDGELDCPLGEDEEHCVKSFPEGPAVAVRLSKDRSTLQVLDSATGNWFSACFDNFTEALAETACRQMGYSSKPTFRAVEIGPDQDLDVVEITENSQELRMRNSSGPCLSGSLVSLHCLACGKSLKTPRVVGVEEASVDSWPWQVSIQYDKQHVCGGSILDPHWVLTAAHCFRKHTDVFNWKVRAGSDKLGSFPSLAVAKIIIIEFNPMYPKDNDIALMKLQFPLTFSGTVRPICLPFFDEELTPATPLWIIGWGFTKQNGG

SEQ ID NO: 2468 - protein, 310 aa, Artificial Sequence
  Synthetic polypeptide
GRMQWLTPVIPAFWEAEAVRSQAVGTLDREDEQFVRNNIYEVMVLAMDNGSPPTTGTGTLLLTLIDVNDHGPVPEPRQITICNQSPVRQVLNITDKDLSPHTSPFQAQLTDDSDIYWTAEVNEEGDTVVLSLKKFLKQDTYDVHLSLSDHGNKEQLTVIRATVCDCHGHVETCPGPWKGGFILPVLGAVLALLFLLLVLLLLVRKKRKIKEPLLLPEDDTRDNVFYYGEEGGGEEDQDYDITQLHRGLEARPEVVLRNDVAPTIIPTPMYRPRPANPDEIGNFIIEGRGERGSQRGNGGLQLARGRTRRS

SEQ ID NO: 2469 - protein, 310 aa, Artificial Sequence
  Synthetic polypeptide
QAWCTTPVIPVLWEAEILPIEDFQTQFNLTVAEEKIIKHETLPYGRPRVLQKENTICLLSQHQFMSGYSQDILMPLWTSYTVDRNDSFSTEDFSNCLYQDFRIPLSPVHKCSFYKNNTKVSYGFLSPPQLNKNSSGIYSEALLTTNIVPMYQSFQVIWRYFHDTLLRKYAEERNGVNVVSGPVFDFDYDGRCDSLENLRQKRRVIRNQEILIPTHFFIVLTSCKDTSQTPLHCENLDTLAFILPHRTDNSESCVHGKHDSSWVEELLMLHRARITDVEHITGLSFYQQRKEPVSDILKLKTHLPTFSQED

SEQ ID NO: 2470 - protein, 308 aa, Artificial Sequence
  Synthetic polypeptide
IEVSASWFGTHAKTHQLQILVDTGSSNFAVAGTPHSYIDTYFDTERSSTYRSKGFDVTVKYTQGSWTGFVGEDLVTIPKGFNTSFLVNIATIFESENFFLPGIKWNGILGLAYATLAKPSSSLETFFDSLVTQANIPNVFSMQMCGAGLPVAGSGTNGGSLVLGGIEPSLYKGDIWYTPIKEEWYYQIEILKLEIGGQSLNLDCREYNADKAIVDSGTTLLRLPQKVFDAVVEAVARASLIPEFSDGFWTGSQLACWTNSETPWSYFPKISIYLRDENSSRSFRITILPQKLQVLQCLKFPGLSQQRM

SEQ ID NO: 2471 - protein, 308 aa, Artificial Sequence
  Synthetic polypeptide
GWNELRQEGRCLFVILLMAVYWCTEALPLSVTALLPIVLFPFMGILPSNKVCPQYFLDTNFLFLSGLIMASAIEEWNLHRRIALKILMLVGVQPARLILGMMVTTSFLSMWLSNTASTAMMLPIANAILKSLFGQKEVRKDPSQESEENTAKTTLGRQRFHWICRLTPGRRMNIVGTSGRASSSPSPTQPVLGAQPHSRAQPLTSSCLASSRGWLWISFLYGGLSFRGWRKNKSEIRTNAEDRARAVIREEYQNLGPIKFAEQAVFILFCMFAILLFTRDPKFIPGWASLFNPGCKMGIISISTIQKM

SEQ ID NO: 2472 - protein, 308 aa, Artificial Sequence; identical to SEQ ID NO: 2471
  Synthetic polypeptide

SEQ ID NO: 2473 - protein, 308 aa, Artificial Sequence
  Synthetic polypeptide
GAPLPSRDPVWEVRSVSARPPRLRSEETLRPAAAPSEKLGASPPGSRPVWEVRSVSARQPPRPGGRWGGSAPRPASRPVREVRGTSARPPLLGSEEPLCLASCPVREGGGGVSPPPGQPPRPGGRWGGQPPARPAAPSGRVMEVWHGLVIAVVSLFLQACFLTAINYLLSRHMAHKSEQILKAASLQVPRPSPGHHHPPAVKEMKETQTERDIPMSDSLYRHDSDTPSDSLDSSCSSPPACQATEDVDYTQVVFSDPGELKNDSPLDYENIKEITDYVNVNPERHKPSFWYFVNPALSEPAEYDQVAM

SEQ ID NO: 2474 - protein, 307 aa, Artificial Sequence
  Synthetic polypeptide
VKNTSEGLRARGTQHGWRQGVLHVLRAAGHPAHARHVPEPGRAHQHLGEVPAAPRQEGAGHAARRRVHGQHGAHRLLLVHQHAVHRRRRLLPLRALDLLPGLLLLLHHPHHHRLRRLRGAAEGPGPADAAAVRGLQLRLHPYGPHGHRRLPQPRGAALHDHERRGREARRRAPRAAHAQRAGGRRRRGWQRAHYGHRLIHGGSGRRRLPQRLRGGAALPVHVLVPVVQEPREAAVLHPHDHPAGPLHVRHVRGAEPLVAGRGRPLQRHALATLPVQRGATLRHQLGVHGSAQPVHLPRPHEAQELRV

SEQ ID NO: 2475 - protein, 307 aa, Artificial Sequence
  Synthetic polypeptide
RAAICTGIGIGFYGNSETSDGVSQLSSALLHANHTLSTIDHLVLETVERLGEAVRTELTTLEEVLEPRTELVAAARGARRQAEAAAQQLQGLAFWQGVPLSPLQVAENVSFVEEYRWLAYVLLLLLELLVCLFTLLGLAKQSKWLVIVMTVMSLLVLVLSWGSMGLEAATAVGLSDFCSNPDPYVLNLTQEETGLSSEADSVPASSGQHPLPAAGPGARSCASVPFSAEASAVLGGDSECDRRKFPPVGGTATLPQPAQGLWCSPAGPVRRRPGRPALPATLLPAVCRSAGHCPLQPAPSLGPLPTQ

SEQ ID NO: 2476 - protein, 306 aa, Artificial Sequence
  Synthetic polypeptide
STSLAIKFAGMESGYACFCGNNPDYWKYGEAASTECNSVCFGDHTQPCGGDGRIILFDTLVGACGGNYSAMSSVVYSPDFPDTYATGRVCYWTIRVPGASHIHFSFPLFDIRDSADMVELLDGYTHRVLARFHGRSRPPLSFNVSLDFVILYFFSDRINQAQGFAVLYQAVKEELPQERPAVNQTVAEVITEQANLSVSAARSSKVLYVITTSPSHPPQTVPGWTVYGLATLLILTVTAIVAKILLHVTFKSHRVPASGDLRDCHQPGTSGEIWSIFYKPSTSISIFKKKLKGQSQQDDRNPLVSD

SEQ ID NO: 2477 - protein, 306 aa, Artificial Sequence
  Synthetic polypeptide
IEVSASWFGTHAKTHQILVDTGSSNFAVAGTPHSYIDTYFDTERSSTYRSKGFDVTVKYTQGSWTGFVGEDLVTIPKGFNTSFLVNIATIFESENFFLPGIKWNGILGLAYATLAKPSSSLETFFDSLVTQANIPNVFSMQMCGAGLPVAGSGTNGGSLVLGGIEPSLYKGDIWYTPIKEEWYYQIEILKLEIGGQSLNLDCREYNADKAIVDSGTTLLRLPQKVFDAVVEAVARASLIPEFSDGFWTGSQLACWTNSETPWSYFPKISIYLRDENSSRSFRITILPQKLQVLQCLKFPGLSQQRM

SEQ ID NO: 2478 - protein, 305 aa, Artificial Sequence
  Synthetic polypeptide
GGGGRGGGGEGGGLGGGLLQCSTVCSVNSSSLLLCRSPAVPDRAHPQRVFFTLDNVQVDFASASGGQGFLYQPNPRLAPLSREGPARPYRLKPGHVLDVEGEGLNLGISKEEVRVHIGRGECLVKTLTRTHLYCEPPAHAPQPANGSGLPQFVVQMGNVQLALGPVQYEAEPPLSAFPVEAQAGVGMGAAVLIAAVLLLTLMYRHKSKQALRDYQKVLVQLESLETGVGDQCRKEFTGGCGGGGTGYPRGLNSHLGASWPRRPHDGDDRPQQRPGGQRDPLPGLPHLRRARLLPWPWRLPAAAQA

SEQ ID NO: 2479 - protein, 305 aa, Artificial Sequence
  Synthetic polypeptide
VREGSYCRQPWPCDFTSLNQSLQLEGGDTCLAWLLSGFSKETAMRESLVMESTLTVKIMKAQELPAKDFSGTSDPFVKIYLLPDKKHKLETKVKRKNLNPHWNETFLFEGFPYEKVVQRILYLQVLDYDRFSRNDPIGEVSIPLNKVDLTQMQTFWKDLKPCSDGSGSRGELLLSLCYNPSANSIIVNIIKARNLKAMDIGGTSDPYVKVWLMYKDKRVEKKKTVTMKRNLNPIFNESFAFDIPTEKLRETTIIITVMDKDKLSRNDVIGKIYLSWKSGPGEVKHWKDMIARPRQPVAQWHQLKA

SEQ ID NO: 2480 - protein, 305 aa, Artificial Sequence; identical to SEQ ID NO: 2479
  Synthetic polypeptide

SEQ ID NO: 2481 - protein, 305 aa, Artificial Sequence; identical to SEQ ID NO: 2479
  Synthetic polypeptide

SEQ ID NO: 2482 - protein, 305 aa, Artificial Sequence; identical to SEQ ID NO: 2479
  Synthetic polypeptide

SEQ ID NO: 2483 - protein, 305 aa, Artificial Sequence; identical to SEQ ID NO: 2479
  Synthetic polypeptide

SEQ ID NO: 2484 - protein, 305 aa, Artificial Sequence; identical to SEQ ID NO: 2479
  Synthetic polypeptide

SEQ ID NO: 2485 - protein, 305 aa, Artificial Sequence
  Synthetic polypeptide
STSPCPKRGQSVELLTLRSLPRGNYLVPLFIGDKQGLSQKQTVHVRICPCASGLTCVELADAEVGLHVGALFPVCAAFVALAVALLFLLRCYFVLEPKRHGCSVSNDEGHQTLVMYNAESKGTSAQTWSDVEGQRPALLICTAAAGPTQGVKAYPDATMHRQLLAPVEGRMAETLNQSKERNRFSLSRGCIIPQGRATAGRGLPQDIYKEMMPRRLTQTGKRKHGALARTPSFKKVVYDHKEDEENKAGRKQRSHLFKVMQLRNEQGGVRVQSAHSPSPLNKKACFPGDYRGESAGGHNCRAVSG

SEQ ID NO: 2486 - protein, 305 aa, Artificial Sequence; identical to SEQ ID NO: 2485
  Synthetic polypeptide

SEQ ID NO: 2487 - protein, 305 aa, Artificial Sequence
  Synthetic polypeptide
TLPGSAISYHLTALWLSFLICKLYNKYPDAVATWLNPDPSQKQNLLAPQNAVSSEETNDFKQETLPSKSNESHDHMDDMDDEDDDDHVDSQDSIDSNDSDDVDDTDDSHQSDESHHSDESDELVTDFPTDLPATEVFTPVVPTVDTYDGRGDSVVYGLRSKSKKFRRPDIQYPDATDEDITSHMESEELNGAYKAIPVAQDLNAPSDWDSRGKDSYETSQLDDQSAETHSHKQSRLYKRKANDESNEHSDVIDSQELSKVSREFHSHEFHSHEDMLVVDPKSKEEDKHLKFRISHELDSASSEVN

SEQ ID NO: 2488 - protein, 305 aa, Artificial Sequence
  Synthetic polypeptide
PGMVAHVCNPSTLGGRECVCENYKLAVNCFVNNNRQCQCTSVGAQNTVICSKLAAKCLVMKAEMNGSKLGRRAKPEGALQNNDGLYDPDCDESGLFKAKQCNGTSMCWCVNTAGVRRTDKDTEITCSERVRTYWIIIELKHKAREKPYDSKSLRTALQKEITTRYQLDPKFITSILYENNVITIDLVQNSSQKTQNDVDIADVAYYFEKDVKGESLFHSKKMDLTVNGEQLDLDPGQTLIYYVDEKAPEFSMQGLKAGVIAVIVVVVIAVVAGIVVLVISRKKRMAKYEKAEIKEMGEMHRELNA

SEQ ID NO: 2489 - protein, 305 aa, Artificial Sequence; identical to SEQ ID NO: 2488
  Synthetic polypeptide

SEQ ID NO: 2490 - protein, 305 aa, Artificial Sequence; identical to SEQ ID NO: 2488
  Synthetic polypeptide

SEQ ID NO: 2491 - protein, 304 aa, Artificial Sequence
  Synthetic polypeptide
VEGGIMVPKDVHALILRVREPGNVLPDVQKGLRRCDTDSKWFTADIMSIGVNCTQITATECDFTAASPSAGFPMDFNVTLRLRAELGALHSAWVTMPWFQHYRNVTVGPPENIEVTPGEGSLIIRFSSPFDIADTSTAFFCYYVHYWEKGGIQQVKGPFRSNSISLDNLKPSRVYCLQVQAQLLWNKSNIFRVGHLSNISCYETMADASTELQQVILISVGTFSLLSVLAGACFFLVLKYRGLIKYWFHTPPSIPLQIEEYLKDPTQPILEALDKDSSPKDDVWDSVSIISFPEKEQEDVLQTL

SEQ ID NO: 2492 - protein, 304 aa, Artificial Sequence; identical to SEQ ID NO: 2491
  Synthetic polypeptide

SEQ ID NO: 2493 - protein, 303 aa, Artificial Sequence
  Synthetic polypeptide
AKITPLHSSLGEEETPKESLTEAEVATEKEGEDGDQPTTPPKPLKTSKAETPTESVSEPEVATKQELQEEEEQTKPPRRAPKTLSSFFTPRKPAVKKEVKEEEPGAPGKEGAAEGPLDPSGYNPAKNNYHPVEDACWKPGQKVPYLAVARTFEKIEEVSARLRMVETLSNLLRSVVALSPPDLLPVLYLSLNHLGPPQQGLELGVGDGVLLKAVAQATGRERRETRSHNCHPRHPHPRSPLKVGSWSPSGLRQPRKATWGWWPRTAAAPRGSCCHHLRSLPPGSSASSATSPGSLAVLPQPRR

SEQ ID NO: 2494 - protein, 303 aa, Artificial Sequence
  Synthetic polypeptide
AQQGKLQMWVDLFPKALGRPGPPFNITPRRARRFFLRCIIWNTRDVILDDLSLTGEKMSDIYVKGWMIGFEEHKQKTDVHYRSLGGEGNFNWRFIFPFDYLPAEQVCTIAKKDAFWRLDKTESKIPARVVFQIWDNDKFSFDDFLGSLQLDLNRMPKPAKTAKKCSLDQLDDAFHPEWFVSLFEQKTVKGWWPCVAEEGEKKILAGKLEMTLEIVAESEHEERPAGQGRDEPNMNPKLEDPRRPDTSFLWFTSPYKTMKFILWRRFRWAIILFIILFILLLFLAIFIYAFPNYAAMKLVKPFS

SEQ ID NO: 2495 - protein, 303 aa, Artificial Sequence; identical to SEQ ID NO: 2494
  Synthetic polypeptide

SEQ ID NO: 2496 - protein, 303 aa, Artificial Sequence; identical to SEQ ID NO: 2494
  Synthetic polypeptide

SEQ ID NO: 2497 - protein, 303 aa, Artificial Sequence; identical to SEQ ID NO: 2494
  Synthetic polypeptide

SEQ ID NO: 2498 - protein, 303 aa, Artificial Sequence; identical to SEQ ID NO: 2494
  Synthetic polypeptide

SEQ ID NO: 2499 - protein, 303 aa, Artificial Sequence; identical to SEQ ID NO: 2494
  Synthetic polypeptide

SEQ ID NO: 2500 - protein, 303 aa, Artificial Sequence; identical to SEQ ID NO: 2494
  Synthetic polypeptide

SEQ ID NO: 2501 - protein, 303 aa, Artificial Sequence; identical to SEQ ID NO: 2494
  Synthetic polypeptide

SEQ ID NO: 2502 - protein, 303 aa, Artificial Sequence; identical to SEQ ID NO: 2494
  Synthetic polypeptide

SEQ ID NO: 2503 - protein, 303 aa, Artificial Sequence; identical to SEQ ID NO: 2494
  Synthetic polypeptide

SEQ ID NO: 2504 - protein, 303 aa, Artificial Sequence; identical to SEQ ID NO: 2494
  Synthetic polypeptide

SEQ ID NO: 2505 - protein, 302 aa, Artificial Sequence
  Synthetic polypeptide
AKITPLHSSLGEETPKESLTEAEVATEKEGEDGDQPTTPPKPLKTSKAETPTESVSEPEVATKQELQEEEEQTKPPRRAPKTLSSFFTPRKPAVKKEVKEEEPGAPGKEGAAEGPLDPSGYNPAKNNYHPVEDACWKPGQKVPYLAVARTFEKIEEVSARLRMVETLSNLLRSVVALSPPDLLPVLYLSLNHLGPPQQGLELGVGDGVLLKAVAQATGRERRETRSHNCHPRHPHPRSPLKVGSWSPSGLRQPRKATWGWWPRTAAAPRGSCCHHLRSLPPGSSASSATSPGSLAVLPQPRR

SEQ ID NO: 2506 - protein, 299 aa, Artificial Sequence
  Synthetic polypeptide
TLDCKFFSFWTLGPTTVVYQGLSGLQPQTEGCAVGFTTFEVLGLGLASLLLSLLMAYRGTSPCDPDGMGNLRVTKKGIRLEGISEFLLPLYVKEIHSRKDSPLVLQSDRNVTVNARNHMGQLTGQLTIGADAVEAQCKRFEVRASEDGRVLFSADEDEITIGAEKLKVTGTEGAVFGHSVETPHIRAEPSQDLRLESPTRSLIMEAPRGVQVSAAAGDFKATCRKELHLQSTEGEIFLNAETIKLGNLPTGSFSSSSPSSSSSRQTVYELCVCPNGKLYLSPAGVGSTCQSSSNICLWS

SEQ ID NO: 2507 - protein, 298 aa, Artificial Sequence
  Synthetic polypeptide
RRRRRAQSAAWAPGPRGLAAAGGRARGCGRRPSSSAPPQLGPWSWRGCRTVPLDALRTRCLCDRLSTFAILAQLSADANMEKATLPSVTLIVGCGVSSLTLLMLVIIYVSVWRYIRSERSVILINFCLSIISSNALILIGQTQTRNKVVCTLVAAFLHFFFLSSFCWVLTEAWQSYMAVTGHLRNRLIRKRFLCLGWGLPALVVAISVGFTKAKGYSTMNYCWLSLEGGLLYAFVGPAAAVVLGLPVELLRGAAAAGADLDVGCARRHRPPLRPLPDPLRCLRLAGGLRHRHGALYPP

SEQ ID NO: 2508 - protein, 297 aa, Artificial Sequence
  Synthetic polypeptide
SSFPNPSSFKVPVSVLAQRHTSQTAGWPPCTFIRRSSTYRSKGFDVTVKYTQGSWTGFVGEDLVTIPKGFNTSFLVNIATIFESENFFLPGIKWNGILGLAYATLAKPSSSLETFFDSLVTQANIPNVFSMQMCGAGLPVAGSGTNGGSLVLGGIEPSLYKGDIWYTPIKEEWYYQIEILKLEIGGQSLNLDCREYNADKAIVDSGTTLLRLPQKVFDAVVEAVARASLIPEFSDGFWTGSQLACWTNSETPWSYFPKISIYLRDENSSRSFRITILPQKLQVLQCLKFPGLSQQRM

SEQ ID NO: 2509 - protein, 297 aa, Artificial Sequence
  Synthetic polypeptide
VCLSPLNCQLHEVNSRAEMEIGRYHWMYPGSKNHQYHPVPTLGDRASPLSSPGCFECCIKCLGGVPYASLVATILCFSGVALFCGCGHVALAGTVAILEQHFSTNASDHALLSEVIQLMQYVIYGIASFFFLYGIILLAEGFYTTSAVKELHGEFKTTACGRCISGMFVFLTYVLGVAWLGVFGFSAVPVFMFYNIWSTCEVIKSPQTNGTTGVEQICVDIRQYGIIPWNAFPGKICGSALENICNTNEFYMSYHLFIVACAGAGATVIALLIYMMATTYNYAVLKFKSREDCCTKF

SEQ ID NO: 2510 - protein, 296 aa, Artificial Sequence
  Synthetic polypeptide
RAYGNSLYLCNSFASLNLFPVLCLAQTIHTQEEDLPRPSISAEPGTVIPLGSHVTFVCRGPVGVQTFRLERESRSTYNDTEDVSQASPSESEARFRIDSVSEGNAGPYRCIYYKPPKWSEQSDYLELLVKETSGGPDSPDTEPGSSAGPTQRPSDNSHNEHAPASQGLKAEHLYILIGVSVVFLFCLLLLVLFCLHRQNQIKQGPPRSKDEEQKPQQRPDLAVDVLERTADKATVNGLPEKDRETDTSALAAGSSQEVTYAQLDHWALTQRTARAVSPQSTKPMAESITYAAVARH

SEQ ID NO: 2511 - protein, 296 aa, Artificial Sequence
  Synthetic polypeptide
DSLSHALFSSFSTSSSLAARQETEEPSLGFLMHIEKRSEDTVIWQVPVKKPCNFPLVTPITLVIWAVIRIGPNGCDSMEFHESGLLRFKQVSDMGVIHPLYKSTVGGRRNENLVITGNNQPIVFQQGTTKLSVENNKTSITSDIGMQFFDPRTQNILFSTDYETHEFHLPSGVKSLNVQKASTERITSNATSDLNIKVDGRAIVRGNEGVFIMGKTIEFHMGGNMELKAENSIILNGSVMVSTTRLPSSSSGDQLGSGDWVRYKLCMCADGTLFKVQVTSQNMGCQISDNPCGNTH

SEQ ID NO: 2512 - protein, 296 aa, Artificial Sequence; identical to SEQ ID NO: 2511
  Synthetic polypeptide

SEQ ID NO: 2513 - protein, 295 aa, Artificial Sequence
  Synthetic polypeptide
AGHGGSCLQSQHFGRPRGADHEVKRSRPSWPTWSSTYRSKGFDVTVKYTQGSWTGFVGEDLVTIPKGFNTSFLVNIATIFESENFFLPGIKWNGILGLAYATLAKPSSSLETFFDSLVTQANIPNVFSMQMCGAGLPVAGSGTNGGSLVLGGIEPSLYKGDIWYTPIKEEWYYQIEILKLEIGGQSLNLDCREYNADKAIVDSGTTLLRLPQKVFDAVVEAVARASLIPEFSDGFWTGSQLACWTNSETPWSYFPKISIYLRDENSSRSFRITILPQKLQVLQCLKFPGLSQQRM

SEQ ID NO: 2514 - protein, 295 aa, Artificial Sequence
  Synthetic polypeptide
ARCDDSHLQSQHFGRLRWVDHKVKRSRPSWPTWSSTYRSKGFDVTVKYTQGSWTGFVGEDLVTIPKGFNTSFLVNIATIFESENFFLPGIKWNGILGLAYATLAKPSSSLETFFDSLVTQANIPNVFSMQMCGAGLPVAGSGTNGGSLVLGGIEPSLYKGDIWYTPIKEEWYYQIEILKLEIGGQSLNLDCREYNADKAIVDSGTTLLRLPQKVFDAVVEAVARASLIPEFSDGFWTGSQLACWTNSETPWSYFPKISIYLRDENSSRSFRITILPQKLQVLQCLKFPGLSQQRM

SEQ ID NO: 2515 - protein, 295 aa, Artificial Sequence
  Synthetic polypeptide
GETLRNHPPVFIFLHLLICKTCWFCLHSAYPLPSFLLSPWPKPTLSRVNYRNSFLADLSAFLLAPLKFSLRTLARYKSLVTGTRARGVIAVLWVLAFGIGLTPFLGWNSKDSATNNCTEPWDGTTNESCCLVKCLFENVVPMSYMVYFNFFGCVLPPLLIMLVIYIKIFLVACRQLQRTELMDHSRTTLQREIHAAKSLAMIVGIFALCWLPVHAVNCVTLFQPAQGKNKPKWAMNMAILLSHANSVVNPIVYAYRNRDFRYTFHKIISRYLLCQADVKSGNGQAGVQPALGVGL

SEQ ID NO: 2516 - protein, 295 aa, Artificial Sequence
  Synthetic polypeptide
CQHFERPRREDHEPVMDDQRDLISNNEQLPMLGRRPGAPESKCSRGALYTGFSILVTLLLAGQATTAYFLYQQQGRLDKLTVTSQNLQLENLRMKLPKPPKPVSKMRMATPLLMQALPMGALPQGPMQNATKYGNMTEDHVMHLLQNADPLKVYPPLKGSFPENLRHLKNTMETIDWKVFESWMHHWLLFEMSRHSLEQKPTDAPPKVLTKCQEEVSHIPAVHPGSFRPKCDENGNYLPLQCYGSIGYCWCVFPNGTEVPNTRSRGHHNCSESLELEDPSSGLGVTKQDLGPVPM

SEQ ID NO: 2517 - protein, 295 aa, Artificial Sequence
  Synthetic polypeptide
RAYGNSLYLCNSFASLNLFPVLCLAQTIHTQEDLPRPSISAEPGTVIPLGSHVTFVCRGPVGVQTFRLERESRSTYNDTEDVSQASPSESEARFRIDSVSEGNAGPYRCIYYKPPKWSEQSDYLELLVKETSGGPDSPDTEPGSSAGPTQRPSDNSHNEHAPASQGLKAEHLYILIGVSVVFLFCLLLLVLFCLHRQNQIKQGPPRSKDEEQKPQQRPDLAVDVLERTADKATVNGLPEKDRETDTSALAAGSSQEVTYAQLDHWALTQRTARAVSPQSTKPMAESITYAAVARH

SEQ ID NO: 2518 - protein, 295 aa, Artificial Sequence; identical to SEQ ID NO: 2517
  Synthetic polypeptide

SEQ ID NO: 2519 - protein, 294 aa, Artificial Sequence
  Synthetic polypeptide
MDMVAQACDPSTLGGQNDYPCSGMLGMVSGLISDSQITSSNQGDRNWMPENIRLVTSRSGWALPPAPHSYINEWLQIDLGEEKIVRGIIIQGGKHRENKVFMRKFKIGYSNNGSDWKMIMDDSKRKAKSFEGNNNYDTPELRTFPALSTRFIRIYPERATHGGLGLRMELLGCEVEAPTAGPTTPNGNLVDECDDDQANCHSGTGDDFQLTGAETIFIPLLYHFSSCLSWDQLTPVCVLVTPHGRELPRNRSCLARTRASSFPHVIWIDELFLIATTICNNNLSHFESQRLGLS

SEQ ID NO: 2520 - protein, 294 aa, Artificial Sequence
  Synthetic polypeptide
GYMPENTHWLSLYNKYPDAVATWLNPDPSQKQNLLAPQNAVSSEETNDFKQETLPSKSNESHDHMDDMDDEDDDDHVDSQDSIDSNDSDDVDDTDDSHQSDESHHSDESDELVTDFPTDLPATEVFTPVVPTVDTYDGRGDSVVYGLRSKSKKFRRPDIQYPDATDEDITSHMESEELNGAYKAIPVAQDLNAPSDWDSRGKDSYETSQLDDQSAETHSHKQSRLYKRKANDESNEHSDVIDSQELSKVSREFHSHEFHSHEDMLVVDPKSKEEDKHLKFRISHELDSASSEVN

SEQ ID NO: 2521 - protein, 293 aa, Artificial Sequence
  Synthetic polypeptide
LMPVIPAPWEAKLNDGQFTVIQLVGMLRGIASGMRYLAEMSYVHRDLAARNILVNSNLVCKVSDFGLSRFLEENSSDPTYTSSLGGKIPIRWTAPEAIAFRKFTSASDAWSYGIVMWEVMSFGERPYWDMSNQDVINAIEQDYRLPPPPDCPTSLHQLMLDCWQKDRNARPRFPQVVSALDKMIRNPASLKIVARENGGASHPLLDQRQPHYSAFGSVGEWLRAIKMGRYEESFAAAGFGSFELVSQISAEDLLRIGVTLAGHQKKILASVQHMKSQAKPGTPGGTGGPAPQY

SEQ ID NO: 2522 - protein, 293 aa, Artificial Sequence
  Synthetic polypeptide
GDGDARVAGHGSEEDEAHEGCSRENLGRIQFSVGYNFQESTLTVKIMKAQELPAKDFSGTSDPFVKIYLLPDKKHKLETKVKRKNLNPHWNETFLFEGFPYEKVVQRILYLQVLDYDRFSRNDPIGEVSIPLNKVDLTQMQTFWKDLKPCSDGSGSRGELLLSLCYNPSANSIIVNIIKARNLKAMDIGGTSDPYVKVWLMYKDKRVEKKKTVTMKRNLNPIFNESFAFDIPTEKLRETTIIITVMDKDKLSRNDVIGKIYLSWKSGPGEVKHWKDMIARPRQPVAQWHQLKA

SEQ ID NO: 2523 - protein, 293 aa, Artificial Sequence; identical to SEQ ID NO: 2522
  Synthetic polypeptide

SEQ ID NO: 2524 - protein, 293 aa, Artificial Sequence; identical to SEQ ID NO: 2522
  Synthetic polypeptide

SEQ ID NO: 2525 - protein, 293 aa, Artificial Sequence; identical to SEQ ID NO: 2522
  Synthetic polypeptide

SEQ ID NO: 2526 - protein, 293 aa, Artificial Sequence; identical to SEQ ID NO: 2522
  Synthetic polypeptide

SEQ ID NO: 2527 - protein, 293 aa, Artificial Sequence; identical to SEQ ID NO: 2522
  Synthetic polypeptide

SEQ ID NO: 2528 - protein, 293 aa, Artificial Sequence
  Synthetic polypeptide
FNPLSVKCHLDSLWDLGIRGPETKMLLPYCLLTKLGRRVVLWATSSSMFLFGIAAAFAVDYYTFMAARFFLAMVASGYLVVGFVYVMEFIGMKSRTWASVHLHSFFAVGTLLVALTGYLVRTWWLYQMILSTVTVPFILCCWVLPETPFWLLSEGRYEEAQKIVDIMAKWNRASSCKLSELLSLDLQGPVSNSPTEVQKHNLSYLFYNWSITKRTLTVWLIWFTGSLGFYSFSLNSVNLGGNEYLNLFLLGVVEIPAYTFVCIAMDKVGRRTVLAYSLFCSALACGVVMVIPQ

SEQ ID NO: 2529 - protein, 293 aa, Artificial Sequence
  Synthetic polypeptide
CGPLEEHWSEKWEACILVLILPLICHMTLKKLLIFSVPRFMHLYRGNNICPSRMAVRSIEPLDPSEKANKVLARIFKETELRKLKVLGSGVFGTVHKGVWIPEGESIKIPVCIKVIEDKSGRQSFQAVTDHMLAIGSLDHAHIVRLLGLCPGSSLQLVTQYLPLGSLLDHVRQHRGALGPQLLLNWGVQIAKGMYYLEEHGMVHRNLAARNVLLKSPSQVQVADFGVADLLPPDDKQLLYSEAKTPIKWMALESIHFGKYTHQSDVWSYGQCIWMPSLPSLAPVSNLPFETPS

SEQ ID NO: 2530 - protein, 292 aa, Artificial Sequence
  Synthetic polypeptide
GQELETSLGNTLNDGQFTVIQLVGMLRGIASGMRYLAEMSYVHRDLAARNILVNSNLVCKVSDFGLSRFLEENSSDPTYTSSLGGKIPIRWTAPEAIAFRKFTSASDAWSYGIVMWEVMSFGERPYWDMSNQDVINAIEQDYRLPPPPDCPTSLHQLMLDCWQKDRNARPRFPQVVSALDKMIRNPASLKIVARENGGASHPLLDQRQPHYSAFGSVGEWLRAIKMGRYEESFAAAGFGSFELVSQISAEDLLRIGVTLAGHQKKILASVQHMKSQAKPGTPGGTGGPAPQY

SEQ ID NO: 2531 - protein, 292 aa, Artificial Sequence
  Synthetic polypeptide
QAPVVLATWEAEEGGSLEPRSWRLRLQEKAADTIEALQKAGIKVWVLTGDKMETAAATCYACKLFRRNTQLLELTTKRIEEQSLHDVLFELSKTVLRHSGSLTRDNLSGLSADMQDYGLIIDGAALSLIMKPREDGSSGNYRELFLEICRSCSAVLCCRMAPLQKAQIVKLIKFSKEHPITLAIGDGANDVSMILEAHVGIGVIGKEGRQAARNSDYAIPKFKHLKKMLLVHGHFYYIRISELVQYFFYKNVCFIFPQFLYQFFCGFSQQGRRQECPAALARVHLLDAPGTV

SEQ ID NO: 2532 - protein, 291 aa, Artificial Sequence
  Synthetic polypeptide
GRARWLTPVIPALWEAEAGGSPEVRSSRPAWATWRNPVSTKIQKLARDAQNLIEAASTGAAISVKVVANIAANLIAFLAVLDFINAALSWLGDMVDIQGLSFQLICSYILRPVAFLMGVAWEDCPVVAELLGIKLFLNEFVAYQDLSKYKQRRLAGAEEWVGDRKQWISVRAEVLTTFALCGFANFSSIGIMLGGLTSMVPQRKSDFSQIVLRALFTGACVSLVNACMAGILYMPRGAEVDCMSLLNTTLSSSSFEIYQCCREAFQSVNPEFSPEALDNCCRFYNHTICAQ

SEQ ID NO: 2533 - protein, 291 aa, Artificial Sequence; identical to SEQ ID NO: 2532
  Synthetic polypeptide

SEQ ID NO: 2534 - protein, 291 aa, Artificial Sequence
  Synthetic polypeptide
TLPGSAISYHLTALWLSFLICKLYNKYPDAVATWLNPDPSQKQNLLAPQTLPSKSNESHDHMDDMDDEDDDDHVDSQDSIDSNDSDDVDDTDDSHQSDESHHSDESDELVTDFPTDLPATEVFTPVVPTVDTYDGRGDSVVYGLRSKSKKFRRPDIQYPDATDEDITSHMESEELNGAYKAIPVAQDLNAPSDWDSRGKDSYETSQLDDQSAETHSHKQSRLYKRKANDESNEHSDVIDSQELSKVSREFHSHEFHSHEDMLVVDPKSKEEDKHLKFRISHELDSASSEVN

SEQ ID NO: 2535 - protein, 290 aa, Artificial Sequence
  Synthetic polypeptide
SQHSGRPRRSDHKFVRNNIYEVMVLAMDNGSPPTTGTGTLLLTLIDVNDHGPVPEPRQITICNQSPVRQVLNITDKDLSPHTSPFQAQLTDDSDIYWTAEVNEEGDTVVLSLKKFLKQDTYDVHLSLSDHGNKEQLTVIRATVCDCHGHVETCPGPWKGGFILPVLGAVLALLFLLLVLLLLVRKKRKIKEPLLLPEDDTRDNVFYYGEEGGGEEDQDYDITQLHRGLEARPEVVLRNDVAPTIIPTPMYRPRPANPDEIGNFIIEGRGERGSQRGNGGLQLARGRTRRS

SEQ ID NO: 2536 - protein, 288 aa, Artificial Sequence
  Synthetic polypeptide
AVKRKAITIMDEYVLYYYSNLSVPIGRFQNRVHLMGDILCNDGSLLLQDVQEADQGTYICEIRLKGESQVFKKAVVLHVLPEEPKELMVHVGGLIQMGCVFQSTEVKHVTKVEWIFSGRRAKEEIVFRYYHKLRMSVEYSQSWGHFQNRVNLVGDIFRNDGSIMLQGVRESDGGNYTCSIHLGNLVFKKTIVLHVSPEEPRTLVTPAALRPLVLGGNQLVIIVGIVCATILLLPVLILIVKKTCGNKSSVNSTVLVKNTKKTNPEIKEKPCHFERCEGEVNTRFSLKH

SEQ ID NO: 2537 - protein, 287 aa, Artificial Sequence
  Synthetic polypeptide
MRKEQGSCGRSWDVDECSSGQHQCDSSTVCFNTVGSYSCRCRPGWKPRHGIPNNQKDTVCEDMTFSTWTPPPGVHSQTLSRFFDKVQDLGRDYKPGLANNTIQSILQALDELLEAPGDLETLPRLQQHCVASHLLDGLEDVLRGLSKNLSNGLLNFSYPAGTELSLEVQKQVDRSVTLRQNQAVMQLDWNQAQKSGDPVSDPETEGALCLLGAWPEWMWSLGHHRLQHNRHQRHQHHLPLHPPEQLCRPHGPLRCAGGGSRADCHHLHGAERLSAVPPPGGPHFSPV

SEQ ID NO: 2538 - protein, 286 aa, Artificial Sequence
  Synthetic polypeptide
EVRSLSARQPPHLGNFFTYSSMSEEVTYADLQFQNSSEMEKIPEIGKFGEKAPPAPSHVWRPAALFLTLLCLLLLIGLGVLASMFHVTLKIEMKKMNKLQNISEELQRNISLQLMSNMNISNKIRNLSTTLQTIATKLCRELYSKEQEHKCKPCPRRWIWHKDSCYFLSDDVQTWQESKMACAAQNASLLKINNKNALEFIKSQSRSYDYWLGLSPEEDSTRGMRVDNIINSSAWVIRNAPDLNNMYCGYINRLYVQYYHCTYKKRMICEKMANPVQLGSTYFREA

SEQ ID NO: 2539 - protein, 286 aa, Artificial Sequence
  Synthetic polypeptide
GRAGWFMPVIPALWDAKDYLHSLGKARTAQVQKDARIGEAEAKRDAGIREAKAKQEKVSAQYLSEIEMAKAQRDYELKKAAYDIEVNTRRAQADLAYQLQVAKTKQQIEEQRVQVQVVERAQQVAVQEQEIARREKELEARVRKPAEAERYKLERLAEAEKSQLIMQAEAEAASVRMRGEAEAFAIGARARAEAEQMAKKAEAFQLYQEAAQLDMLLEKLPQVAEEISGPLTSANKITLVSSGSGTMGAAKVTGEVLDILTRLPESVERLTGVSISQVNHKPLRTA

SEQ ID NO: 2540 - protein, 286 aa, Artificial Sequence; identical to SEQ ID NO: 2539
  Synthetic polypeptide

SEQ ID NO: 2541 - protein, 286 aa, Artificial Sequence
  Synthetic polypeptide
KALYQMWTKVWGCRDLQVGEFKLLTSIKIQNDKMRTGNLPANMKKNRVLQIIPYEFNRVIIPVKRGEENTDYVNASFIDGYRQKDSYIASQGPLLHTIEDFWRMIWEWKSCSIVMLTELEERGQEKCAQYWPSDGLVSYGDITVELKKEEECESYTVRDLLVTNTRENKSRQIRQFHFHGWPEVGIPSDGKGMISIIAAVQKQQQQSGNHPITVHCSAGAGRTGTFCALSTVLERVKAEGILDVFQTVKSLRLQRPHMVQTLEQYEFCYKVVQEYIDAFSDYANFK

SEQ ID NO: 2542 - protein, 286 aa, Artificial Sequence; identical to SEQ ID NO: 2541
  Synthetic polypeptide

SEQ ID NO: 2543 - protein, 286 aa, Artificial Sequence; identical to SEQ ID NO: 2541
  Synthetic polypeptide

SEQ ID NO: 2544 - protein, 286 aa, Artificial Sequence; identical to SEQ ID NO: 2541
  Synthetic polypeptide

SEQ ID NO: 2545 - protein, 286 aa, Artificial Sequence; identical to SEQ ID NO: 2541
  Synthetic polypeptide

SEQ ID NO: 2546 - protein, 286 aa, Artificial Sequence; identical to SEQ ID NO: 2541
  Synthetic polypeptide

SEQ ID NO: 2547 - protein, 286 aa, Artificial Sequence; identical to SEQ ID NO: 2541
  Synthetic polypeptide

SEQ ID NO: 2548 - protein, 286 aa, Artificial Sequence
  Synthetic polypeptide
EVRSPSARQPPRLRNFFTYSSMSEEVTYADLQFQNSSEMEKIPEIGKFGEKAPPAPSHVWRPAALFLTLLCLLLLIGLGVLASMFHVTLKIEMKKMNKLQNISEELQRNISLQLMSNMNISNKIRNLSTTLQTIATKLCRELYSKEQEHKCKPCPRRWIWHKDSCYFLSDDVQTWQESKMACAAQNASLLKINNKNALEFIKSQSRSYDYWLGLSPEEDSTRGMRVDNIINSSAWVIRNAPDLNNMYCGYINRLYVQYYHCTYKKRMICEKMANPVQLGSTYFREA

SEQ ID NO: 2549 - protein, 286 aa, Artificial Sequence
  Synthetic polypeptide
AGECNQNKSDCFYQTYSSGVDAVREWYRFHYINILSRLPETLPSLEEDTLGNFIFACRFNQVSCNQANYSHFHHPMYGNCYTFNDKNNSNLWMSSMPGINNGLSLMLRAEQNDFIPLLSTVTGARVMVHGQDEPAFMDDGGFNLRPGVETSISMRKETLDRLGGDYGDCTKNGSDVPVENLYPSKYTQQVCIHSCFQESMIKECGCAYIFYPRPQNVEYCDYRKHSSWGYCYYKLQVDFSSDHLGCFTKCRKPCRNGSSRCYRDRTITPSTTREMEWPKSTSSSRS

SEQ ID NO: 2550 - protein, 285 aa, Artificial Sequence
  Synthetic polypeptide
HQSLRVEIYKYYSLLASLPLLLGLGFLSLWYPVQLVRSFSRRTGAGSKGLQSSYSEEYLRNLLCRKKLGSRMAAVEDWLLLPRILVIKRDNYQLGTAGRPWPGLGHLGSCWPFSWAPWEGGGLPGLSGAVHHTPSFEDYRIPSPAEAGAFSYTDRDGHLPGGPAAAGGRGTHYPEGEGRGHHGCLLPAGRLWNRALRGQAGGGGAGEAPSVGSGSVLHLSLGLVLLTHLPGPDALTGDTQDQPSSSAPRSCPGLESLASESPSLPPSHILLDELQCLPDSLYLPW

SEQ ID NO: 2551 - protein, 285 aa, Artificial Sequence
  Synthetic polypeptide
ICFVIPGGHIAGSLAVVTDAAHLLIDLTSFLLSLFSLWLSSKPPSKRLTFGWHRAEILGALLSILCIWVVTGVLVYLACERLLYPDYQIQATVMIIVSSCAVAANIVLTVVLHQRCLGHNHKEVQANASVRAAFVHALGDLFQSISVLISALIIYFKPEYKIADPICTFIFSILVLASTITILKDFSILLMEGVPKSLNYSGVKELILAVDGVLSVHSLHIWSLTMNQVILSAHVATAASRDSQVVRREIAKALSKSFTMHSLTIQMESPVDQDPDCLFCEDPCD

SEQ ID NO: 2552 - protein, 285 aa, Artificial Sequence; identical to SEQ ID NO: 2551
  Synthetic polypeptide

SEQ ID NO: 2553 - protein, 285 aa, Artificial Sequence; identical to SEQ ID NO: 2551
  Synthetic polypeptide

SEQ ID NO: 2554 - protein, 285 aa, Artificial Sequence; identical to SEQ ID NO: 2551
  Synthetic polypeptide

SEQ ID NO: 2555 - protein, 285 aa, Artificial Sequence
  Synthetic polypeptide
STSPCPKRGQSVELLTLRSLPRGNYLVPLFIGDKQGLSQKQTVHVRICPCASGLTCVELADAEVGLHVGALFPVCAAFVALAVALLFLLRCYFVLEPKRHGCSVSNDEGHQTLVMYNAESKGTSAQTWSDVEGQRPALLICTAAAGPTQGVKDLEEVPPSAASQSAQARCALGSWGYGKPFEPRSVKNIHSTPAYPDATMHRQLLAPVEGRMAETLNQKLHVANVLEDDPGYLPHVYSEEGECGGAPSLSSLASLEQELQPDLLDSLGSKATPFEEIYSESGVPS

SEQ ID NO: 2556 - protein, 284 aa, Artificial Sequence
  Synthetic polypeptide
GLPSHVELTMGLSNILFVMAFLLSGAAPLKIQAYFNETADLPCQFANSQNQSLSELVVFWQDQENLVLNEVYLGKEKFDSVHSKYMGRTSFDSDSWTLRLHNLQIKDKGLYQCIIHHKKPTGMIRIHQMNSELSVLANFSQPEIVPISNITENVYINLTCSSIHGYPEPKKMSVLLRTKNSTIEYDGVMQKSQDNVTELYDVSISLSVSFPDVTSNMTIFCILETDKTRLLSSPFSIGTNTMEREESEQTKKREKIHIPERSDEAQRVFKSSKTSSCDKSDTCF

SEQ ID NO: 2557 - protein, 284 aa, Artificial Sequence
  Synthetic polypeptide
DSLSHALFSSFSTSSSLAARQETEEPSLGFLMHIEKRSEDTVIWQVPITLVIWAVIRIGPNGCDSMEFHESGLLRFKQVSDMGVIHPLYKSTVGGRRNENLVITGNNQPIVFQQGTTKLSVENNKTSITSDIGMQFFDPRTQNILFSTDYETHEFHLPSGVKSLNVQKASTERITSNATSDLNIKVDGRAIVRGNEGVFIMGKTIEFHMGGNMELKAENSIILNGSVMVSTTRLPSSSSGDQLGSGDWVRYKLCMCADGTLFKVQVTSQNMGCQISDNPCGNTH

SEQ ID NO: 2558 - protein, 284 aa, Artificial Sequence; identical to SEQ ID NO: 2557
  Synthetic polypeptide

SEQ ID NO: 2559 - protein, 284 aa, Artificial Sequence
  Synthetic polypeptide
PGAVAHACNPSTLGGRGRQITRSSTYRSKGFDVTVKYTQGSWTGFVGEDLVTIPKGFNTSFLVNIATIFESENFFLPGIKWNGILGLAYATLAKPSSSLETFFDSLVTQANIPNVFSMQMCGAGLPVAGSGTNGGSLVLGGIEPSLYKGDIWYTPIKEEWYYQIEILKLEIGGQSLNLDCREYNADKAIVDSGTTLLRLPQKVFDAVVEAVARASLIPEFSDGFWTGSQLACWTNSETPWSYFPKISIYLRDENSSRSFRITILPQKLQVLQCLKFPGLSQQRM

SEQ ID NO: 2560 - protein, 284 aa, Artificial Sequence
  Synthetic polypeptide
HFGRPRQADHKVKRSRPSWPTWSSTYRSKGFDVTVKYTQGSWTGFVGEDLVTIPKGFNTSFLVNIATIFESENFFLPGIKWNGILGLAYATLAKPSSSLETFFDSLVTQANIPNVFSMQMCGAGLPVAGSGTNGGSLVLGGIEPSLYKGDIWYTPIKEEWYYQIEILKLEIGGQSLNLDCREYNADKAIVDSGTTLLRLPQKVFDAVVEAVARASLIPEFSDGFWTGSQLACWTNSETPWSYFPKISIYLRDENSSRSFRITILPQKLQVLQCLKFPGLSQQRM

SEQ ID NO: 2561 - protein, 282 aa, Artificial Sequence
  Synthetic polypeptide
GVPIREPQTSNCLWFVRNEATQQEARGSSPVSLDLIIPFLRPGCCVLVWRSDVQFAWKHLLCPDVSYRHLGLLILALLALLTLLGVVLALTCRRPQSGPGPARPVLLLHAADSEAQRRLVGALAELLRAALGGGRDVIVDLWEGRHVARVGPLPWLWAARTRVAREQGTVLLLWSGADLRPVSGPDPRAAPLLALLHAAPRPLLLLAYFSRLCAKGDIPPPLRALPRYRLLRDLPRLLRALDARPFAEATSWGRLGARQRRQSRLELCSRLEREAARLADLG

SEQ ID NO: 2562 - protein, 282 aa, Artificial Sequence; identical to SEQ ID NO: 2561
  Synthetic polypeptide

SEQ ID NO: 2563 - protein, 282 aa, Artificial Sequence; identical to SEQ ID NO: 2561
  Synthetic polypeptide

SEQ ID NO: 2564 - protein, 281 aa, Artificial Sequence
  Synthetic polypeptide
TREAEVAVSQDPATALQPGSSTYRSKGFDVTVKYTQGSWTGFVGEDLVTIPKGFNTSFLVNIATIFESENFFLPGIKWNGILGLAYATLAKPSSSLETFFDSLVTQANIPNVFSMQMCGAGLPVAGSGTNGGSLVLGGIEPSLYKGDIWYTPIKEEWYYQIEILKLEIGGQSLNLDCREYNADKAIVDSGTTLLRLPQKVFDAVVEAVARASLIPEFSDGFWTGSQLACWTNSETPWSYFPKISIYLRDENSSRSFRITILPQKLQVLQCLKFPGLSQQRM

SEQ ID NO: 2565 - protein, 281 aa, Artificial Sequence
  Synthetic polypeptide
NFNISWLLESARWLIINNKPEEGLKELRKAAHRSGMKNARDTLTLEILKSTMKKELEAAQKKKPSLCEMLHMPNICKRISLLSFTRFANFMAYFGLNLHVQHLGNNVFLLQTLFGAVILLANCVAPWALKYMNRRASQMLLMFLLAICLLAIIFVPQEMQTLREVLATLGLGASALANTLAFAHGNEVIPTIIRARAMGINATFANIAGALAPLMMILSVYSPPLPWIIYGVFPFISGFAFLLLPETRNKPLFDTIQDEKNERKDPREPKQEDPRVEVTQF

SEQ ID NO: 2566 - protein, 281 aa, Artificial Sequence
  Synthetic polypeptide
RSKESGLGVRLVEDLEELEKGLQVKLSNTEMSGAGDSEYITLADVEKKEREYSEQLIDNMEAFWKQMANIQHFLVDQFKCSSSKARQLMMTLTERMIAAEGLLCDSQELQALDALERTMGRAHMAKVIEFLKLQVQEETRCRLAAISHGLELLAGEGKLSGRQKEELLTQQHKAFWQEAERFSREFVQRGKDLVTASLAHQVEGTAKLTLAQEEEQRSFLAEAQPTADPEKFLEAFHEVLERQRLMQCDLEEEENVRATEAVVALCQKAMRRHRDTGKEAV

SEQ ID NO: 2567 - protein, 280 aa, Artificial Sequence
  Synthetic polypeptide
VCLSPLNCQLHEGCFECCIKCLGGVPYASLVATILCFSGVALFCGCGHVALAGTVAILEQHFSTNASDHALLSEVIQLMQYVIYGIASFFFLYGIILLAEGFYTTSAVKELHGEFKTTACGRCISGMFVFLTYVLGVAWLGVFGFSAVPVFMFYNIWSTCEVIKSPQTNGTTGVEQICVDIRQYGIIPWNAFPGKICGSALENICNTNEFYMSYHLFIVACAGAGATVIALIHFLMILSSNWAYLKDASKMQAYQDIKAKEEQELQDIQSRSKEQLNSYT

SEQ ID NO: 2568 - protein, 280 aa, Artificial Sequence; identical to SEQ ID NO: 2567
  Synthetic polypeptide

SEQ ID NO: 2569 - protein, 280 aa, Artificial Sequence
  Synthetic polypeptide
GYMPENTHWLSLYNKYPDAVATWLNPDPSQKQNLLAPQTLPSKSNESHDHMDDMDDEDDDDHVDSQDSIDSNDSDDVDDTDDSHQSDESHHSDESDELVTDFPTDLPATEVFTPVVPTVDTYDGRGDSVVYGLRSKSKKFRRPDIQYPDATDEDITSHMESEELNGAYKAIPVAQDLNAPSDWDSRGKDSYETSQLDDQSAETHSHKQSRLYKRKANDESNEHSDVIDSQELSKVSREFHSHEFHSHEDMLVVDPKSKEEDKHLKFRISHELDSASSEVN

SEQ ID NO: 2570 - protein, 279 aa, Artificial Sequence
  Synthetic polypeptide
RAYGNSLYLCNSFASLNLFPVLCLAQTIHTQEEDLPRPSISAEPGTVIPLGSHVTFVCRGPVGVQTFRLERESRSTYNDTEDVSQASPSESEARFRIDSVSEGNAGPYRCIYYKPPKWSEQSDYLELLVKGPTQRPSDNSHNEHAPASQGLKAEHLYILIGVSVVFLFCLLLLVLFCLHRQNQIKQGPPRSKDEEQKPQQRPDLAVDVLERTADKATVNGLPEKDRETDTSALAAGSSQEVTYAQLDHWALTQRTARAVSPQSTKPMAESITYAAVARH

SEQ ID NO: 2571 - protein, 278 aa, Artificial Sequence
  Synthetic polypeptide
RNGPRKQVSSLGVTTFSLCALGIDRFHVATSTLPKVRPIERCQSILAKLAVIWVGSMTLAVPELLLWQLAQEPAPTMGTLDSCIMKPSASLPESLYSLVMTYQNARMWWYFGCYFCLPILFTVTCQLVTWRVRGPPGRKSECRASKHEQCESQLNSTVVGLTVVYAFCTLPENVCNIVVAYLSTELTRQTLDLLGLINQFSTFFKGAITPVLLLCICRPLGQAFLDCCCCCCCEECGGASEASAANGSDNKLKTEVSSSIYFHKPRESPPLLPLGTPC

SEQ ID NO: 2572 - protein, 278 aa, Artificial Sequence
  Synthetic polypeptide
GRARWLTPVIPALWEAEAGGSPEVRSSRPAWATWRNPVSTKIQKLARDAQNLIEAASTGAAISVKVVANIAANLIAFLAVLDFINAALSWLGDMVDIQGLSFQLICSYILRPVAFLMGVAWEDCPVVAELLGIKLFLNEFVAYQDLSKYKQRRLAGAEEWVGDRKQWISVRAEVLTTFALCGFANFSSIGIMLGGLTSMVPQRKSDFSQIVLRALFTGACVSLVNACMAGILYMPRGAEVDCMSLLNTTLSSSSFEIYQCCREAFQRIFKSTPAESQP

SEQ ID NO: 2573 - protein, 278 aa, Artificial Sequence
  Synthetic polypeptide
RAYGNSLYLCNSFASLNLFPVLCLAQTIHTQEDLPRPSISAEPGTVIPLGSHVTFVCRGPVGVQTFRLERESRSTYNDTEDVSQASPSESEARFRIDSVSEGNAGPYRCIYYKPPKWSEQSDYLELLVKGPTQRPSDNSHNEHAPASQGLKAEHLYILIGVSVVFLFCLLLLVLFCLHRQNQIKQGPPRSKDEEQKPQQRPDLAVDVLERTADKATVNGLPEKDRETDTSALAAGSSQEVTYAQLDHWALTQRTARAVSPQSTKPMAESITYAAVARH

SEQ ID NO: 2574 - protein, 277 aa, Artificial Sequence
  Synthetic polypeptide
LATAQDLNITCRFAGVFHVEKNGRYSISRTEAADLCKAFNSTLPTMAQMEKALSIGFETCRYGFIEGHVVIPRIHPNSICAANNTGVYILTSNTSQYDTYCFNASAPPEEDCTSVTDLPNAFDGPITITIVNRDGTRYVQKGEYRTNPEDIYPSNPTDDDVSSGSSSERSSTSGGYIFYTFSTVHPIPDEDSPWITDSTDRIPATRDQDTFHPSGGSHTTHGSESDGHSHGSQEGGANTTSGPIRTPQIPEWLIILASLLALALILAVCIAVNSRRS

SEQ ID NO: 2575 - protein, 276 aa, Artificial Sequence
  Synthetic polypeptide
LTSTTGTSNFKVSASPLLYTLIEKTMQNVKHPVTGQFLYQDSNWASKVEKLTLDNAAFPFLAYSGIPAVSFCFCEDTDYPYLGTTMDTYKELIERIPELNKVARAAAEVAGQFVIKLTHDVELNLDYERYNSQLLSFVRDLNQYRADIKEMGLSLQWLYSARGDFFRATSRLTTDFGNAEKTDRFVMKKLNDRVMRVEYHFLSPYVSPKESPFRHVFWGSGSHTLPALLENLKLRKQNNGAFNETLFRNQLALATWTIQGAANALSGDVWDIDNEF

SEQ ID NO: 2576 - protein, 276 aa, Artificial Sequence; identical to SEQ ID NO: 2575
  Synthetic polypeptide

SEQ ID NO: 2577 - protein, 276 aa, Artificial Sequence; identical to SEQ ID NO: 2575
  Synthetic polypeptide

SEQ ID NO: 2578 - protein, 276 aa, Artificial Sequence; identical to SEQ ID NO: 2575
  Synthetic polypeptide

SEQ ID NO: 2579 - protein, 276 aa, Artificial Sequence
  Synthetic polypeptide
ALDRDLNITCRFAGVFHVEKNGRYSISRTEAADLCKAFNSTLPTMAQMEKALSIGFETCRYGFIEGHVVIPRIHPNSICAANNTGVYILTSNTSQYDTYCFNASAPPEEDCTSVTDLPNAFDGPITITIVNRDGTRYVQKGEYRTNPEDIYPSNPTDDDVSSGSSSERSSTSGGYIFYTFSTVHPIPDEDSPWITDSTDRIPATRDQDTFHPSGGSHTTHGSESDGHSHGSQEGGANTTSGPIRTPQIPEWLIILASLLALALILAVCIAVNSRRS

SEQ ID NO: 2580 - protein, 276 aa, Artificial Sequence
  Synthetic polypeptide
AEIVPLHSSLGNRIPLGLSIGVCVRVGMALGAADTVQAKRSAVSGVLSIVGISLVLGTLISILKNQLGHIFTNDEDVIALVSQVLPVYSVFHVFEAICCVYGGVLRGTGKQAFGAAVNAITYYIIGLPLGILLTFVVRMRIMGLWLGMLACVFLATAAFVAYTARLDWKLAAEEAKKHSGRQQQQRAESTATRPGPEKAVLSSVATGSSPGITLTTYSRSECHVDFFRTPEEAHALSAPTSRLSVKQLVIRRGAALGAASATLMVGLTVRILATRH

SEQ ID NO: 2581 - protein, 276 aa, Artificial Sequence; identical to SEQ ID NO: 2580
  Synthetic polypeptide

SEQ ID NO: 2582 - protein, 275 aa, Artificial Sequence
  Synthetic polypeptide
EHSLACHSSKAGLPFAILTSRHTPFQRGVFCNDESIKYPYKEDTIPYALLGGIIIPFSIIVIILGETLSVYCNLLHSNSFIRNNYIATIYKAIGTFLFGAAASQSLTDIAKYSIGRLRPHFLDVCDPDWSKINCSDGYIEYYICRGNAERVKEGRLSFYSGHSSFSMYCMLFVALYLQARMKGDWARLLRPTLQFGLVAVSIYVGLSRVSDYKHHWSDVLTGLIQGALVAILVAVYVSDFFKERTSFKERKEEDSHTTLHETPTTGNHYPSNHQP

SEQ ID NO: 2583 - protein, 275 aa, Artificial Sequence
  Synthetic polypeptide
AFSMVSSLGVTTFSLCALGIDRFHVATSTLPKVRPIERCQSILAKLAVIWVGSMTLAVPELLLWQLAQEPAPTMGTLDSCIMKPSASLPESLYSLVMTYQNARMWWYFGCYFCLPILFTVTCQLVTWRVRGPPGRKSECRASKHEQCESQLNSTVVGLTVVYAFCTLPENVCNIVVAYLSTELTRQTLDLLGLINQFSTFFKGAITPVLLLCICRPLGQAFLDCCCCCCCEECGGASEASAANGSDNKLKTEVSSSIYFHKPRESPPLLPLGTPC

SEQ ID NO: 2584 - protein, 275 aa, Artificial Sequence
  Synthetic polypeptide
AMLSWELITAAHELGVAHPPGYPLFTLVAKLAITLFPFGSIAYRVNLLCGLFGAVAASLLFFTVFRLSGSSAGGILAAGVFSFSRLTWQWSIAAEVFSLNNLFVGLLMALTVHFEEAATAKERSKVAKIGAFCCGLSLCNQHTIILYVLCIIPWILFQLLKKKELSLGSLLKLSLYFSAGLLPYVHLPISSYLNHARWTWGDQTTLQGFLTHFLREEYGTFSLAKSEIGSSMSEILLSQVTNMRTELSFNIQALAVCANICLATKWNDSGCRAMQ

SEQ ID NO: 2585 - protein, 275 aa, Artificial Sequence
  Synthetic polypeptide
IDSWAWSPSYRISFSGVEAQEWSFLTPSPGCTWEFGAMVNYIKKTYPLTQLVVVGFSLGGNIVCKYLGETQANQEKVLCCVSVCQGYSALRAQETFMQWDQCRRFYNFLMADNMKKIILSHRQALFGDHVKKPQSLEDTDLSRLYTATSLMQIDDNVMRKFHGYNSLKEYYEEESCMRYLHRIYVPLMLVNAADDPLVHESLLTIPKSLSEKRENVMFVLPLHGGHLGFFEGSVLFPEPLTWMDKLVVEYANAICQWERNKLQCSDTEQVEADLE

SEQ ID NO: 2586 - protein, 275 aa, Artificial Sequence; identical to SEQ ID NO: 2585
  Synthetic polypeptide

SEQ ID NO: 2587 - protein, 275 aa, Artificial Sequence; identical to SEQ ID NO: 2585
  Synthetic polypeptide

SEQ ID NO: 2588 - protein, 274 aa, Artificial Sequence
  Synthetic polypeptide
VDGLRSGVRIQPGQHGESPSLLKIQKISQDKVFWTDIINEAIFSANRLTGSDVNLLAENLLSPEDMVLFHNLTQPRGVNWCERTTLSNGGCQYLCLPAPQINPHSPKFTCACPDGMLLARDMRSCLTEAEAAVATQETSTVRLKVSSTAVRTQHTTTRPVPDTSRLPGATPGLTTVEIVTMSHQALGDVAGRGNEKKPSSVRALSIVLPIVLLVFLCLGVFLLWKNWRLKNINSINFDNPVYQKTTEDEVHICHNQDGYSYPSRQMVSLEDDVA

SEQ ID NO: 2589 - protein, 274 aa, Artificial Sequence; identical to SEQ ID NO: 2588
  Synthetic polypeptide

SEQ ID NO: 2590 - protein, 274 aa, Artificial Sequence; identical to SEQ ID NO: 2588
  Synthetic polypeptide

SEQ ID NO: 2591 - protein, 274 aa, Artificial Sequence; identical to SEQ ID NO: 2588
  Synthetic polypeptide

SEQ ID NO: 2592 - protein, 273 aa, Artificial Sequence
  Synthetic polypeptide
PTWRNPISTKNTKLTRRDGSKWTYFVKLNLPSDMHIQGLQSRYSATQLHLHWGNPNDPHGSEHTVSGQHFAAELHIVHYNSDLYPDASTASNKSEGLAVLAVLIEMGSFNPSYDKIFSHLQHVKYKGQEAFVPGFNIEELLPERTAEYYRYRGSLTTPPCNPTVLWTVFRNPVQISQEQLLALETALYCTHMDDPSPREMINNFRQVQKFDERLVYTSFSQGIILSLALAGILGICIVVVVSIWLFRRKSIKKGDNKGVIYKPATKMETEAHA

SEQ ID NO: 2593 - protein, 273 aa, Artificial Sequence
  Synthetic polypeptide
FLQLKSPDEGFEGKSLYESWTKKSPSPEFSGMPRISKLGSGNDFEVFFQRLGIASGRARYTKNWETNKFSGYPLYHSVYETYELVEKFYDPMFKYHLTVAQVRGGMVFELANSIVLPFDCRDYAVVLRKYADKIYSISMKHPQEMKTYSVSFDSLFSAVKNFTEIASKFSERLQDFDKSNPIVLRMMNDQLMFLERAFIDPLGLPDRPFYRHVIYAPSSHNKYAGESFPGIYDALFDIESKVDPSKAWGEVKRQIYVAAFTVQAAAETLSEVA

SEQ ID NO: 2594 - protein, 273 aa, Artificial Sequence; identical to SEQ ID NO: 2593
  Synthetic polypeptide

SEQ ID NO: 2595 - protein, 273 aa, Artificial Sequence; identical to SEQ ID NO: 2593
  Synthetic polypeptide

SEQ ID NO: 2596 - protein, 272 aa, Artificial Sequence
  Synthetic polypeptide
VDGLRSGVRIQPGQHGESPSLLKIQKISQDKVFWTDIINEAIFSANRLTGSDVNLLAENLLSPEDMVLFHNLTQPRGVNWCERTTLSNGGCQYLCLPAPQINPHSPKFTCACPDGMLLARDMRSCLTEAEAAVATQETSTVRLKVSSTAVRTQHTTTRPVPDTSRLPGATPGLTTVEIVTMSHQALGDVAGRGNEKKPSSVRALSIVLPIVLLVFLCLGVFLLWKNWRLKNINSINFDNPVYQKTTEDEVHICHNQDGYSYPSMVSLEDDVA

SEQ ID NO: 2597 - protein, 271 aa, Artificial Sequence
  Synthetic polypeptide
SLRGCFECCIKCLGGVPYASLVATILCFSGVALFCGCGHVALAGTVAILEQHFSTNASDHALLSEVIQLMQYVIYGIASFFFLYGIILLAEGFYTTSAVKELHGEFKTTACGRCISGMFVFLTYVLGVAWLGVFGFSAVPVFMFYNIWSTCEVIKSPQTNGTTGVEQICVDIRQYGIIPWNAFPGKICGSALENICNTNEFYMSYHLFIVACAGAGATVIALIHFLMILSSNWAYLKDASKMQAYQDIKAKEEQELQDIQSRSKEQLNSYT

SEQ ID NO: 2598 - protein, 271 aa, Artificial Sequence; identical to SEQ ID NO: 2597
  Synthetic polypeptide

SEQ ID NO: 2599 - protein, 268 aa, Artificial Sequence
  Synthetic polypeptide
GWMQWLTPVIPTLWEAESLVREPLSRRRQLLRENFVETEGEFVFATSLDTKDIEQIAEFLEQSVKDSCEGLMVKTLDVDATYEIAKRSHNWLKLKKDYLDGVGDTLDLVVIGAYLGRGKRAGRYGGFLLASYDEDSEELQAICKLGTGFSDEELEEHHQSLKALVLPSPRPYVRIDGAVIPDHWLDPSAVWEVKCADLSLSPIYPAARGLVDSDKGISLRFPRFIRVREDKQPEQATTSAQVACLYRKQSQIQNQQGEDSGSDPEDTY

SEQ ID NO: 2600 - protein, 268 aa, Artificial Sequence; identical to SEQ ID NO: 2599
  Synthetic polypeptide

SEQ ID NO: 2601 - protein, 268 aa, Artificial Sequence; identical to SEQ ID NO: 2599
  Synthetic polypeptide

SEQ ID NO: 2602 - protein, 268 aa, Artificial Sequence
  Synthetic polypeptide
SHYNKELIGALVLSVGIYAEVERQKYKTLESAFLAPAIILILLGVVMFMVSFIGVLASLRDNLYLLQAFMYILGICLIMELIGGVVALTFRNQTIDFLNDNIRRGIENYYDDLDFKNIMDFVQKKFKCCGGEDYRDWSKNQYHDCSAPGPLACGVPYTCCIRNTTEVVNTMCGYKTIDKERFSVQDVIYVRGCTNAVIIWFMDNYTIMAGILLGILLPQFLGVLLTLLYITRVEDIIMEHSVTDGLLGPGAKPSVEAAGTGCCLCYPN

SEQ ID NO: 2603 - protein, 267 aa, Artificial Sequence
  Synthetic polypeptide
LSCVLEDPTKVLMDISTPQIEYKAIVRPMDIQASHALMKICLKAAFIWIISMLLAIPEAVFSDLHPFHEESTNQTFISCAPYPHSNELHPKIHSMASFLVFYVIPLSIISVYYYFIAKNLIQSAYNLPVEGNIHVKKQIESRKRLAKTVLVFVGLFAFCWLPNHVIYLYRSYHYSEVDTSMLHFVTSICARLLAFTNSCVNPFALYLLSKSFRKQFNTQLLCCQPGLIIRSHSTGRSTTCMTSLKSTNPSVATFSLINGNICHERYV

SEQ ID NO: 2604 - protein, 267 aa, Artificial Sequence
  Synthetic polypeptide
TQLTLSIPQDSLKGIYKGHCFRINHFPEDNDYDHDSSEYLLRIVRASSVFPILSTILLLLGGLCIGAGRIYSRKNNIVLSAGILFVAAGLSNIIGIIVYISSNTGDPSDKRDEDKKNHYNYGWSFYFGALSFIVAETVGVLAVNIYIEKNKELRFKTKREFLKASSSSPYARMPSYRYRRRRSRSSSRSTEASPSRDVSPMGLKITGAIPMGELSMYTLSREPLKVTTAASYSPDQEASFLQVHDFFQQDLKEGFHVSMLNRRTTPV

SEQ ID NO: 2605 - protein, 267 aa, Artificial Sequence
  Synthetic polypeptide
LLTSHENLVKLNLPSDMHIQGLQSRYSATQLHLHWGNPNDPHGSEHTVSGQHFAAELHIVHYNSDLYPDASTASNKSEGLAVLAVLIEMGSFNPSYDKIFSHLQHVKYKGQEAFVPGFNIEELLPERTAEYYRYRGSLTTPPCNPTVLWTVFRNPVQISQEQLLALETALYCTHMDDPSPREMINNFRQVQKFDERLVYTSFSQVQVCTAAGLSLGIILSLALAGILGICIVVVVSIWLFRRKSIKKGDNKGVIYKPATKMETEAHA

SEQ ID NO: 2606 - protein, 267 aa, Artificial Sequence
  Synthetic polypeptide
KVSQIPLGLSIGVCVRVGMALGAADTVQAKRSAVSGVLSIVGISLVLGTLISILKNQLGHIFTNDEDVIALVSQVLPVYSVFHVFEAICCVYGGVLRGTGKQAFGAAVNAITYYIIGLPLGILLTFVVRMRIMGLWLGMLACVFLATAAFVAYTARLDWKLAAEEAKKHSGRQQQQRAESTATRPGPEKAVLSSVATGSSPGITLTTYSRSECHVDFFRTPEEAHALSAPTSRLSVKQLVIRRGAALGAASATLMVGLTVRILATRH

SEQ ID NO: 2607 - protein, 267 aa, Artificial Sequence; identical to SEQ ID NO: 2606
  Synthetic polypeptide

SEQ ID NO: 2608 - protein, 266 aa, Artificial Sequence
  Synthetic polypeptide
MHSPRPGTQRLDANLISLVPERSFEGLSSLRHLWLDDNALTEIPVRALNNLPALQAMTLALNRISHIPDYAFQNLTSLVVLHLHNNRIQHLGTHSFEGLHNLETLDLNYNKLQEFPVAIRTLGRLQELGFHNNNIKAIPEKAFMGNPLLQTIHFYDNPIQFVGRSAFQYLPKLHTLSLNGAMDIQEFPDLKGTTSLEILTLTRAGIRLLPSGMCQQLPRLRVLELSHNQIEELPSLHRCQKLEEMRSGGLYFLPPSARGAWSGARV

SEQ ID NO: 2609 - protein, 266 aa, Artificial Sequence
  Synthetic polypeptide
KKNFLYKCSAAWCSVLIKSAGVHSYVLGLHIHSPLTHLPRATSSPETFIPDGIHSVTAFCTLRVTIITDDMLTNSITVRLENMSQEKFLSPLLALFVEGVAAVLSTTKDDVFVFNVQNDTDVSSNILNVTFSALLPGGVRGQFFPSEDLQEQIYLNRTLLTTISTQRVLPFDDNICLREPCENYMKCVSVLRFDSSAPFLSSTTVLFRPIHPINGLRCRCPPGFTGDYCETEIDLCYSDPCGANGRCRSREGGYTCECFEDFTAVS

SEQ ID NO: 2610 - protein, 266 aa, Artificial Sequence
  Synthetic polypeptide
KKNFLYKCSAAWCSVLIKSAGVHSYVLGLHIHSPLTHLPRATSSPETFIPDGIHSVTAFCTLRVTIITDDMLTNSITVRLENMSQEKFLSPLLALFVEGVAAVLSTTKDDVFVFNVQNDTDVSSNILNVTFSALLPGGVRGQFFPSEDLQEQIYLNRTLLTTISTQRVLPFDDNICLREPCENYMKCVSVLRFDSSAPFLSSTTVLFRPIHPINGLRCRCPPGFTGDYCETEIDLCYSDPCGANGRCRSREGGYTCECFEDFTEIS

SEQ ID NO: 2611 - protein, 265 aa, Artificial Sequence
  Synthetic polypeptide
PGRAAGKESCDVQLYIKRQSEHSILAGDPFELECPVKYCANRPHVTWCKLNGTTCVKLEDRQTSWKEEKNISFFILHFEPVLPNDNGSYRCSANFQSNLIESHSTTLYVTDVKSASERPSKDEMASRPWLLYRLLPLGGLPLLITTCFCLFCCLRRHQGKQNELSDTAGREINLVDAHLKSEQTEASTRQNSQVLLSETGIYDNDPDLCFRMQEGSEVYSNPCLEENKPGIVYASLNHSVIGPNSRLARNVKEAPTEYASICVRS

SEQ ID NO: 2612 - protein, 265 aa, Artificial Sequence
  Synthetic polypeptide
SQHFGRLKQADHEVRRSRPSWLTCNIPEITPFLLFIMANIPLPLGTITILCIDLGTDMVPAISLAYEAAESDIMKRQPRNPRTDKLVNERLISMAYGQIGMIQALGGFFSYFVILAENGFLPGNLVGIRLNWDDRTVNDLEDSYGQQWTYEQRKVVEFTCHTAFFVSIVVVQWADLIICKTRRNSVFQQGMKNKILIFGLFEETALAAFLSYCPGMDVALRMYPLKPSWWFCAFPYSFLIFVYDEIRKLILRRNPGGWVEKETYY

SEQ ID NO: 2613 - protein, 265 aa, Artificial Sequence; identical to SEQ ID NO: 2612
  Synthetic polypeptide

SEQ ID NO: 2614 - protein, 265 aa, Artificial Sequence; identical to SEQ ID NO: 2612
  Synthetic polypeptide

SEQ ID NO: 2615 - protein, 265 aa, Artificial Sequence; identical to SEQ ID NO: 2612
  Synthetic polypeptide

SEQ ID NO: 2616 - protein, 264 aa, Artificial Sequence
  Synthetic polypeptide
SHLTFSLQNHDHACIACRIIYRSDEHHPPILPPKADLTIGLHGEWVSQRCEVRPEVLFLTRHFIFHDNNNTWEGHYYHYSDPVCKHPTFSIYARGRYSRGVLSSRVMGGTEFVFKVNHMKVTPMDAATASLLNVFNGNECGAEGSWQVGIQQDVTHTNGCVALGIKLPHTEYEIFKMEQDARGRYLLFNGQRPSDGSSPDRPEKRATSYQMPLVQCASSSPRAEDLAEDSGSSLYGRAPGRHTWSLLLAALACLVPLLHWNIRR

SEQ ID NO: 2617 - protein, 264 aa, Artificial Sequence
  Synthetic polypeptide
IEKRRCKCINVETVVLNYLKKQVTPLFIHFRNNTNNWREIPENLMDQYSEVNAISTACSNGVPECEEMVSGLFKQWMENPNNNPIHPNLRSTVYCNAIAQGGEEEWDFAWEQFRNATLVNEADKLRAALACSKELWILNRYLSYTLNPDLIRKQDATSTIISITNNVIGQGLVWDFVQSNWKKLFNDYGGGSFSFSNLIQAVTRRFSTEYELQQLEQFKKDNEETGFGSGTRALEQALEKTKANIKWVKENKEVVLQWFTENSK

SEQ ID NO: 2618 - protein, 264 aa, Artificial Sequence
  Synthetic polypeptide
EANKALGKTGLIFCVHSPCTGFLACGNIIGSGIFVSPKGVLENAGSVGLALIVWIVTGFITVVGALCYAELGVTIPKSGGDYSYVKDIFGGLAGFLRLWIAVLVIYPTNQAVIALTFSNYVLQPLFPTCFPPESGLRLLAAICLLLLTWVNCSSVRWATRVQDIFTAGKLLALALIIIMGIVQICKGEYFWLEPKNAFENFQEPDIGLVALAFLQGSFAYGGWNFLNYVTEELVDPYKAANPGEPEDVCGRVPRGGAGLRDRGG

SEQ ID NO: 2619 - protein, 264 aa, Artificial Sequence
  Synthetic polypeptide
SQHFGRPRKEDHLRLGVQDQPEQHGDTLSLLKIQKKSQVWWYTPVVLATQEAEVGRSLEPGGAEVVLITLRTNPDAATQNRRFQFTQNQKKEDSKTSTSVTSVNQASTSRLEGLQSENHRLRMKITELDKDLEEVTMQLQDTPEKTTYIKQNHYQELNDILNLGNFTESTDGGKAILKNHLDQNPQLQWNTTEPSRTCKDPIEDINSPEHIQRRLSLQLPILHHAYLPSIGGVDASCVSPCVSPTASPRHRHVPPSFRVMVSGL

SEQ ID NO: 2620 - protein, 263 aa, Artificial Sequence
  Synthetic polypeptide
YQELTHVDQASFQVDAFGTSFILDVVLNHDLLSSEYIERHIEHGGKTVEVKGGEHCYYQGHIRGNPDSFVALSTCHGLHGMFYDGNHTYLIEPEENDTTQEDFHFHSVYKSRLFEFSLDDLPSEFQQVNITPSKFILKPRPKRSKRQLRRYPRNVEEETKYIELMIVNDHLMFKKHRLSVVHTNTYAKSVVNMADLIYKDQLKTRIVLVAMETWATDNKFAISENPLITLREFMKYRRDFIKEKSDAVHLFSYVTSVMMYYFF

SEQ ID NO: 2621 - protein, 263 aa, Artificial Sequence
  Synthetic polypeptide
GAIGKESCDVQLYIKRQSEHSILAGDPFELECPVKYCANRPHVTWCKLNGTTCVKLEDRQTSWKEEKNISFFILHFEPVLPNDNGSYRCSANFQSNLIESHSTTLYVTDVKSASERPSKDEMASRPWLLYRLLPLGGLPLLITTCFCLFCCLRRHQGKQNELSDTAGREINLVDAHLKSEQTEASTRQNSQVLLSETGIYDNDPDLCFRMQEGSEVYSNPCLEENKPGIVYASLNHSVIGPNSRLARNVKEAPTEYASICVRS

SEQ ID NO: 2622 - protein, 262 aa, Artificial Sequence
  Synthetic polypeptide
MGTVAHTCNPSTFGGQGSSSSYDNGFPTGDHELFTTFSWDDQKVRRVFVRKVYTILLIQLLVTLAVVALFTFCDPVKDYVQANPGWYWASYAVFFATYLTLACCSGPRRHFPWNLILLTVFTLSMAYLTGMLSSYYNTTSVLLCLGITALVCLSVTVFSFQTKFDFTSCQGVLFVLLMTLFFSGLILAILLPFQYVPWLHAVYAALGAGVFTLFLALDTQLLMGNRRHSLSPEEYIFGALNIYLDIIYIFTFFLQLFGTNRE

SEQ ID NO: 2623 - protein, 262 aa, Artificial Sequence; identical to SEQ ID NO: 2622
  Synthetic polypeptide

SEQ ID NO: 2624 - protein, 261 aa, Artificial Sequence
  Synthetic polypeptide
GSFPCSCLLSLACCHVRHASSPFAMSLSFLRPPQPCRTVLTSVARLSSKSVNAQVTDINSKGLELRKTVTTVETQNLEGLHHDGQFCHKPCPPGERKARDCTVNGDEPDCVPCQEGKEYTDKAHFSSKCRRCRLCDEGHGLEVEINCTRTQNTKCRCKPNFFCNSTVCEHCDPCTKCEHGIIKECTLTSNTKCKEEGSRSNLGWLCLLLLPIPLIVWVKRKEVQKTCRKHRKENQGSHESPTLNPETVAINLSDYFLFFRC

SEQ ID NO: 2625 - protein, 259 aa, Artificial Sequence
  Synthetic polypeptide
TTEGTILSRPSNAKEIDCSTDWRTLELRAATKLTEEKYELKEGQTLDVKCDYTLEKFASSQKAWQIIRDGEMPKTLACTERPSKNSHPVQVGRIILEDYHDHGLLRVRMVNLQVEDSGLYQCVIYQPPKEPHMLFDRIRLVVTKGFSGTPGSNENSTQNVYKIPPTTTKALCPLYTSPRTVTQAPPKSTADVSTPDSEINLTNVTDIIREKSMTFGIRRLDVESHPLPPLHTGHFRISQFFSQAGTQSLHSCYKGKPTP

SEQ ID NO: 2626 - protein, 259 aa, Artificial Sequence
  Synthetic polypeptide
KCCGVENRLIPTELRREALALQGSLEFDDAGGEGVTSHVDDEYRWAGVEDPKVMITTSRDPSSRLKMFAKELKLVFPGAQRMNRGRHEVGALVRACKANGVTDLLVVHEHRGTPVGLIVSHLPFGPTAYFTLCNVVMRHDIPDLGTMSEAKPHLITHGFSSRLGKRVSDILRYLFPVPKDDSHRVITFANQDDYISFRHHVYKKTDHRNVELTEVGPRFELKLYMIRLGTLEQEATADVEWRWHPYTNTARKRVFLSTE

SEQ ID NO: 2627 - protein, 259 aa, Artificial Sequence; identical to SEQ ID NO: 2626
  Synthetic polypeptide

SEQ ID NO: 2628 - protein, 257 aa, Artificial Sequence
  Synthetic polypeptide
VCLSPLNCQLHEGCFECCIKCLGGVPYASLVATILCFSGVALFCGCGHVALAGTVAILEQHFSTNASDHALLSEVIQLMQYVIYGIASFFFLYGIILLAEGFYTTSAVKELHGEFKTTACGRCISGMFVFLTYVLGVAWLGVFGFSAVPVFMFYNIWSTCEVIKSPQTNGTTGVEQICVDIRQYGIIPWNAFPGKICGSALENICNTNEFYMSYHLFIVACAGAGATVIALLIYMMATTYNYAVLKFKSREDCCTKF

SEQ ID NO: 2629 - protein, 257 aa, Artificial Sequence; identical to SEQ ID NO: 2628
  Synthetic polypeptide

SEQ ID NO: 2630 - protein, 257 aa, Artificial Sequence; identical to SEQ ID NO: 2628
  Synthetic polypeptide

SEQ ID NO: 2631 - protein, 257 aa, Artificial Sequence
  Synthetic polypeptide
ADIMPLHSSLAGTVFTTVEDLGSKILLTCSLNDSATEVTGHRWLKGGVVLKEDALPGQKTEFKVDSDDQWGEYSCVFLPEPMGTANIQLHGPPRVKAVKSSEHINEGETAMLVCKSESVPPVTDWAWYKITDSEDKALMNGSESRFFVSSSQGRSELHIENLNMEADPGQYRCNGTSSKGSDQAIITLRVRSHLAALWPFLGIVAEVLVLVTIIFIYEKRRKPEDVLDDDDAGSAPLKSSGQHQNDKGKNVRQRNSS

SEQ ID NO: 2632 - protein, 257 aa, Artificial Sequence; identical to SEQ ID NO: 2631
  Synthetic polypeptide

SEQ ID NO: 2633 - protein, 257 aa, Artificial Sequence
  Synthetic polypeptide
GHRTVHSQIVEMDKVFWTDIINEAIFSANRLTGSDVNLLAENLLSPEDMVLFHNLTQPRGVNWCERTTLSNGGCQYLCLPAPQINPHSPKFTCACPDGMLLARDMRSCLTEAEAAVATQETSTVRLKVSSTAVRTQHTTTRPVPDTSRLPGATPGLTTVEIVTMSHQALGDVAGRGNEKKPSSVRALSIVLPIVLLVFLCLGVFLLWKNWRLKNINSINFDNPVYQKTTEDEVHICHNQDGYSYPSRQMVSLEDDVA

SEQ ID NO: 2634 - protein, 257 aa, Artificial Sequence; identical to SEQ ID NO: 2633
  Synthetic polypeptide

SEQ ID NO: 2635 - protein, 257 aa, Artificial Sequence; identical to SEQ ID NO: 2633
  Synthetic polypeptide

SEQ ID NO: 2636 - protein, 257 aa, Artificial Sequence; identical to SEQ ID NO: 2633
  Synthetic polypeptide

SEQ ID NO: 2637 - protein, 256 aa, Artificial Sequence
  Synthetic polypeptide
LLTSHENLVKLNLPSDMHIQGLQSRYSATQLHLHWGNPNDPHGSEHTVSGQHFAAELHIVHYNSDLYPDASTASNKSEGLAVLAVLIEMGSFNPSYDKIFSHLQHVKYKGQEAFVPGFNIEELLPERTAEYYRYRGSLTTPPCNPTVLWTVFRNPVQISQEQLLALETALYCTHMDDPSPREMINNFRQVQKFDERLVYTSFSQGIILSLALAGILGICIVVVVSIWLFRRKSIKKGDNKGVIYKPATKMETEAHA

SEQ ID NO: 2638 - protein, 256 aa, Artificial Sequence; identical to SEQ ID NO: 2637
  Synthetic polypeptide

SEQ ID NO: 2639 - protein, 255 aa, Artificial Sequence
  Synthetic polypeptide
AGPRRRCRRRARLAGVVFLGVGLWAWSEKGVLSDLTKVTRMHGIDPVVLVLMVGVVMFTLGFAGCVGALRENICLLNFFCGTIVLIFFLELAVAVLAFLFQDWVRDRFREFFESNIKSYRDDIDLQNLIDSLQKANQCCGAYGPEDWDLNVYFNCSGASYSREKCGVPFSCCVPDPAQKVVNTQCGYDVRIQLKSKWDESIFTKGCIQALESWLPRNIYIVAGVFIAISLLQIFGIFLARTLISDIEAVKAGHHF

SEQ ID NO: 2640 - protein, 255 aa, Artificial Sequence; identical to SEQ ID NO: 2639
  Synthetic polypeptide

SEQ ID NO: 2641 - protein, 255 aa, Artificial Sequence; identical to SEQ ID NO: 2639
  Synthetic polypeptide

SEQ ID NO: 2642 - protein, 255 aa, Artificial Sequence
  Synthetic polypeptide
GHRTVHSQIVEMDKVFWTDIINEAIFSANRLTGSDVNLLAENLLSPEDMVLFHNLTQPRGVNWCERTTLSNGGCQYLCLPAPQINPHSPKFTCACPDGMLLARDMRSCLTEAEAAVATQETSTVRLKVSSTAVRTQHTTTRPVPDTSRLPGATPGLTTVEIVTMSHQALGDVAGRGNEKKPSSVRALSIVLPIVLLVFLCLGVFLLWKNWRLKNINSINFDNPVYQKTTEDEVHICHNQDGYSYPSMVSLEDDVA

SEQ ID NO: 2643 - protein, 254 aa, Artificial Sequence
  Synthetic polypeptide
MGTVAHTCNPSTFGGQGSSSSYDNGFPTGDHELFTTFSWDDQKVRRVFVRKVYTILLIQLLVTLAVVALFTFCDPVKDYVQANPGWYWASYAVFFATYLTLACCSGPRRHFPWNLILLTVFTLSMAYLTGMLSSYYNTTSVLLCLGITALVCLSVTVFSFQTKFDFTSCQGVLFVLLMTLFFSGLILAILLPFQYVPWLHAVYAALGAGVFTLFLALDTQLLMGNRRHSLSPEEYIFGALNIYLDIIYIFTFFL

SEQ ID NO: 2644 - protein, 254 aa, Artificial Sequence
  Synthetic polypeptide
QWGHMSLSLGKWPAWGWPREGQGGCLKLTGRLMLAVGGAVLGSLQFGYNTGVINAPQKVIEEFYNQTWVHRYGESILPTTLTTLWSLSVAIFSVGGMIGSFSVGLFVNRFGRRNSMLMMNLLAFVSAVLMGFSKLGKSFEMLILGRFIIGVYCGLTTGFVPMYVGEVSPTALRGALGTLHQLGIVVGILIAQVSWGRIYLPGTAPAHSFSGSRICAQQGRVSLPPSPHSLAEDNYGTQVQRTQHHGLPVDSKMT

SEQ ID NO: 2645 - protein, 254 aa, Artificial Sequence
  Synthetic polypeptide
GRAQWLTPVIAALWEAEAGRSRGEEIETILANMKKVHCLNMDSLSFQLGLYLSPHFLQASNTIEPGQQSFVQVRVSPSVSEFLLQLDSCHLDLGPEGGTVELIQGRAAKGNCVSLLSPSPEGDPRFSFLLHFYTVPIPKTGTLSCTVALRPKTGSQDQEVHRTVFMRLNIISPDLSGCTSKGLVLPAVLGITFGAFLIGALLTAALWYIYSHTRSPSKREPVVAVAAPASSESSSTNHSIGSTQSTPCSTSSMA

SEQ ID NO: 2646 - protein, 254 aa, Artificial Sequence
  Synthetic polypeptide
NQALCLTFTSYNLVHGNIIGSGIFVSPKGVLENAGSVGLALIVWIVTGFITVVGALCYAELGVTIPKSGGDYSYVKDIFGGLAGFLRLWIAVLVIYPTNQAVIALTFSNYVLQPLFPTCFPPESGLRLLAAICLLLLTWVNCSSVRWATRVQDIFTAGKLLALALIIIMGIVQICKGEYFWLEPKNAFENFQEPDIGLVALAFLQGSFAYGGWNFLNYVTEELVDPYKAANPGEPEDVCGRVPRGGAGLRDRGG

SEQ ID NO: 2647 - protein, 253 aa, Artificial Sequence
  Synthetic polypeptide
LATAQDLNITCRFAGVFHVEKNGRYSISRTEAADLCKAFNSTLPTMAQMEKALSIGFETCRYGFIEGHVVIPRIHPNSICAANNTGVYILTSNTSQYDTYCFNASAPPEEDCTSVTDLPNAFDGPITITIVNRDGTRYVQKGEYRTNPEDIYPSNPTDDDVSSGSSSERSSTSGGYIFYTFSTVHPIPDEDSPWITDSTDRIPATTASAHTSHPMQGRTTPSPEDSSWTDFFNPISHPMGRGHQAGRRMGNSL

SEQ ID NO: 2648 - protein, 253 aa, Artificial Sequence
  Synthetic polypeptide
GVRSAPPRAQSASPSASEHLRRGPGTPSSLSSRRGPACPRPRAARPAPRVPLPAHALPRVLAFGLLLAAATATFAAAQEGEARIGAELWSWAGLGGSGPRPSAPETGIIGRGPRGRAFQRGDRTVRPCSGSGPPRGRKRRGPSRGAASLRSFARLECVCENYKLAVNCFVNNNRQCQCTSVGAQNTVICSKLAAKCLVMKAEMNGSKLGRRAKPEGALQNNDGLYDPDCDESGLFKAKQCNGTSMCWCVNTAG

SEQ ID NO: 2649 - protein, 252 aa, Artificial Sequence
  Synthetic polypeptide
ALDRDLNITCRFAGVFHVEKNGRYSISRTEAADLCKAFNSTLPTMAQMEKALSIGFETCRYGFIEGHVVIPRIHPNSICAANNTGVYILTSNTSQYDTYCFNASAPPEEDCTSVTDLPNAFDGPITITIVNRDGTRYVQKGEYRTNPEDIYPSNPTDDDVSSGSSSERSSTSGGYIFYTFSTVHPIPDEDSPWITDSTDRIPATTASAHTSHPMQGRTTPSPEDSSWTDFFNPISHPMGRGHQAGRRMGNSL

SEQ ID NO: 2650 - protein, 252 aa, Artificial Sequence
  Synthetic polypeptide
KFLFKAGTVFTTVEDLGSKILLTCSLNDSATEVTGHRWLKGGVVLKEDALPGQKTEFKVDSDDQWGEYSCVFLPEPMGTANIQLHGPPRVKAVKSSEHINEGETAMLVCKSESVPPVTDWAWYKITDSEDKALMNGSESRFFVSSSQGRSELHIENLNMEADPGQYRCNGTSSKGSDQAIITLRVRSHLAALWPFLGIVAEVLVLVTIIFIYEKRRKPEDVLDDDDAGSAPLKSSGQHQNDKGKNVRQRNSS

SEQ ID NO: 2651 - protein, 252 aa, Artificial Sequence; identical to SEQ ID NO: 2650
  Synthetic polypeptide

SEQ ID NO: 2652 - protein, 251 aa, Artificial Sequence
  Synthetic polypeptide
HGETPYLLKIQKISRAWWRAPVIPATWEAEKKVHCLNMDSLSFQLGLYLSPHFLQASNTIEPGQQSFVQVRVSPSVSEFLLQLDSCHLDLGPEGGTVELIQGRAAKGNCVSLLSPSPEGDPRFSFLLHFYTVPIPKTGTLSCTVALRPKTGSQDQEVHRTVFMRLNIISPDLSGCTSKGLVLPAVLGITFGAFLIGALLTAALWYIYSHTRSPSKREPVVAVAAPASSESSSTNHSIGSTQSTPCSTSSMA

SEQ ID NO: 2653 - protein, 250 aa, Artificial Sequence
  Synthetic polypeptide
MGAVAHACNASTLRGRGGKITRRSRSCREDQKPVMDDQRDLISNNEQLPMLGRRPGAPESKCSRGALYTGFSILVTLLLAGQATTAYFLYQQQGRLDKLTVTSQNLQLENLRMKLPKPPKPVSKMRMATPLLMQALPMGALPQGPMQNATKYGNMTEDHVMHLLQNADPLKVYPPLKGSFPENLRHLKNTMETIDWKVFESWMHHWLLFEMSRHSLEQKPTDAPPKESLELEDPSSGLGVTKQDLGPVPM

SEQ ID NO: 2654 - protein, 250 aa, Artificial Sequence
  Synthetic polypeptide
GRWITKSGDEDQPGQHGLLVQQIIFFLGTTALAFLVLMPVLHGRNLLLFRSLESSWPFWLTLALAVILQNMAAHWVFLETHDGHPQLTNRRVLYAATFLLFPLNVLVGAMVATWRVLLSALYNAIHLGQMDLSLLPPRAATLDPGYYTYRNFLKIEVSQSHPAMTAFCSLLLQAQSLLPRTMAAPQDSLRPGEEDEGMQLLQTKDSMAKGARPGASRGRARWGLAYTLLHNPTLQVFRKTALLGANGAQP

SEQ ID NO: 2655 - protein, 250 aa, Artificial Sequence; identical to SEQ ID NO: 2654
  Synthetic polypeptide

SEQ ID NO: 2656 - protein, 250 aa, Artificial Sequence; identical to SEQ ID NO: 2654
  Synthetic polypeptide

SEQ ID NO: 2657 - protein, 250 aa, Artificial Sequence; identical to SEQ ID NO: 2654
  Synthetic polypeptide

SEQ ID NO: 2658 - protein, 250 aa, Artificial Sequence; identical to SEQ ID NO: 2654
  Synthetic polypeptide

SEQ ID NO: 2659 - protein, 250 aa, Artificial Sequence; identical to SEQ ID NO: 2654
  Synthetic polypeptide

SEQ ID NO: 2660 - protein, 250 aa, Artificial Sequence; identical to SEQ ID NO: 2654
  Synthetic polypeptide

SEQ ID NO: 2661 - protein, 250 aa, Artificial Sequence; identical to SEQ ID NO: 2654
  Synthetic polypeptide

SEQ ID NO: 2662 - protein, 250 aa, Artificial Sequence
  Synthetic polypeptide
FNPLSVKCHLDSLWDLGIRGPETKMLLPYCLLTKLGRRVVLWATSSSMFLFGIAAAFAVDYYTFMAARFFLAMVASGYLVVGFVYVMEFIGMKSRTWASVHLHSFFAVGTLLVALTGYLVRTWWLYQMILSTVTVPFILCCWVLPETPFWLLSEGRYEEAQKIVDIMAKWNRASSCKLSELLSLDLQGPVSNSPTEVQKHNLSYLFYNWSITKRTLTVWLIWFTGSLGFYSFSLNSVNLGGNEYLNLFLL

SEQ ID NO: 2663 - protein, 250 aa, Artificial Sequence
  Synthetic polypeptide
KPPGFIPAPSYSSCGTWRLTLVLALATLIAAFGSSFQYGYNVAAVNSPALLMQQFYNETYYGRTGEFMEDFPLTLLWSVTVSMFPFGGFIGSLLVGPLVNKFGRKGALLFNNIFSIVPAILMGCSRVATSFELIIISRLLVGICAGVSSNVVPMYLGELAPKNLRGALGVVPQLFITVGILVAQIFGLRNLLANVDGEFRTSREHPHPFTTTLGPLLVFQSHHHRTGLSADWSLLTGWMSLGGPSCPEPT

SEQ ID NO: 2664 - protein, 249 aa, Artificial Sequence
  Synthetic polypeptide
DLGHVPLRQCWNKLRVWGTVGKDPDDVVPVGQRRAWCWCMCFGLAFMLAGVILGGAYLYKYFALQPDDVYYCGIKYIKDDVILNEPSADAPAALYQTIEENIKIFEEEEVEFISVPVPEFADSDPANIVHDFNKKLTAYLDLNLDKCYVIPLNTSIVMPPRNLLELLINIKAGTYLPQSYLIHEHMVITDRIENIDHLGFFIYRLCHDKETYKLQRRETIKGIQKREASNCFAIRHFENKFAVETLICS

SEQ ID NO: 2665 - protein, 249 aa, Artificial Sequence
  Synthetic polypeptide
FSHHELTSCLHVTCWALGVSVTDYTFEDCQLALAEGQLRLPADTCLLEFARLVRGLGLKPEKLEKDLDRYSERARMKGGEKIGIAEFAASLEVPVSDLLEDMFSLFDESGSGEVDLRECVVALSVVCRPARTLDTIQLAFKMYGAQEDGSVGEGDLSCILKTALGVAELTVTDLFRAIDQEEKGKITFADFHRFAEMYPAFAEEYLYPDQTHFESCAETSPAPIPNGFCADFSPENSDAGRKPVRKKLD

SEQ ID NO: 2666 - protein, 249 aa, Artificial Sequence; identical to SEQ ID NO: 2665
  Synthetic polypeptide

SEQ ID NO: 2667 - protein, 249 aa, Artificial Sequence
  Synthetic polypeptide
SGTQMGLLFPLGDVAMSGDVSVVTVWRAVLLASDGIHSVTAFCTLRVTIITDDMLTNSITVRLENMSQEKFLSPLLALFVEGVAAVLSTTKDDVFVFNVQNDTDVSSNILNVTFSALLPGGVRGQFFPSEDLQEQIYLNRTLLTTISTQRVLPFDDNICLREPCENYMKCVSVLRFDSSAPFLSSTTVLFRPIHPINGLRCRCPPGFTGDYCETEIDLCYSDPCGANGRCRSREGGYTCECFEDFTAVS

SEQ ID NO: 2668 - protein, 249 aa, Artificial Sequence
  Synthetic polypeptide
SGTQMGLLFPLGDVAMSGDVSVVTVWRAVLLASDGIHSVTAFCTLRVTIITDDMLTNSITVRLENMSQEKFLSPLLALFVEGVAAVLSTTKDDVFVFNVQNDTDVSSNILNVTFSALLPGGVRGQFFPSEDLQEQIYLNRTLLTTISTQRVLPFDDNICLREPCENYMKCVSVLRFDSSAPFLSSTTVLFRPIHPINGLRCRCPPGFTGDYCETEIDLCYSDPCGANGRCRSREGGYTCECFEDFTEIS

SEQ ID NO: 2669 - protein, 248 aa, Artificial Sequence
  Synthetic polypeptide
RAPVIPTTWEAEAGELLEPGRRRSCREDQKPVMDDQRDLISNNEQLPMLGRRPGAPESKCSRGALYTGFSILVTLLLAGQATTAYFLYQQQGRLDKLTVTSQNLQLENLRMKLPKPPKPVSKMRMATPLLMQALPMGALPQGPMQNATKYGNMTEDHVMHLLQNADPLKVYPPLKGSFPENLRHLKNTMETIDWKVFESWMHHWLLFEMSRHSLEQKPTDAPPKESLELEDPSSGLGVTKQDLGPVPM

SEQ ID NO: 2670 - protein, 248 aa, Artificial Sequence
  Synthetic polypeptide
GSFPCSCLLSLACCHVRHASSPFAMSLSFLRPPQPCRTVLTSVARLSSKSVNAQVTDINSKGLELRKTVTTVETQNLEGLHHDGQFCHKPCPPGERKARDCTVNGDEPDCVPCQEGKEYTDKAHFSSKCRRCRLCDEGHGLEVEINCTRTQNTKCRCKPNFFCNSTVCEHCDPCTKCEHGIIKECTLTSNTKCKEEGSRSNLGWLCLLLLPIPLIVWVKRKEVQKTCRKHRKENQGSHESPTLNPMLT

SEQ ID NO: 2671 - protein, 248 aa, Artificial Sequence
  Synthetic polypeptide
SLRGCFECCIKCLGGVPYASLVATILCFSGVALFCGCGHVALAGTVAILEQHFSTNASDHALLSEVIQLMQYVIYGIASFFFLYGIILLAEGFYTTSAVKELHGEFKTTACGRCISGMFVFLTYVLGVAWLGVFGFSAVPVFMFYNIWSTCEVIKSPQTNGTTGVEQICVDIRQYGIIPWNAFPGKICGSALENICNTNEFYMSYHLFIVACAGAGATVIALLIYMMATTYNYAVLKFKSREDCCTKF

SEQ ID NO: 2672 - protein, 248 aa, Artificial Sequence; identical to SEQ ID NO: 2671
  Synthetic polypeptide

SEQ ID NO: 2673 - protein, 248 aa, Artificial Sequence; identical to SEQ ID NO: 2671
  Synthetic polypeptide

SEQ ID NO: 2674 - protein, 247 aa, Artificial Sequence
  Synthetic polypeptide
SWAGSRPQFSLLRYEDNTVVRTKGVASVVVSFFLSMYYNVINAWAFWYLFHSFQDPLPWSVCPLNGNHTGYDEECEKASSTQYFWYRKTLNISPSLQENGGVQWEPALCLLLAWLVVYLCILRGTESTGKVVYFTASLPYCVLIIYLIRGLTLHGATNGLMYMFTPKIEQLANPKAWINAATQIFFSLGLGFGSLIAFASYNEPSNNCQKHAIIVSLINSFTSIFASIVTFSIYGFKATFNYENCLK

SEQ ID NO: 2675 - protein, 246 aa, Artificial Sequence
  Synthetic polypeptide
GSHHLASNAGPSTRWTFGEKLLGVMAWIMPISVALSTFGGVNGSLFTSSRLFFAGAREGHLPSVLAMIHVKRCTPIPALLFTCISTLLMLVTSDMYTLINYVGFINYLFYGVTVAGQIVLRWKKPDIPRPIKINLLFPIIYLLFWAFLLVFSLWSEPVVCGIGLAIMLTGVPVYFLGVYWQHKPKCFSDFIELLTLVSQKMCVVVYPEVERGSGTEEANEDMEEQQQPMYQPTPTKDKDVAGQPQP

SEQ ID NO: 2676 - protein, 246 aa, Artificial Sequence; identical to SEQ ID NO: 2675
  Synthetic polypeptide

SEQ ID NO: 2677 - protein, 246 aa, Artificial Sequence; identical to SEQ ID NO: 2675
  Synthetic polypeptide

SEQ ID NO: 2678 - protein, 246 aa, Artificial Sequence; identical to SEQ ID NO: 2675
  Synthetic polypeptide

SEQ ID NO: 2679 - protein, 245 aa, Artificial Sequence
  Synthetic polypeptide
IKRQRESYALAGETHLDYQGEAIDYFYSTRKGSPPAIGPYYENHGYQPENPYPAQPTVVPTVYEVHPAQYYPSPVPQYAPRVLTQASNPVVCTQPKSPSGTVCTSKTKKALCITLTLGTFLVGAALAAGLLWKFIRLYGPNFILQVYSSQRKSWHPVCQDDWNENYGRAACRDMGYKNNFYSSQGIVDDSGSTSFMKLNTSAGNVDIYKKLYHSDACSSKAVVSLRCIACGVNLNSSRQSRIVGG

SEQ ID NO: 2680 - protein, 245 aa, Artificial Sequence
  Synthetic polypeptide
LATAQDLNITCRFAGVFHVEKNGRYSISRTEAADLCKAFNSTLPTMAQMEKALSIGFETCRYGFIEGHVVIPRIHPNSICAANNTGVYILTSNTSQYDTYCFNASAPPEEDCTSVTDLPNAFDGPITITIVNRDGTRYVQKGEYRTNPEDIYPSNPTDDDVSSGSSSERSSTSGDRNDVTGGRRDPNHSEGSTTLLEGYTSHYPHTKESRTFIPVTSAKTGSFGVTAVTVGDSNSNVNRSLSGDQ

SEQ ID NO: 2681 - protein, 244 aa, Artificial Sequence
  Synthetic polypeptide
SHMPNQKLDGLAKIRTAREAPSECVCPPGPPGRRGKPGRRGDPGPPGPLGLDGKPGLPGPKGEKGAPGDFGPRGDQGQDGAAGPPGPPGPPGARGPPGDTGKDGPRGAQGPAGPKGEPGQDGEMGPKGPPGPKGEPGVPGKKGDDGTPSQPGPPGPKGEPGSMGPRGENGVDGAPGPKGEPGHRGTDGAAGPRGDVRDPGLGSVSSCSQRLASSSKKNGSEPPPGCAGCPRPQGRAGRHSGDRL

SEQ ID NO: 2682 - protein, 244 aa, Artificial Sequence
  Synthetic polypeptide
ALDRDLNITCRFAGVFHVEKNGRYSISRTEAADLCKAFNSTLPTMAQMEKALSIGFETCRYGFIEGHVVIPRIHPNSICAANNTGVYILTSNTSQYDTYCFNASAPPEEDCTSVTDLPNAFDGPITITIVNRDGTRYVQKGEYRTNPEDIYPSNPTDDDVSSGSSSERSSTSGDRNDVTGGRRDPNHSEGSTTLLEGYTSHYPHTKESRTFIPVTSAKTGSFGVTAVTVGDSNSNVNRSLSGDQ

SEQ ID NO: 2683 - protein, 244 aa, Artificial Sequence
  Synthetic polypeptide
KIHGSVSFLHIFHLMCFRMDILYPFNSRGYCYYKLQVDFSSDHLGCFTKCRKPCSVTSYQLSAGYSRWPSVTSQEWVFQMLSRQNNYTVNNKRNGVAKVNIFFKELNYKTNSESPSVTMVTLLSNLGSQWSLWFGSSVLSVVEMAELVFDLLVIMFLMLLRRFRSRYWSPGRGGRGAQEVASTLASSPPSHFCPHPMSLSLSQPGPAPSPALTAPPPAYATLGPRPSPGGSAGASSSTCPLGGP

SEQ ID NO: 2684 - protein, 244 aa, Artificial Sequence; identical to SEQ ID NO: 2683
  Synthetic polypeptide

SEQ ID NO: 2685 - protein, 244 aa, Artificial Sequence; identical to SEQ ID NO: 2683
  Synthetic polypeptide

SEQ ID NO: 2686 - protein, 244 aa, Artificial Sequence; identical to SEQ ID NO: 2683
  Synthetic polypeptide

SEQ ID NO: 2687 - protein, 244 aa, Artificial Sequence; identical to SEQ ID NO: 2683
  Synthetic polypeptide

SEQ ID NO: 2688 - protein, 243 aa, Artificial Sequence
  Synthetic polypeptide
GVRSAPPRAQSASPSASEHLRRGPGTPSSLSSRRGPACPRPRAARPAPRVLAFGLLLAAATATFAAAQEGEARIGAELWSWAGLGGSGPRPSAPETGIIGRGPRGRAFQRGDRTVRPCSGSGPPRGRKRRGPSRGAASLRSFARLECVCENYKLAVNCFVNNNRQCQCTSVGAQNTVICSKLAAKCLVMKAEMNGSKLGRRAKPEGALQNNDGLYDPDCDESGLFKAKQCNGTSMCWCVNTAG

SEQ ID NO: 2689 - protein, 243 aa, Artificial Sequence
  Synthetic polypeptide
TTEGTILSRPSNAKEIDCSTDWRTLELRAATKLTEEKYELKEGQTLDVKCDYTLEKFASSQKAWQIIRDGEMPKTLACTERPSKNSHPVQVGRIILEDYHDHGLLRVRMVNLQVEDSGLYQCVIYQPPKEPHMLFDRIRLVVTKGFSGTPGSNENSTQNVYKIPPTTTKALCPLYTSPRTVTQAPPKSTADVSTPDSEINLTNVTDIIRVPVFNIVILLAGGFLSKSLVFSVLFAVTLRSFVP

SEQ ID NO: 2690 - protein, 243 aa, Artificial Sequence
  Synthetic polypeptide
QACSTWDLWMHLWIRKEVDEVLEILEPPTKYQISQPEVYVAAPGESLEVRCLLKDAAVISWTKDGVHLGPNNRTVLIGEYLQIKGATPRDSGLYACTASRTVDSETWYFMVNVTDAISSGDDEDDTDGAEDFVSENSNNKRAPYWTNTEKMEKRLHAVPAANTVKFRCPAGGNPMPTMRWLKNGKEFKQEHRIGGYKVRNQHWSLIMESVVPSDKGNYTCVVENEYGSINHTYHLDVVGSQGL

SEQ ID NO: 2691 - protein, 242 aa, Artificial Sequence
  Synthetic polypeptide
PGAVAHACSPSTFGGQGKKNSILLHKVQHDLNSGVFNNQENAIIQEIVKYDREMVQQAELGQRVGLFPPPPPPPQVTSAIATLQQAAAMSFCPQVARPLVGPLALGSPRLVRRPPPGPAPAAASPGPPPPASPPGAPASPRAPRTSPYGGLPAAPLAGPALPARRLSRASRPLSASQPSLPHGAPGPAASTRPASSSTPRLGPTPAARAAAPSPDRRDSASPGAAGGLDPQDSARSRLSSNL

SEQ ID NO: 2692 - protein, 242 aa, Artificial Sequence
  Synthetic polypeptide
CLPGRVMSELETACGKPMRHKTSSSSLRMGAYVFIGVGAVTMLMGFLGCIGAVNEVRCLLGLYFAFLLLILIAQVTAGALFYFNMGKLKQEMGGIVTELIRDYNSSREDSLQDAWDYVQAQVKCCGWVSFYNWTDNAELMNRPEVTYPCSCEVKGEEDNSLSVRKGFCEAPGNRTQSGNHPEDWPVYQEGCMEKVQAWLQENLGIILGVGVGVAIIELLGMVLSICLCRHVHSEDYSKVPKY

SEQ ID NO: 2693 - protein, 242 aa, Artificial Sequence
  Synthetic polypeptide
KRDTAVKWTHQVINDLVSFVQYTVAAKLLGIVITPLLLLLFLGSSSSVPFTSIFSQLFMTVVVPLIIGQIVRRYIKDWLERKKPPFGAISSSVLLMIIYTTFCDTFSNPNIDLDKFSLVLILFIIFSIQLSFMLLTFIFSTRNNSGFTPADTVAIIFCSTHKSLTLGIPMLKIVFAGHEHLSLISVPLLIYHPAQILLGSVLVPTIKSWMVSRQKKLLQTRGPLANLNNPEGLEYLSIKFGH

SEQ ID NO: 2694 - protein, 242 aa, Artificial Sequence; identical to SEQ ID NO: 2693
  Synthetic polypeptide

SEQ ID NO: 2695 - protein, 242 aa, Artificial Sequence
  Synthetic polypeptide
FLQLKSPDEGFEGKSLYESWTKKSPSPEFSGMPRISKLGSGNDFEVFFQRLGIASGRARYTKNWETNKFSGYPLYHSVYETYELVEKFYDPMFKYHLTVAQVRGGMVFELANSIVLPFDCRDYAVVLRKYADKIYSISMKHPQEMKTYSVSFDSLFSAVKNFTEIASKFSERLQDFDKSKHVIYAPSSHNKYAGESFPGIYDALFDIESKVDPSKAWGEVKRQIYVAAFTVQAAAETLSEVA

SEQ ID NO: 2696 - protein, 242 aa, Artificial Sequence; identical to SEQ ID NO: 2695
  Synthetic polypeptide

SEQ ID NO: 2697 - protein, 241 aa, Artificial Sequence
  Synthetic polypeptide
LMPVIPAPWEAKLNDGQFTVIQLVGMLRGIASGMRYLAEMSYVHRDLAARNILVNSNLVCKVSDFGLSRFLEENSSDPTYTSSLGGKIPIRWTAPEAIAFRKFTSASDAWSYGIVMWEVMSFGERPYWDMSNQDVINAIEQDYRLPPPPDCPTSLHQLMLDCWQKDRNARPRFPQVVSALDKMIRNPASLKIVARENGGDLLRIGVTLAGHQKKILASVQHMKSQAKPGTPGGTGGPAPQY

SEQ ID NO: 2698 - protein, 240 aa, Artificial Sequence
  Synthetic polypeptide
GQELETSLGNTLNDGQFTVIQLVGMLRGIASGMRYLAEMSYVHRDLAARNILVNSNLVCKVSDFGLSRFLEENSSDPTYTSSLGGKIPIRWTAPEAIAFRKFTSASDAWSYGIVMWEVMSFGERPYWDMSNQDVINAIEQDYRLPPPPDCPTSLHQLMLDCWQKDRNARPRFPQVVSALDKMIRNPASLKIVARENGGDLLRIGVTLAGHQKKILASVQHMKSQAKPGTPGGTGGPAPQY

SEQ ID NO: 2699 - protein, 240 aa, Artificial Sequence
  Synthetic polypeptide
MITQEKAPGPGCQALWMHKVPASLMVSLGEDAHFQCPHNSSNNANVTWWRVLHGNYTWPPEFLGPGEDPNGTLIIQNVNKSHGGIYVCRVQEGNESYQQSCGTYLRVRREWPSPGPYSHCPAGDTRFIFEVGIEPVPSMWVSNRLGQRDGHSPLQSGVSGGSGALQEVGGARRLGRARGARALSHTTSLQSRPPGPSWTWGRAPRTESSQPRGSSSCSARWCLGRCCCSGNDGRTRSSGW

SEQ ID NO: 2700 - protein, 240 aa, Artificial Sequence
  Synthetic polypeptide
NVTSLNLQLENLRMKLPKPPKPVSKMRMATPLLMQALPMGALPQGPMQNATKYGNMTEDHVMHLLQNADPLKVYPPLKGSFPENLRHLKNTMETIDWKVFESWMHHWLLFEMSRHSLEQKPTDAPPKVLTKCQEEVSHIPAVHPGSFRPKCDENGNYLPLQCYGSIGYCWCVFPNGTEVPNTRSRGHHNCSESLELEDPSSGLGVTKQDLGPGKGLAEGHLVTSSSSPAGPAPLWAGEGV

SEQ ID NO: 2701 - protein, 239 aa, Artificial Sequence
  Synthetic polypeptide
QGSTQCSPQDKSGVLPFLCERGLDHAIPHYVTMYLPLLLVLVANPILFQKTVTAVASLLKGRQGIYTENERRMGAVIKIRFFKIMLVLIICWLSNIINESLLFYLEMQTDINGGSLKPVRTAAKTTWFIMGILNPAQGFLLSLAFYGWTGCSLGFQSPRKEIQWESLTTSAAEGAHPSPLMPHENPASGKVSQVGGQTSDEALSMLSEGSDASTIEIHTASESCNKNEGDPALPTHGDL

SEQ ID NO: 2702 - protein, 239 aa, Artificial Sequence; identical to SEQ ID NO: 2701
  Synthetic polypeptide

SEQ ID NO: 2703 - protein, 238 aa, Artificial Sequence
  Synthetic polypeptide
KKKMSKLFIYAKYIPSESVSKQEEVYVKEVFNILGTTALHSLTNGEIAEMVLIQGDCDNGDHQDDINTAEVMEVWHGLVIAVVSLFLQACFLTAINYLLSRHMAHKSEQILKAASLQVPRPSPGHHHPPAVKEMKETQTERDIPMSDSLYRHDSDTPSDSLDSSCSSPPACQATEDVDYTQVVFSDPGELKNDSPLDYENIKEITDYVNVNPERHKPSFWYFVNPALSEPAEYDQVAM

SEQ ID NO: 2704 - protein, 238 aa, Artificial Sequence
  Synthetic polypeptide
IETWLPPVDVKLTGRLMLAVGGAVLGSLQFGYNTGVINAPQKVIEEFYNQTWVHRYGESILPTTLTTLWSLSVAIFSVGGMIGSFSVGLFVNRFGRRNSMLMMNLLAFVSAVLMGFSKLGKSFEMLILGRFIIGVYCGLTTGFVPMYVGEVSPTALRGALGTLHQLGIVVGILIAQVSWGRIYLPGTAPAHSFSGSRICAQQGRVSLPPSPHSLAEDNYGTQVQRTQHHGLPVDSKMT

SEQ ID NO: 2705 - protein, 238 aa, Artificial Sequence
  Synthetic polypeptide
ATYKGLLVQQIIFFLGTTALAFLVLMPVLHGRNLLLFRSLESSWPFWLTLALAVILQNMAAHWVFLETHDGHPQLTNRRVLYAATFLLFPLNVLVGAMVATWRVLLSALYNAIHLGQMDLSLLPPRAATLDPGYYTYRNFLKIEVSQSHPAMTAFCSLLLQAQSLLPRTMAAPQDSLRPGEEDEGMQLLQTKDSMAKGARPGASRGRARWGLAYTLLHNPTLQVFRKTALLGANGAQP

SEQ ID NO: 2706 - protein, 238 aa, Artificial Sequence; identical to SEQ ID NO: 2705
  Synthetic polypeptide

SEQ ID NO: 2707 - protein, 238 aa, Artificial Sequence; identical to SEQ ID NO: 2705
  Synthetic polypeptide

SEQ ID NO: 2708 - protein, 238 aa, Artificial Sequence; identical to SEQ ID NO: 2705
  Synthetic polypeptide

SEQ ID NO: 2709 - protein, 238 aa, Artificial Sequence; identical to SEQ ID NO: 2705
  Synthetic polypeptide

SEQ ID NO: 2710 - protein, 238 aa, Artificial Sequence; identical to SEQ ID NO: 2705
  Synthetic polypeptide

SEQ ID NO: 2711 - protein, 238 aa, Artificial Sequence; identical to SEQ ID NO: 2705
  Synthetic polypeptide

SEQ ID NO: 2712 - protein, 238 aa, Artificial Sequence; identical to SEQ ID NO: 2705
  Synthetic polypeptide

SEQ ID NO: 2713 - protein, 238 aa, Artificial Sequence
  Synthetic polypeptide
VANTEKSGRLNIKIYFLLFLEDQNIWQHQVGIVGRTGAGKSSLTLGLFRINESAEGEIIIDGINIAKIGLHDLRFKITIIPQDPVLFSGSLRMNLDPFSQYSDEEVWTSLELAHLKDFVSALPDKLDHECAEGGENLSVGQRQLVCLARALLRKTKILVLDEATAAVDLETDDLIQSTIRTQFEDCTVLTIAHRLNTIMDYTRVIVLDKGEIQEYGAPSDLLQQRGLFYSMAKDAGLV

SEQ ID NO: 2714 - protein, 238 aa, Artificial Sequence; identical to SEQ ID NO: 2713
  Synthetic polypeptide

SEQ ID NO: 2715 - protein, 238 aa, Artificial Sequence; identical to SEQ ID NO: 2713
  Synthetic polypeptide

SEQ ID NO: 2716 - protein, 238 aa, Artificial Sequence; identical to SEQ ID NO: 2713
  Synthetic polypeptide

SEQ ID NO: 2717 - protein, 238 aa, Artificial Sequence; identical to SEQ ID NO: 2713
  Synthetic polypeptide

SEQ ID NO: 2718 - protein, 238 aa, Artificial Sequence; identical to SEQ ID NO: 2713
  Synthetic polypeptide

SEQ ID NO: 2719 - protein, 237 aa, Artificial Sequence
  Synthetic polypeptide
PWASVSSSVKWGEQRPPPHLPAAGRAQRDSSLAFLPTVSIAAKRRFHMEAMVYLFTLFFVALHHACNGPGLSVLCFMRHDILEYFSVYGTALSMWVSLMALADFDEPKRSTFVMFGVLTIAVRIYHDRWGYGVYSGPIGTAILIIAAKWLQKMKEKKGLYPDKSVYTQQIGPGLCFGALALMLRFFFEDWDYTYVHSFYHCALAMSFVLLLPKVNKKAGSPGTPAKLDCSTLCCACV

SEQ ID NO: 2720 - protein, 235 aa, Artificial Sequence
  Synthetic polypeptide
GAPLPGRPYWEVRSPSARPAAPSRGEVGGSAPRPASRPIREVRGASARPPLLGSEEPLCPATAPSGRVMEVWHGLVIAVVSLFLQACFLTAINYLLSRHMAHKSEQILKAASLQVPRPSPGHHHPPAVKEMKETQTERDIPMSDSLYRHDSDTPSDSLDSSCSSPPACQATEDVDYTQVVFSDPGELKNDSPLDYENIKEITDYVNVNPERHKPSFWYFVNPALSEPAEYDQVAM

SEQ ID NO: 2721 - protein, 235 aa, Artificial Sequence
  Synthetic polypeptide
SNFLLSVCLHTRQWFLEEGAIWFISKACLTGATAVLFAVFVRYNHKTDAALWHRSNHSNADNEFYFRYPRTIFLWIFWPSFNAALTALGAGQHRTALNTYYSLAASTLGTFALSALVGEDGRLDMVHIQNAALAGGVVVGTSSEMMLTPFGALAAGFLAGTVSTLGPSLNQNSKSKTHVESTTSMGCRGSWGPSWGSLWLDLPPMKLTEMGEFPPNPYCSRHPSGMTSVILFHCV

SEQ ID NO: 2722 - protein, 234 aa, Artificial Sequence
  Synthetic polypeptide
MDMVAQACDPSTLGGQNDYPCSGMLGMVSGLISDSQITSSNQGDRNWMPENIRLVTSRSGWALPPAPHSYINEWLQIDLGEEKIVRGIIIQGGKHRENKVFMRKFKIGYSNNGSDWKMIMDDSKRKAKSFEGNNNYDTPELRTFPALSTRFIRIYPERATHGGLGLRMELLGCEVEAPTAGPTTPNGNLVDECDDDQANCHSGTGDDFQLTGGTTVLATEKPTVIDSTIQSGIK

SEQ ID NO: 2723 - protein, 234 aa, Artificial Sequence
  Synthetic polypeptide
TTEGTILSRPSNAKEIDCSTDWRTLELRAATKLTEEKYELKEGQTLDVKCDYTLEKFASSQKAWQIIRDGEMPKTLACTERPSKNSHPVQVGRIILEDYHDHGLLRVRMVNLQVEDSGLYQCVIYQPPKEPHMLFDRIRLVVTKGFSGTPGSNENSTQNVYKIPPTTTKALCPLYTSPRTVTQAPPKSTADVSTPDSEINLTNVTDIIRYSFQVPGPLVWTLSPLFPSLCAERM

SEQ ID NO: 2724 - protein, 234 aa, Artificial Sequence
  Synthetic polypeptide
IRVCIVNKGVLSDLTKVTRMHGIDPVVLVLMVGVVMFTLGFAGCVGALRENICLLNFFCGTIVLIFFLELAVAVLAFLFQDWVRDRFREFFESNIKSYRDDIDLQNLIDSLQKANQCCGAYGPEDWDLNVYFNCSGASYSREKCGVPFSCCVPDPAQKVVNTQCGYDVRIQLKSKWDESIFTKGCIQALESWLPRNIYIVAGVFIAISLLQIFGIFLARTLISDIEAVKAGHHF

SEQ ID NO: 2725 - protein, 234 aa, Artificial Sequence; identical to SEQ ID NO: 2724
  Synthetic polypeptide

SEQ ID NO: 2726 - protein, 234 aa, Artificial Sequence; identical to SEQ ID NO: 2724
  Synthetic polypeptide

SEQ ID NO: 2727 - protein, 234 aa, Artificial Sequence; identical to SEQ ID NO: 2724
  Synthetic polypeptide

SEQ ID NO: 2728 - protein, 234 aa, Artificial Sequence
  Synthetic polypeptide
TLLPQVVRNMTSEFFAAQLRAQISDDTTHPISYYKPEFYTPDDGGTAHLSVVAEDGSAVSATSTINLYFGSKVRSPVSGILFNNEMDDFSSPSITNEFGVPPSPANFIQPGKQPLSSMCPTIMVGQDGQVRMVVGAAGGTQITTATALAIIYNLWFGYDVKRAVEEPRLHNQLLPNVTTVERNIDQAVTAALETRHHHTQIASTFIAVVQAIVRTAGGWAAASDSRKGGEPAGY

SEQ ID NO: 2729 - protein, 234 aa, Artificial Sequence; identical to SEQ ID NO: 2728
  Synthetic polypeptide

SEQ ID NO: 2730 - protein, 234 aa, Artificial Sequence; identical to SEQ ID NO: 2728
  Synthetic polypeptide

SEQ ID NO: 2731 - protein, 234 aa, Artificial Sequence; identical to SEQ ID NO: 2728
  Synthetic polypeptide

SEQ ID NO: 2732 - protein, 234 aa, Artificial Sequence; identical to SEQ ID NO: 2728
  Synthetic polypeptide

SEQ ID NO: 2733 - protein, 233 aa, Artificial Sequence
  Synthetic polypeptide
LPTKQIIFFLGTTALAFLVLMPVLHGRNLLLFRSLESSWPFWLTLALAVILQNMAAHWVFLETHDGHPQLTNRRVLYAATFLLFPLNVLVGAMVATWRVLLSALYNAIHLGQMDLSLLPPRAATLDPGYYTYRNFLKIEVSQSHPAMTAFCSLLLQAQSLLPRTMAAPQDSLRPGEEDEGMQLLQTKDSMAKGARPGASRGRARWGLAYTLLHNPTLQVFRKTALLGANGAQP

SEQ ID NO: 2734 - protein, 233 aa, Artificial Sequence; identical to SEQ ID NO: 2733
  Synthetic polypeptide

SEQ ID NO: 2735 - protein, 233 aa, Artificial Sequence; identical to SEQ ID NO: 2733
  Synthetic polypeptide

SEQ ID NO: 2736 - protein, 233 aa, Artificial Sequence; identical to SEQ ID NO: 2733
  Synthetic polypeptide

SEQ ID NO: 2737 - protein, 233 aa, Artificial Sequence; identical to SEQ ID NO: 2733
  Synthetic polypeptide

SEQ ID NO: 2738 - protein, 233 aa, Artificial Sequence; identical to SEQ ID NO: 2733
  Synthetic polypeptide

SEQ ID NO: 2739 - protein, 233 aa, Artificial Sequence; identical to SEQ ID NO: 2733
  Synthetic polypeptide

SEQ ID NO: 2740 - protein, 233 aa, Artificial Sequence; identical to SEQ ID NO: 2733
  Synthetic polypeptide

SEQ ID NO: 2741 - protein, 233 aa, Artificial Sequence
  Synthetic polypeptide
SCMKAAHVVLSAWYKSLVTGTRARGVIAVLWVLAFGIGLTPFLGWNSKDSATNNCTEPWDGTTNESCCLVKCLFENVVPMSYMVYFNFFGCVLPPLLIMLVIYIKIFLVACRQLQRTELMDHSRTTLQREIHAAKSLAMIVGIFALCWLPVHAVNCVTLFQPAQGKNKPKWAMNMAILLSHANSVVNPIVYAYRNRDFRYTFHKIISRYLLCQADVKSGNGQAGVQPALGVGL

SEQ ID NO: 2742 - protein, 233 aa, Artificial Sequence
  Synthetic polypeptide
DTINQAGYDGESIGNCPFSQRLFMILWLKGVIFNVTTVDLKRKPADLQNLAPGTNPPFMTFDGEVKTDVNKIEEFLEEKLAPPRYPKLGTQHPESNSAGNDVFAKFSAFIKNTKKDANEIHEKNLLKALRKLDNYLNSPLPDEIDAYSTEDVTVSGRKFLDGDELTLADCNLLPKLHIIKIVAKKYRDFEFPSEMTGIWRYLNNAYARDEFTNTCPADQEIEHAYSDVAKRMK

SEQ ID NO: 2743 - protein, 233 aa, Artificial Sequence; identical to SEQ ID NO: 2742
  Synthetic polypeptide

SEQ ID NO: 2744 - protein, 232 aa, Artificial Sequence
  Synthetic polypeptide
LPTKIIFFLGTTALAFLVLMPVLHGRNLLLFRSLESSWPFWLTLALAVILQNMAAHWVFLETHDGHPQLTNRRVLYAATFLLFPLNVLVGAMVATWRVLLSALYNAIHLGQMDLSLLPPRAATLDPGYYTYRNFLKIEVSQSHPAMTAFCSLLLQAQSLLPRTMAAPQDSLRPGEEDEGMQLLQTKDSMAKGARPGASRGRARWGLAYTLLHNPTLQVFRKTALLGANGAQP

SEQ ID NO: 2745 - protein, 232 aa, Artificial Sequence; identical to SEQ ID NO: 2744
  Synthetic polypeptide

SEQ ID NO: 2746 - protein, 232 aa, Artificial Sequence; identical to SEQ ID NO: 2744
  Synthetic polypeptide

SEQ ID NO: 2747 - protein, 232 aa, Artificial Sequence; identical to SEQ ID NO: 2744
  Synthetic polypeptide

SEQ ID NO: 2748 - protein, 232 aa, Artificial Sequence; identical to SEQ ID NO: 2744
  Synthetic polypeptide

SEQ ID NO: 2749 - protein, 232 aa, Artificial Sequence; identical to SEQ ID NO: 2744
  Synthetic polypeptide

SEQ ID NO: 2750 - protein, 232 aa, Artificial Sequence; identical to SEQ ID NO: 2744
  Synthetic polypeptide

SEQ ID NO: 2751 - protein, 232 aa, Artificial Sequence; identical to SEQ ID NO: 2744
  Synthetic polypeptide

SEQ ID NO: 2752 - protein, 231 aa, Artificial Sequence
  Synthetic polypeptide
GWARWLTPVIPALWEAKASGSLEGPFVTWRSMSVLPAHAAREVPVWMGKMASAASARLAPCPHSASPRAIPVPMSPAVTASAMMHLAGSAVCVSLAGVAPAAARAWPETPVSPSRAGPVGHAAAMEWVSTAPARLVSRDVSVNSSPPAPRTPVSMGAAASLPLASCLSAPAPRAGKAHDASRMWTSVLAPHPVALMVSAPTWQGVSAAPAMEGTLALPAIRTSMTVTPTHA

SEQ ID NO: 2753 - protein, 231 aa, Artificial Sequence
  Synthetic polypeptide
MDMVAQACDPSTLGGQNDYPCSGMLGMVSGLISDSQITSSNQGDRNWMPENIRLVTSRSGWALPPAPHSYINEWLQIDLGEEKIVRGIIIQGGKHRENKVFMRKFKIGYSNNGSDWKMIMDDSKRKAKSFEGNNNYDTPELRTFPALSTRFIRIYPERATHGGLGLRMELLGCEVEGTINTDQECPCARALAKDAKKKKRWADSTHCRCVRSIHGEMWSSGKGVCSLDANL

SEQ ID NO: 2754 - protein, 231 aa, Artificial Sequence
  Synthetic polypeptide
EHWKLTGRLMLAVGGAVLGSLQFGYNTGVINAPQKVIEEFYNQTWVHRYGESILPTTLTTLWSLSVAIFSVGGMIGSFSVGLFVNRFGRRNSMLMMNLLAFVSAVLMGFSKLGKSFEMLILGRFIIGVYCGLTTGFVPMYVGEVSPTALRGALGTLHQLGIVVGILIAQVSWGRIYLPGTAPAHSFSGSRICAQQGRVSLPPSPHSLAEDNYGTQVQRTQHHGLPVDSKMT

SEQ ID NO: 2755 - protein, 231 aa, Artificial Sequence
  Synthetic polypeptide
CQHFERPRREDHEPVMDDQRDLISNNEQLPMLGRRPGAPESKCSRGALYTGFSILVTLLLAGQATTAYFLYQQQGRLDKLTVTSQNLQLENLRMKLPKPPKPVSKMRMATPLLMQALPMGALPQGPMQNATKYGNMTEDHVMHLLQNADPLKVYPPLKGSFPENLRHLKNTMETIDWKVFESWMHHWLLFEMSRHSLEQKPTDAPPKESLELEDPSSGLGVTKQDLGPVPM

SEQ ID NO: 2756 - protein, 229 aa, Artificial Sequence
  Synthetic polypeptide
MRKEQGSCGRSWDVDECSSGQHQCDSSTVCFNTVGSYSCRCRPGWKPRHGIPNNQKDTVCEDMTFSTWTPPPGVHSQTLSRFFDKVQDLGRDYKPGLANNTIQSILQALDELLEAPGDLETLPRLQQHCVASHLLDGLEDVLRGLSKNLSNGLLNFSYPAGTELSLEVQKQVDRSVTLRQNQAVMQLDWNQAQKSGDPGGGSRADCHHLHGAERLSAVPPPGGPHFSPV

SEQ ID NO: 2757 - protein, 228 aa, Artificial Sequence
  Synthetic polypeptide
LTLLTLPFCLVSNKYQHSLAFRATTGLCVLVVVVPRAQVAALERQVFDFLGYQWAPILANFVHIIIVILGLFGTIQYRLRYVMVYTLWAAVWVTWNVFIICFYLEVGGLLKDSELLTFSLSRHRSWWRERWPGCLHEEVPAVGLGAPHGQALVSGAGCALEPSYVEALHSCLQILIALLGFVCGCQVVSVFTEEEDSFDFIGGFDPFPLYHVNEKPSSLLSKQVYLPA

SEQ ID NO: 2758 - protein, 227 aa, Artificial Sequence
  Synthetic polypeptide
CGIEEKMLSLAPKRNKVESELLKGYSKYLSHDVVVMTVKLCILFAVLLTVPLIHFPARKAVTMMFFSNFPFSWIRHFLITLALNIIIVLLAIYVPDIRNVFGVVGASTSTCLIFIFPGLFYLKLSREDFLSWKKLGGLILSHRLACSGVISAHCNLCLPDSSNPPTSASRVAETTGRDTMEMCTQRKGHARTQQEGNCLQAKGRGLRRTKRVHTLILHFPTSRTVSK

SEQ ID NO: 2759 - protein, 227 aa, Artificial Sequence; identical to SEQ ID NO: 2758
  Synthetic polypeptide

SEQ ID NO: 2760 - protein, 227 aa, Artificial Sequence
  Synthetic polypeptide
WAHWSKDSLISILPVPKQVGIVGRTGAGKSSLASGLLRLQEAAEGGIWIDGVPIAHVGLHTLRSRISIIPQDPILFPGSLRMNLDLLQEHSDEAIWAALETVQLKALVASLPGQLQYKCADRGEDLSVGQKQLLCLARALLRKTQILILDEATAAVDPGTELQMQAMLGSWFAQCTVLLIAHRLRSVMDCARVLVMDKGQVAESGSPAQLLAQKGLFYRLAQESGLV

SEQ ID NO: 2761 - protein, 226 aa, Artificial Sequence
  Synthetic polypeptide
ESTKTCQLYTTGSLDLSAKKEITEIPLILYLFALISVTWLWGGLHMAYRHFWMLVLFVIFNSLQGLYVFMVYFILHNQMCCPMKASYTVEMNGHPGPSTAFFTPGSGMPPAGGEISKSTQNLIGAMEEVPPDWERASFQQGSQASPDLKPSPQNGATFPSSGGYGQGSLIADEESQEFDDLIFALKTGAGLSVSDNESGQGSQEGGTLTDSQIVELRRIPIADTHL

SEQ ID NO: 2762 - protein, 226 aa, Artificial Sequence; identical to SEQ ID NO: 2761
  Synthetic polypeptide

SEQ ID NO: 2763 - protein, 225 aa, Artificial Sequence
  Synthetic polypeptide
IFQIFQQLMMGNSPSKVGIVGRTGAGKSSLTLGLFRINESAEGEIIIDGINIAKIGLHDLRFKITIIPQDPVLFSGSLRMNLDPFSQYSDEEVWTSLELAHLKDFVSALPDKLDHECAEGGENLSVGQRQLVCLARALLRKTKILVLDEATAAVDLETDDLIQSTIRTQFEDCTVLTIAHRLNTIMDYTRVIVLDKGEIQEYGAPSDLLQQRGLFYSMAKDAGLV

SEQ ID NO: 2764 - protein, 225 aa, Artificial Sequence; identical to SEQ ID NO: 2763
  Synthetic polypeptide

SEQ ID NO: 2765 - protein, 225 aa, Artificial Sequence; identical to SEQ ID NO: 2763
  Synthetic polypeptide

SEQ ID NO: 2766 - protein, 225 aa, Artificial Sequence; identical to SEQ ID NO: 2763
  Synthetic polypeptide

SEQ ID NO: 2767 - protein, 225 aa, Artificial Sequence; identical to SEQ ID NO: 2763
  Synthetic polypeptide

SEQ ID NO: 2768 - protein, 225 aa, Artificial Sequence; identical to SEQ ID NO: 2763
  Synthetic polypeptide

SEQ ID NO: 2769 - protein, 225 aa, Artificial Sequence
  Synthetic polypeptide
SQYSGLRQENRLNPGGRDELLQKEQNYSDDVLANMISEPRISYGNDALMPSLTETKTTVELLPVNGEFSLDDLQPWHSFGADSVPANTENEVEPVDARPAADRGLTTRPGSGLTNIKTEEISEVKMDAEFRHDSGYEVHHQKLVFFAEDVGSNKGAIIGLMVGGVVIATVIVITLVMLKKKQYTSIHHGVVEVDAAVTPEERHLSKMQQNGYENPTYKFFEQMQN

SEQ ID NO: 2770 - protein, 225 aa, Artificial Sequence; identical to SEQ ID NO: 2769
  Synthetic polypeptide

SEQ ID NO: 2771 - protein, 225 aa, Artificial Sequence; identical to SEQ ID NO: 2769
  Synthetic polypeptide

SEQ ID NO: 2772 - protein, 225 aa, Artificial Sequence; identical to SEQ ID NO: 2769
  Synthetic polypeptide

SEQ ID NO: 2773 - protein, 225 aa, Artificial Sequence; identical to SEQ ID NO: 2769
  Synthetic polypeptide

SEQ ID NO: 2774 - protein, 225 aa, Artificial Sequence; identical to SEQ ID NO: 2769
  Synthetic polypeptide

SEQ ID NO: 2775 - protein, 225 aa, Artificial Sequence; identical to SEQ ID NO: 2769
  Synthetic polypeptide

SEQ ID NO: 2776 - protein, 225 aa, Artificial Sequence; identical to SEQ ID NO: 2769
  Synthetic polypeptide

SEQ ID NO: 2777 - protein, 224 aa, Artificial Sequence
  Synthetic polypeptide
RQGLLLCSQLLNSLSVDPDAECKYGLYFRDGRRKVDYILVYHHKRPSGNRTLVRRVQHSDTPSGARSVKQDHPLPGKGASLDAGSGEPPMDYHEDDKRFRREEYEGNLLEAGLELERDEDMYHINETRGLLKKINSVLQKITDPIQPKVAEHRPQTMKRLSYPFSREKQHLFDLSDKDSFFDSKTRSTIVYEILKRTTCTKAKYSMGITSLLANGVYAAAYPLH

SEQ ID NO: 2778 - protein, 224 aa, Artificial Sequence
  Synthetic polypeptide
AEIQMKTTYFHLSDLQSNQQMHRKTASLNSPVSCKEKPDRVEEPPDYSLHWPEGLKGEEIKKCGREGITLNKYNQQYHKLFKDVPLEEVVLKVCSCALQRDFLLQGRLYISPNWLCFHASLFGKDIKVVIPVVSVQMIKKHKMARLLPNGLAITTNTSQKYIFVSLLSRDSVYDLLRRVCTHLQPSSKKSLSVREFSGEPESLEVLIPEMKWRKVCPSSRSLSL

SEQ ID NO: 2779 - protein, 224 aa, Artificial Sequence
  Synthetic polypeptide
KRDTAVKWTHQVINDLVSFVQYTVAAKLLGIVITPLLLLLFLGSSSSVPFTSIFSQLFMTVVVPLIIGQIVRRYIKDWLERKKPPFGAISSSVLLMIIYTTFCDTFSNPNIDLDKFSLVLILFIIFSIQLSFMLLTFIFSTRNNSGFTPADTVAIIFCSTHKSLTLGIPMLKIVFAGHEHLSLISVPLLIYHPAQILLGSVLVPTIKSWMVSRQKGVKLTRPTV

SEQ ID NO: 2780 - protein, 224 aa, Artificial Sequence; identical to SEQ ID NO: 2779
  Synthetic polypeptide

SEQ ID NO: 2781 - protein, 224 aa, Artificial Sequence
  Synthetic polypeptide
QTIIGGREKEEVWVLIHWLPYCKLPSGWLHCLAEALGSNLHVEVKGYEDGGIHLECRSTGWYPQPQIQWSNAKGENIPAVEAPVVADGVGLYEVAASVIMRGGSGEGVSCIIRNSLLGLEKTASISIADPFFRSAQPWIAALAGTLPILLLLLAGASYFLWRQQKEITALSSEIESEQEMKEMGYAATEREISLRESLQEELKRKKIQYLTRGEESSSDTNKSA

SEQ ID NO: 2782 - protein, 224 aa, Artificial Sequence; identical to SEQ ID NO: 2781
  Synthetic polypeptide

SEQ ID NO: 2783 - protein, 224 aa, Artificial Sequence; identical to SEQ ID NO: 2781
  Synthetic polypeptide

SEQ ID NO: 2784 - protein, 224 aa, Artificial Sequence; identical to SEQ ID NO: 2781
  Synthetic polypeptide

SEQ ID NO: 2785 - protein, 224 aa, Artificial Sequence; identical to SEQ ID NO: 2781
  Synthetic polypeptide

SEQ ID NO: 2786 - protein, 224 aa, Artificial Sequence; identical to SEQ ID NO: 2781
  Synthetic polypeptide

SEQ ID NO: 2787 - protein, 223 aa, Artificial Sequence
  Synthetic polypeptide
HRETPSLLKIRKISRAWWRAPVVPATPEADAGECVTSYQLSAGYSRWPSVTSQEWVFQMLSRQNNYTVNNKRNGVAKVNIFFKELNYKTNSESPSVTMVTLLSNLGSQWSLWFGSSVLSVVEMAELVFDLLVIMFLMLLRRFRSRYWSPGRGGRGAQEVASTLASSPPSHFCPHPMSLSLSQPGPAPSPALTAPPPAYATLGPRPSPGGSAGASSSTCPLGGP

SEQ ID NO: 2788 - protein, 223 aa, Artificial Sequence; identical to SEQ ID NO: 2787
  Synthetic polypeptide

SEQ ID NO: 2789 - protein, 223 aa, Artificial Sequence; identical to SEQ ID NO: 2787
  Synthetic polypeptide

SEQ ID NO: 2790 - protein, 223 aa, Artificial Sequence; identical to SEQ ID NO: 2787
  Synthetic polypeptide

SEQ ID NO: 2791 - protein, 223 aa, Artificial Sequence; identical to SEQ ID NO: 2787
  Synthetic polypeptide

SEQ ID NO: 2792 - protein, 223 aa, Artificial Sequence
  Synthetic polypeptide
VDGLRSGVRIQPGQHGESPSLLKIQKISQDKVFWTDIINEAIFSANRLTGSDVNLLAENLLSPEDMVLFHNLTQPREAEAAVATQETSTVRLKVSSTAVRTQHTTTRPVPDTSRLPGATPGLTTVEIVTMSHQALGDVAGRGNEKKPSSVRALSIVLPIVLLVFLCLGVFLLWKNWRLKNINSINFDNPVYQKTTEDEVHICHNQDGYSYPSRQMVSLEDDVA

SEQ ID NO: 2793 - protein, 222 aa, Artificial Sequence
  Synthetic polypeptide
ILHSLICFNVGSGLHLQVLSTRNENKLLPKHPHLVRQKRAWITAPVALREGEDLSKKNPIAKIHSDLAEERGLKITYKYTGKGITEPPFGIFVFNKDTGELNVTSILDREETPFFLLTGYALDARGNNVEKPLELRIKVLDINDNEPVFTQDVFVGSVEELSAAHTLVMKINATDADEPNTLNSKISYRIVSLEPAYPPVFYLNKDTGEIYTTSVTLDREVS

SEQ ID NO: 2794 - protein, 222 aa, Artificial Sequence
  Synthetic polypeptide
NQYRVLDENMTFGIIQSQVFGTNVMVTVAKSFEAPIKLVFPQDLLEKGLEANNFAMLGLGDVVIPGIFIALLLRFDISLKKNTHTYFYTSFAAYIFGLGLTIFIMHIFKHAQPALLYLVPACIGFPVLVALAKGEVTEMFSYESSAEILPHTPRLTHFPTVSGSPASLADSMQQKLAGPRRRRPQNPSAIYEESNPKDPAAVTESKEGTEASASKGLEKKEK

SEQ ID NO: 2795 - protein, 221 aa, Artificial Sequence
  Synthetic polypeptide
EAFPFELGSHSSPSCRPVKKDLFASPSAMVISFLRLPQPCRTVSALERQIFDFLGFQWAPILGNFLHIIVVILGLFGTIQYRPRYIMVYTVWTALWVTWNVFIICFYLEVGGLSKDTDLMTFNISVHRSWWREHGPGCVRRVLPPSAHGMMDDYTYVSVTGCIVDFQYLEVIHSAVQILLSLVGFVYACYVISISMEEEDTYSCDLQVCKHLFIQMLQIIE

SEQ ID NO: 2796 - protein, 221 aa, Artificial Sequence; identical to SEQ ID NO: 2795
  Synthetic polypeptide

SEQ ID NO: 2797 - protein, 221 aa, Artificial Sequence
  Synthetic polypeptide
ARSRRRSGTQLRPGSNPGTAPLALESLGRTSTLSRTRIRCRVNTFMSFIFPMVVISVLNTIIANKLTVMVRQAAEQGQVCTVGGEHSTFSMAIEPGRVQALRHGVRVLRAVVIAFVVCWLPYHVRRLMFCYISDEQWTPFLYDFYHYFYMVTNALFYVSSTINPILYNLVSANFRHIFLATLACLCPVWRRRRKRPAFSRKADSVSSNHTLSSNATRETLY

SEQ ID NO: 2798 - protein, 221 aa, Artificial Sequence
  Synthetic polypeptide
GRAQWLTPVIAALWEAEAGRSRGEEIETILANMKKVHCLNMDSLSFQLGLYLSPHFLQASNTIEPGQQSFVQVRVSPSVSEFLLQLDSCHLDLGPEGGTVELIQGRAAKGNCVSLLSPSPEGDPRFSFLLHFYTVPIPKTGTLSCTVALRPKTGSQDQEVHRTVFMRLNIISPDLSGCTSKGLVLPAVLGITFGAFLIGALLTAALWYIYSHTREYPRPPQ

SEQ ID NO: 2799 - protein, 220 aa, Artificial Sequence
  Synthetic polypeptide
GLPSHVELTMGLSNILFVMAFLLSANFSQPEIVPISNITENVYINLTCSSIHGYPEPKKMSVLLRTKNSTIEYDGVMQKSQDNVTELYDVSISLSVSFPDVTSNMTIFCILETDKTRLLSSPFSIELEDPQPPPDHIPWITAVLPTVIICVMVFCLILWKWKKKKRPRNSYKCGTNTMEREESEQTKKREKIHIPERSDEAQRVFKSSKTSSCDKSDTCF

SEQ ID NO: 2800 - protein, 220 aa, Artificial Sequence
  Synthetic polypeptide
TRAGCVFQTPSHPQYPARVENMSMRLEEINERETFMKTSLQTVDLRLAQLEELSNRMVNALENLAGIDRSDLIQARSRASSECEATYLLRQSSINSADGYSLYRYHFNGEELLFEDTSLSTSPGTGVRKKTCSFRIKEEKDVKTHLVPECQNSLHLSLGTSTSATPDGSHLAVDDLKNAEESKLGPDIGISKEDDERQTDSKKEETISPSLNKTDVIHGQ

SEQ ID NO: 2801 - protein, 220 aa, Artificial Sequence; identical to SEQ ID NO: 2800
  Synthetic polypeptide

SEQ ID NO: 2802 - protein, 220 aa, Artificial Sequence
  Synthetic polypeptide
KRLAFALLSLTPSCCPVKKVPASPSTMIVGLLRLPQPCRTVNTFMSFIFPMVVISVLNTIIANKLTVMVRQAAEQGQVCTVGGEHSTFSMAIEPGRVQALRHGVRVLRAVVIAFVVCWLPYHVRRLMFCYISDEQWTPFLYDFYHYFYMVTNALFYVSSTINPILYNLVSANFRHIFLATLACLCPVWRRRRKRPAFSRKADSVSSNHTLSSNATRETLY

SEQ ID NO: 2803 - protein, 219 aa, Artificial Sequence
  Synthetic polypeptide
SQESQKERDSAQARLKSRHSPPCAGVFGQDLYPVQDSDQVNTFMSFIFPMVVISVLNTIIANKLTVMVRQAAEQGQVCTVGGEHSTFSMAIEPGRVQALRHGVRVLRAVVIAFVVCWLPYHVRRLMFCYISDEQWTPFLYDFYHYFYMVTNALFYVSSTINPILYNLVSANFRHIFLATLACLCPVWRRRRKRPAFSRKADSVSSNHTLSSNATRETLY

SEQ ID NO: 2804 - protein, 219 aa, Artificial Sequence
  Synthetic polypeptide
DVGSASAPPPHLGCEERLCPAATPSGRKPADLQNLAPGTHPPFITFNSEVKTDVNKIEEFLEEVLCPPKYLKLSPKHPESNTAGMDIFAKFSAYIKNSRPEANEALERGLLKTLQKLDEYLNSPLPDEIDENSMEDIKFSTRKFLDGNEMTLADCNLLPKLHIVKVVAKKYRNFDIPKEMTGIWRYLTNAYSRDEFTNTCPSDKEVEIAYSDVAKRLTK

SEQ ID NO: 2805 - protein, 219 aa, Artificial Sequence; identical to SEQ ID NO: 2804
  Synthetic polypeptide

SEQ ID NO: 2806 - protein, 218 aa, Artificial Sequence
  Synthetic polypeptide
HGETPYLLKIQKISRAWWRAPVIPATWEAEKKVHCLNMDSLSFQLGLYLSPHFLQASNTIEPGQQSFVQVRVSPSVSEFLLQLDSCHLDLGPEGGTVELIQGRAAKGNCVSLLSPSPEGDPRFSFLLHFYTVPIPKTGTLSCTVALRPKTGSQDQEVHRTVFMRLNIISPDLSGCTSKGLVLPAVLGITFGAFLIGALLTAALWYIYSHTREYPRPPQ

SEQ ID NO: 2807 - protein, 218 aa, Artificial Sequence
  Synthetic polypeptide
QIRKLAGGVILGVALWLRHDPQTTNLLYLELGDKPAPNTFYVGIYILIAVGAVMMFVGFLGCYGAIQESQCLLGTFFTCLVILFACEVAAGIWGFVNKDQIAKDVKQFYDQALQQAVVDDDANNAKAVVKTFHETLDCCGSSTLTALTTSVLKNNLCPSGSNIISNLFKEDCHQKIDDLFSGKLYLIGIAAIVVAVIMIFEMILSMVLCCGIRNSSVY

SEQ ID NO: 2808 - protein, 218 aa, Artificial Sequence; identical to SEQ ID NO: 2807
  Synthetic polypeptide

SEQ ID NO: 2809 - protein, 218 aa, Artificial Sequence
  Synthetic polypeptide
QIRKLAGGVILGVALWLRHDPQTTNLLYLELGDKPAPNTFYVGIYILIAVGAVMMFVGFLGCYGAIQESQCLLGTFFTCLVILFACEVAAGIWGFVNKDQIAKDVKQFYDQALQQAVVDDDANNAKAVVKTFHETLDCCGSSTLTALTTSVLKNNLCPSGSNIISNLFKEDCHQKIDDLFSGKLYLIGIAAIVVAVIMVSGRGRRACSLGCPFRGALC

SEQ ID NO: 2810 - protein, 218 aa, Artificial Sequence; identical to SEQ ID NO: 2807
  Synthetic polypeptide

SEQ ID NO: 2811 - protein, 218 aa, Artificial Sequence
  Synthetic polypeptide
GSPSARQLPRLRSEEPLHPAATPSGKKPADLQNLAPGTHPPFITFNSEVKTDVNKIEEFLEEVLCPPKYLKLSPKHPESNTAGMDIFAKFSAYIKNSRPEANEALERGLLKTLQKLDEYLNSPLPDEIDENSMEDIKFSTRKFLDGNEMTLADCNLLPKLHIVKVVAKKYRNFDIPKEMTGIWRYLTNAYSRDEFTNTCPSDKEVEIAYSDVAKRLTK

SEQ ID NO: 2812 - protein, 218 aa, Artificial Sequence; identical to SEQ ID NO: 2811
  Synthetic polypeptide

SEQ ID NO: 2813 - protein, 217 aa, Artificial Sequence
  Synthetic polypeptide
CLPGRVMSELETACGKPMRHKTSSSSLRMGAYVFIGVGAVTMLMGFLGCIGAVNEVRCLLGLLKQEMGGIVTELIRDYNSSREDSLQDAWDYVQAQVKCCGWVSFYNWTDNAELMNRPEVTYPCSCEVKGEEDNSLSVRKGFCEAPGNRTQSGNHPEDWPVYQEGCMEKVQAWLQENLGIILGVGVGVAIIELLGMVLSICLCRHVHSEDYSKVPKY

SEQ ID NO: 2814 - protein, 217 aa, Artificial Sequence
  Synthetic polypeptide
PGRAAGKESCDVQLYIKRQSEHSILAGDPFELECPVKYCANRPHVTWCKLNGTTCVKLEDRQTSWKEEKNISFFILHFEPVLPNDNGSYRCSANFQSNLIESHSTTLYVTGKQNELSDTAGREINLVDAHLKSEQTEASTRQNSQVLLSETGIYDNDPDLCFRMQEGSEVYSNPCLEENKPGIVYASLNHSVIGPNSRLARNVKEAPTEYASICVRS

SEQ ID NO: 2815 - protein, 217 aa, Artificial Sequence
  Synthetic polypeptide
IRVCIVNKGVLSDLTKVTRMHGIDPVVLVLMVGVVMFTLGFAGCVGALRENICLLNFFCGTIVLIFFLELAVAVLAFLFQDWVRDRFREFFESNIKSYRDDIDLQNLIDSLQKANQCCGAYGPEDWDLNVYFNCSGASYSREKCGVPFSCCVPDPAQKVVNTQCGYDVRIQLKSKWDESIFTKGCIQALESWLPRNIYIVAGVFIAISLLQIFGIFL

SEQ ID NO: 2816 - protein, 216 aa, Artificial Sequence
  Synthetic polypeptide
NYISQSPYHPMVPDSSWPAKGSCSISARRKERCHSPLEAAPSRHVGDMREHNQLNGWSSDENDWNEKLYPVWKRGDMRWKNSWKGGRVQAVLTSDSPALVGSNITFAVNLIFPRCQKEDANGNIVYEKNCRNEAGLSADPYVYNWTAWSEDSDGENGTGQSHHNVFPDGKPFPHHPGWRRWNFIYVFHTLGWLLQTPKLLLYLSLKFQPSLFLLYN

SEQ ID NO: 2817 - protein, 216 aa, Artificial Sequence
  Synthetic polypeptide
CGIEEKMLSLAPKRNKVESELLKGYSKYLSHDVVVMTVKLCILFAVLLTVPLIHFPARKAVTMMFFSNFPFSWIRHFLITLALNIIIVLLAIYVPDIRNVFGVVGASTSTCLIFIFPGLFYLKLSREDFLSWKKLGGLILSHRLACSGVISAHCNLCLPDSSNPPTSASRVAETTEKEEIPWRCAPRGKATQGHSKKATVYKPREEASGEPNVSTP

SEQ ID NO: 2818 - protein, 216 aa, Artificial Sequence
  Synthetic polypeptide
SAQAGSVIKASLAHAPALSLCDALHLLSTLQGPHQQEEFDLGFLGLLNGLIVVTLAVCWMPNQIRRIMAAAKPKHDWTRSYFRAYMILLPFSETFFYLSSVINPLLYTVSSQQFRRVFVQVLCCRLSLQHANHEKRLRVHAHSTTDSARFVQRPLLFASRRQSSARRTEKIFLSTFQSEAEPQSKSQSLSLESLEPNSGAKPANSAAENGFQEHEV

SEQ ID NO: 2819 - protein, 216 aa, Artificial Sequence
  Synthetic polypeptide
KCCGVENRLIPTELRREALALQGSLEFDDAGGEGVTSHVDDEYRWAGVEDPKVMITTSRDPSSRLKMFAKELKLVFPGAQRMNRGRHEVGALVRACKANGVTDLLVVHEHRGTPVGLIVSHLPFGPTAYFTLCNVVMRHDIPDLGTMSEAKPHLITHGFSSRLGKRVSDILRYLFPVPKDDSHRVITFANQDDYISFRHHVYKKTDHRNVELTECT

SEQ ID NO: 2820 - protein, 215 aa, Artificial Sequence
  Synthetic polypeptide
RADACVCVCCSLLYGAWARGNEIINAVVLLILLSALADPDQYNFSSSELGGDFEFMDDANMCIAIAISLLMILICAMATYGAYKQRAAWIIPFFCYQIFDFALNMLVAITVLIYPNSIQEYIRQLPPNFPYRDDVMSVNPTCLVLIILLFISIILTFKGYLISCVWNCYRYINGRNSSDVLVYVTSNDTTVLLPPYDDATVNGAAKEPPPPYVSA

SEQ ID NO: 2821 - protein, 215 aa, Artificial Sequence; identical to SEQ ID NO: 2820
  Synthetic polypeptide

SEQ ID NO: 2822 - protein, 215 aa, Artificial Sequence
  Synthetic polypeptide
NVTSLNLQLENLRMKLPKPPKPVSKMRMATPLLMQALPMGALPQGPMQNATKYGNMTEDHVMHLLQNADPLKVYPPLKGSFPENLRHLKNTMETIDWKVFESWMHHWLLFEMSRHSLEQKPTDAPPKVLTKCQEEVSHIPAVHPGSFRPKCDENGNYLPLQCYGSIGYCWCVFPNGTEVPNTRSRGHHNCSESLELEDPSSGLGVTKQDLGPVPM

SEQ ID NO: 2823 - protein, 215 aa, Artificial Sequence
  Synthetic polypeptide
GAIGKESCDVQLYIKRQSEHSILAGDPFELECPVKYCANRPHVTWCKLNGTTCVKLEDRQTSWKEEKNISFFILHFEPVLPNDNGSYRCSANFQSNLIESHSTTLYVTGKQNELSDTAGREINLVDAHLKSEQTEASTRQNSQVLLSETGIYDNDPDLCFRMQEGSEVYSNPCLEENKPGIVYASLNHSVIGPNSRLARNVKEAPTEYASICVRS

SEQ ID NO: 2824 - protein, 213 aa, Artificial Sequence
  Synthetic polypeptide
DQTRWLMPVIPALREAEASGSLESRSSRPVWTTYDVFCGFLLCTNLTRAPRIGQLQGEIIPTSFYHQGRVIDCSGAHVVLDDDTDVGYVEDGTPCGPSMMCLDRKCLQIQALNMSSCPLDSKGKVCSGHGVCSNEATCICDFTWAGTDCSIRDPVRNLHPPKDEGPKGPSATNLIIGSIAGAILVAAIVLGGTGWGFKNVKKRRFDPTQQGPI

SEQ ID NO: 2825 - protein, 213 aa, Artificial Sequence
  Synthetic polypeptide
DQTRWLMPVIPALREAEASGSLESRSSRPVWTTYDVFCGFLLCTNLTRAPRIGQLQGEIIPTSFYHQGRVIDCSGAHVVLDDDTDVGYVEDGTPCGPSMMCLDRKCLQIQALNMSSCPLDSKGKVCSGHGVCSNEATCICDFTWAGTDCSIRDPVRNLHPPKDEGPKEMSRREGSILLSKAPSESAALDGHRLALLDSGYDILAAVLLELLSL

SEQ ID NO: 2826 - protein, 213 aa, Artificial Sequence
  Synthetic polypeptide
DQTRWLMPVIPALREAEASGSLESRSSRPVWTTYDVFCGFLLCTNLTRAPRIGQLQGEIIPTSFYHQGRVIDCSGAHVVLDDDTDVGYVEDGTPCGPSMMCLDRKCLQIQALNMSSCPLDSKGKVCSGHGVCSNEATCICDFTWAGTDCSIRDPVRNLHPPKDEGPKVNMATSRLIGAVAGTILALGVIFGGTGWGIENVKKRRFDPTQQGPI

SEQ ID NO: 2827 - protein, 212 aa, Artificial Sequence
  Synthetic polypeptide
FNRGGGYPYAVLVTMSEFSRDLMIFCKGLFPLLLGTSCCHHVKKDVFASTSTMIESGLSVWIGGQLHPLENVPPALAVLLITVVIAFFTEFASNTATIIIFLPVLAELAIRLRVHPLYLMIPGTVGCSFAFMLPVSTPPNSIAFASGHLLVKDMVRTGLLMNLMGVLLLSLAMNTWAQTIFQLGTFPDWADMYSVNVTALPPTLANDTFRTL

SEQ ID NO: 2828 - protein, 212 aa, Artificial Sequence; identical to SEQ ID NO: 2827
  Synthetic polypeptide

SEQ ID NO: 2829 - protein, 212 aa, Artificial Sequence; identical to SEQ ID NO: 2827
  Synthetic polypeptide

SEQ ID NO: 2830 - protein, 212 aa, Artificial Sequence; identical to SEQ ID NO: 2827
  Synthetic polypeptide

SEQ ID NO: 2831 - protein, 212 aa, Artificial Sequence; identical to SEQ ID NO: 2827
  Synthetic polypeptide

SEQ ID NO: 2832 - protein, 212 aa, Artificial Sequence; identical to SEQ ID NO: 2827
  Synthetic polypeptide

SEQ ID NO: 2833 - protein, 212 aa, Artificial Sequence; identical to SEQ ID NO: 2827
  Synthetic polypeptide

SEQ ID NO: 2834 - protein, 211 aa, Artificial Sequence
  Synthetic polypeptide
SFGERAPSTRSGDPLVAVLAFGLLLAAATATFAAAQEGEARIGAELWSWAGLGGSGPRPSAPETGIIGRGPRGRAFQRGDRTVRPCSGSGPPRGRKRRGPSRGAASLRSFARLECVCENYKLAVNCFVNNNRQCQCTSVGAQNTVICSKLAAKCLVMKAEMNGSKLGRRAKPEGALQNNDGLYDPDCDESGLFKAKQCNGTSMCWCVNTAG

SEQ ID NO: 2835 - protein, 210 aa, Artificial Sequence
  Synthetic polypeptide
LVSLMRSDGFISVWHFPSLHSLFLLPPCEEVPSTMMLSFLRPPQPCGTGLYVFMVYFILHNQMCCPMKASYTVEMNGHPGPSTAFFTPGSGMPPAGGEISKSTQNLIGAMEEVPPDWERASFQQGSQASPDLKPSPQNGATFPSSGGYGQGSLIADEESQEFDDLIFALKTGAGLSVSDNESGQGSQEGGTLTDSQIVELRRIPIADTHL

SEQ ID NO: 2836 - protein, 210 aa, Artificial Sequence; identical to SEQ ID NO: 2835
  Synthetic polypeptide

SEQ ID NO: 2837 - protein, 208 aa, Artificial Sequence
  Synthetic polypeptide
MITQEKAPGPGCQALWMHKVPASLMVSLGEDAHFQCPHNSSNNANVTWWRVLHGNYTWPPEFLGPGEDPNGTLIIQNVNKSHGGIYVCRVQEGNESYQQSCGTYLRVRQPPPRPFLDMGEGTKNRIITAEGIILLFCAVVPGTLLLFRKRWQNEKLGLDAGDEYEDENLYEGLNLDDCSMYEDISRGLQGTYQDVGSLNIGDVQLEKP

SEQ ID NO: 2838 - protein, 208 aa, Artificial Sequence
  Synthetic polypeptide
EVRSPSARQPHRLRKPGSGQVFVTSENQLVYYPSITYAIIGSSVIFVLVVALLALVLHHQRKRNNLMTLPVHRLQHPVLLSRLVVLDHPHHCNVTYNVNNGIQYVASQAEQNASEVGSPPSYSEALLDQRPAWYDLPPPPYSSDTESLNQADLPPYRSRSGSANSASSQAASSLLSVEDTSHSPGQPGPQEGTAEPRDSEPSQGTEEV

SEQ ID NO: 2839 - protein, 208 aa, Artificial Sequence; identical to SEQ ID NO: 2838
  Synthetic polypeptide

SEQ ID NO: 2840 - protein, 208 aa, Artificial Sequence; identical to SEQ ID NO: 2838
  Synthetic polypeptide

SEQ ID NO: 2841 - protein, 208 aa, Artificial Sequence
  Synthetic polypeptide
MVPRLRSGDLPWEINPLSSCSLLREKDPLTTSGPQTDQPKEHLTNFKSGNASTTTTVIDSKNGSVPKSPGKVLKRTVTEDIVTTFSSPAAWLLVIALIITWSAVAIVMFDLVDYKNFSASSIAKIGSDPLKLVRDAMEETTDWIYGFFSLLSDIISSEDEEDDDGDEDTDKGEIDEPPLRKKEIHKDKTEKQEKPERKIQTKEVGHSS

SEQ ID NO: 2842 - protein, 207 aa, Artificial Sequence
  Synthetic polypeptide
FQHFGEAEAGGSPEVRSLRPTWPTCVWQTPDMLVEIETAWSLSGYLLVCFSAGYFIHDTVDIVASGQTRASWEYLVHHVMAMGAFFSGIFWSSFVGGGVLTLLVEVSNIFLTIRMMMKISNAQDHLLYRVNKYVNLVMYFLFRLAPQAYLTHFFLRYVNQRTLGTFLLGILLMLDVMIIIYFSRLLRSDFCPEHVPKKQHKDKFLTE

SEQ ID NO: 2843 - protein, 207 aa, Artificial Sequence; identical to SEQ ID NO: 2842
  Synthetic polypeptide

SEQ ID NO: 2844 - protein, 207 aa, Artificial Sequence
  Synthetic polypeptide
RPAWPTWAPGAADHLLPGNHGPGLPGAHACAPWQEPPALPFPGVLVNMAAHWVFLETHDGHPQLTNRRVLYAATFLLFPLNVLVGAMVATWRVLLSALYNAIHLGQMDLSLLPPRAATLDPGYYTYRNFLKIEVSQSHPAMTAFCSLLLQAQSLLPRTMAAPQDSLRPGEEDEGMQLLQTKDSMAKGARPGASRGRARWGLAYTLLH

SEQ ID NO: 2845 - protein, 207 aa, Artificial Sequence
  Synthetic polypeptide
SQYSGLRQENRLNPGGRDELLQKEQNYSDDVLANMISEPRISYGNDALMPSLTETKTTVELLPVNGEFSLDDLQPWHSFGADSVPANTENEGSGLTNIKTEEISEVKMDAEFRHDSGYEVHHQKLVFFAEDVGSNKGAIIGLMVGGVVIATVIVITLVMLKKKQYTSIHHGVVEVDAAVTPEERHLSKMQQNGYENPTYKFFEQMQN

SEQ ID NO: 2846 - protein, 206 aa, Artificial Sequence
  Synthetic polypeptide
PQEAEEAALIEFHRSYRELFEFFCNNTTIHGAIRLVCSQHNRMKTAFWAVLWLCTFGMMYWQFGLLFGEYFSYPVSLNINLNSDKLVFPAVTICTLNPYRYPEIKEELEELDRITEQTLFDLYKYSSFTTLVAGSRSRRDLRGTLPHPLQRLRVPPPPHGARRARSVASSLRDNNPQVDWKDWKIGFQLELLSLPPPDVWKLLYFQ

SEQ ID NO: 2847 - protein, 206 aa, Artificial Sequence
  Synthetic polypeptide
RLNEIKYGNYLPECLALDKQLDADVSPKPTIFLPSIAETKLQKAGTYLCLLEKFFPDIIKIHWQEKKSNTILGSQEGNTMKTNDTYMKFSWLTVPEESLDKEHRCIVRHENNKNGIDQEIIFPPIKTDVTTVDPKYNYSKDANDVITMDPKDNWSKDANDTLLLQLTNTSAYYTYLLLLLKSVVYFAIITCCLLRRTAFCCNGEKS

SEQ ID NO: 2848 - protein, 206 aa, Artificial Sequence
  Synthetic polypeptide
GHRTVHSQIVEMDKVFWTDIINEAIFSANRLTGSDVNLLAENLLSPEDMVLFHNLTQPREAEAAVATQETSTVRLKVSSTAVRTQHTTTRPVPDTSRLPGATPGLTTVEIVTMSHQALGDVAGRGNEKKPSSVRALSIVLPIVLLVFLCLGVFLLWKNWRLKNINSINFDNPVYQKTTEDEVHICHNQDGYSYPSRQMVSLEDDVA

SEQ ID NO: 2849 - protein, 206 aa, Artificial Sequence
  Synthetic polypeptide
SLGLSLLFCKMGRTEASTPPPGCWKGPTRQLHHACNGPGLSVLCFMRHDILEYFSVYGTALSMWVSLMALADFDEPKRSTFVMFGVLTIAVRIYHDRWGYGVYSGPIGTAILIIAAKWLQKMKEKKGLYPDKSVYTQQIGPGLCFGALALMLRFFFEDWDYTYVHSFYHCALAMSFVLLLPKVNKKAGSPGTPAKLDCSTLCCACV

SEQ ID NO: 2850 - protein, 205 aa, Artificial Sequence
  Synthetic polypeptide
GYLQRAPGAADHLLPGNHGPGLPGAHACAPWQEPPALPFPGVLVNMAAHWVFLETHDGHPQLTNRRVLYAATFLLFPLNVLVGAMVATWRVLLSALYNAIHLGQMDLSLLPPRAATLDPGYYTYRNFLKIEVSQSHPAMTAFCSLLLQAQSLLPRTMAAPQDSLRPGEEDEGMQLLQTKDSMAKGARPGASRGRARWGLAYTLLH

SEQ ID NO: 2851 - protein, 205 aa, Artificial Sequence
  Synthetic polypeptide
LTSDPSRLSFNFTFVKLSLNIFLQGTTSSWWLCMSWATRWDWSTPATPAPSWRPSTSTWRRTTSSCPRTISRASRRSMDPQPSLWSPQGHSLHSPSAGSTHHRRGNTSASPGPLGRPSGTGHPHQAPNPTSVTATSTQWPSSGARCLSLRIAGSGVCAITECRRATPCRSSSSGRACLPASTQPMKGPMGDLSSSKVTSIGCLRR

SEQ ID NO: 2852 - protein, 205 aa, Artificial Sequence
  Synthetic polypeptide
SQHFGRPRRADHEDSSLLLQSTQNVTVNARNSEGEVTGRLKVGPKMVEVQNQQFQINSNDGKPLFTVDEKEVVVGTDKLRVTGPEGALFEHSVETPLVRADPFQDLRLESPTRSLSMDAPRGVHIQAHAGKIEALSQMDILFHSSDGMLVLDAETVCLPKLVQGTWGPSGSSQSLYEICVCPDGKLYLSVAGVSTTCQEHNHICL

SEQ ID NO: 2853 - protein, 205 aa, Artificial Sequence; identical to SEQ ID NO: 2852
  Synthetic polypeptide

SEQ ID NO: 2854 - protein, 205 aa, Artificial Sequence; identical to SEQ ID NO: 2852
  Synthetic polypeptide

SEQ ID NO: 2855 - protein, 203 aa, Artificial Sequence
  Synthetic polypeptide
ARHRKKNFAQSHLYEIKKSFGQRVYFAAEDTDCCTRNCCGPSRPFTLRIIDNMGQEVITLERPLRCSSCCCPCCLQEIEIQAPPGVPIGYVIQTWHPCLPKFTIQNEKREDVLKISGPCVVCSCCGDVDFEIKSLDEQCVVGKISKHWTGILREAFTDADNFGIQFPLDLDVKMKAVMIGACFLIDFMFFESTGSQEQKSGVW

SEQ ID NO: 2856 - protein, 203 aa, Artificial Sequence; identical to SEQ ID NO: 2855
  Synthetic polypeptide

SEQ ID NO: 2857 - protein, 203 aa, Artificial Sequence; identical to SEQ ID NO: 2855
  Synthetic polypeptide

SEQ ID NO: 2858 - protein, 202 aa, Artificial Sequence
  Synthetic polypeptide
KVIFYSTDYDCTRLETMQMFTAGELSCNGYHSTVKEKRDNSLYSEVEKPPRLTLHRKSKMQSDPFFRSAQRWIAALAGTLPVLLLLLGGAGYFLWQQQEEKKTQFRKKKREQELREMAWSTMKQEQSTRVKLLEELRWRSIQYASRGERHSAYNEWKKALFKPGPPIGQTQQQTRGQGSPVALSQESAQRTDSWGPEEGGES

SEQ ID NO: 2859 - protein, 202 aa, Artificial Sequence
  Synthetic polypeptide
SLDQQPWHYLGPYLRSTESEVLAGYVSNQCFTNSQFTAMNEPQCFYNESIAFFYNRSGKHLATEWNTVSKLVMGLGITVCIFIMLANLLVMVAIYVNRRFHFPIYYLMANLAAADFFAGLAYFYLMFNTGPNTRRLTVSTWLLRQGLIDTSLTASVANLLAIAIERHITVFRMQLHTRMSNRRVVVVIVVIWTMAIVMGAIP

SEQ ID NO: 2860 - protein, 202 aa, Artificial Sequence
  Synthetic polypeptide
GWNELRQEGRCLFVILLMAVYWCTEALPLSVTALLPIVLFPFMGILPSNKVCPQYFLDTNFLFLSGLIMASAIEEWNLHRRIALKILMLVGVQPARLILGMMVTTSFLSMWLSNTASTAMMLPIANAILKSLFGQKEVRKDPSQESEENTGIEPNTFLSEERLKLQAPLVIRLGQITESGQWNMSGNDVCNFRVLSFLPGGM

SEQ ID NO: 2861 - protein, 202 aa, Artificial Sequence
  Synthetic polypeptide
SQHFGRRRQADHLKLGVQDQPEQHGETPSLLKIQNYSVIVVLFVTLRRQKKEPLIVFEEEDVRENIITYDDEGGGEEDTEAFDIATLQNPDGINGFIPRKDIKPEYQYMPRPGLRPAPNSVDVDDFINTRIQEADNDPTAPPYDSIQIYGYEGRGSVAGSLSSLESATTDSDLDYDYLQNWGPRFKKLADLYGSKDTFDDDS

SEQ ID NO: 2862 - protein, 202 aa, Artificial Sequence; identical to SEQ ID NO: 2861
  Synthetic polypeptide

SEQ ID NO: 2863 - protein, 200 aa, Artificial Sequence
  Synthetic polypeptide
ATYKADHLLPGNHGPGLPGAHACAPWQEPPALPFPGVLVNMAAHWVFLETHDGHPQLTNRRVLYAATFLLFPLNVLVGAMVATWRVLLSALYNAIHLGQMDLSLLPPRAATLDPGYYTYRNFLKIEVSQSHPAMTAFCSLLLQAQSLLPRTMAAPQDSLRPGEEDEGMQLLQTKDSMAKGARPGASRGRARWGLAYTLLH

SEQ ID NO: 2864 - protein, 200 aa, Artificial Sequence
  Synthetic polypeptide
PHPLLPYLAILSQPHLLPMLSLLHCLTLPLLPNIQYCNRASLPDYPGTFLANVTGNLLIAQSKLLSLLAFICEEVVSQCTLCGGLYFFEFVSCSAFLLSLLILIVYCTPFYERVDTTKVKSSDFYITLGTGCVFLLASIIFVSTHDRTSAEIAAIVFGFIASFMFLLDFITMLYEKRQESQLRKPENTTRAEALTEPLNA

SEQ ID NO: 2865 - protein, 199 aa, Artificial Sequence
  Synthetic polypeptide
MDMVAQACDPSTLGGQNDYPCSGMLGMVSGLISDSQITSSNQGDRNWMPENIRLVTSRSGWALPPAPHSYINEWLQIDLGEEKIVRGIIIQGGKHRENKVFMRKFKIGYSNNGSDWKMIMDDSKRKAKSFEGNNNYDTPELRTFPALSTRFIRIYPERATHGGLGLRMELLGCEVEGGTTVLATEKPTVIDSTIQSGIK

SEQ ID NO: 2866 - protein, 199 aa, Artificial Sequence
  Synthetic polypeptide
ATYKDHLLPGNHGPGLPGAHACAPWQEPPALPFPGVLVNMAAHWVFLETHDGHPQLTNRRVLYAATFLLFPLNVLVGAMVATWRVLLSALYNAIHLGQMDLSLLPPRAATLDPGYYTYRNFLKIEVSQSHPAMTAFCSLLLQAQSLLPRTMAAPQDSLRPGEEDEGMQLLQTKDSMAKGARPGASRGRARWGLAYTLLH

SEQ ID NO: 2867 - protein, 199 aa, Artificial Sequence
  Synthetic polypeptide
YSKKALNRCCHLIWDFPASRTCVYGGVLRGTGKQAFGAAVNAITYYIIGLPLGILLTFVVRMRIMGLWLGMLACVFLATAAFVAYTARLDWKLAAEEAKKHSGRQQQQRAESTATRPGPEKAVLSSVATGSSPGITLTTYSRSECHVDFFRTPEEAHALSAPTSRLSVKQLVIRRGAALGAASATLMVGLTVRILATRH

SEQ ID NO: 2868 - protein, 199 aa, Artificial Sequence; identical to SEQ ID NO: 2867
  Synthetic polypeptide

SEQ ID NO: 2869 - protein, 198 aa, Artificial Sequence
  Synthetic polypeptide
AGPRRRCRRRARLAGVVFLGVGLWAWSEKGVLSDLTKVTRMHGIDPVVLVLMVGVVMFTLGFAGCVGALRENICLLNFNQCCGAYGPEDWDLNVYFNCSGASYSREKCGVPFSCCVPDPAQKVVNTQCGYDVRIQLKSKWDESIFTKGCIQALESWLPRNIYIVAGVFIAISLLQIFGIFLARTLISDIEAVKAGHHF

SEQ ID NO: 2870 - protein, 198 aa, Artificial Sequence
  Synthetic polypeptide
ICIGSSIVTKLECQDALETAARAEGLSLDASMHSQLRILDEEHPKGKYHHGLSALKPIRTTSKHQHPVDNAGLFSCMTFSWLSSLARVAHKKGELSMEDVWSLSKHESSDVNCRRLERLWQEELNEVGPDAASLRRVVWIFCRTRLILSIVCLMITQLAGFSGPVSSNHPFRQSPGARPRPALTLLFCCRGCAQLWAR

SEQ ID NO: 2871 - protein, 198 aa, Artificial Sequence
  Synthetic polypeptide
QIRKLAGGVILGVALWLRHDPQTTNLLYLELGDKPAPNTFYVGIYILIAVGAVMMFVGFLGCYGAIQESQCLLGTFFTCLVILFACEVAAGIWGFVNKDQIAKDVKQFYDQALQQAVVDDDANNAKAVVKTFHETLDCCGSSTLTALTTSVLKNNLCPSGSNIISNLFKEDCHQKIDDLFSGKLYLIGIAAIVVAVIM

SEQ ID NO: 2872 - protein, 197 aa, Artificial Sequence
  Synthetic polypeptide
GAPLPGQPPRPGGRWGGQPPTRPAAPSGRVMEVWHGLVIAVVSLFLQACFLTAINYLLSRHMAHKSEQILKAASLQVPRPSPGHHHPPAVKEMKETQTERDIPMSDSLYRHDSDTPSDSLDSSCSSPPACQATEDVDYTQVVFSDPGELKNDSPLDYENIKEITDYVNVNPERHKPSFWYFVNPALSEPAEYDQVAM

SEQ ID NO: 2873 - protein, 197 aa, Artificial Sequence
  Synthetic polypeptide
YPLYLHTRIEGSNKIMDFASRAKLAVQKLVQKVGFFGILACASIPNPLFDLAGITCGHFLVPFWTFFGATLIGKAIIKMHIQKIFVIITFSKHIVEQMVAFIGLEDNGALQPPPPSAVPGIGPSLQKPFQEYLEAQRQKLHHKSEMGTPQGENWLSWMFEKLVVVMVCYFILSIINSMAQSYAKRIQQRLNSEEKTK

SEQ ID NO: 2874 - protein, 197 aa, Artificial Sequence
  Synthetic polypeptide
QWFSVRTIWTPRDNWRCLETVWVVTSGEGVLLLGRHRGCCSTSRKAQDSPPTAKNPPETKKALCITLTLGTFLVGAALAAGLLWKFIRLYGPNFILQVYSSQRKSWHPVCQDDWNENYGRAACRDMGYKNNFYSSQGIVDDSGSTSFMKLNTSAGNVDIYKKLYHSDACSSKAVVSLRCIACGVNLNSSRQSRIVGG

SEQ ID NO: 2875 - protein, 197 aa, Artificial Sequence
  Synthetic polypeptide
GASLPGSHPVREGGGGGQPPARPAAPSGRVMEVWHGLVIAVVSLFLQACFLTAINYLLSRHMAHKSEQILKAASLQVPRPSPGHHHPPAVKEMKETQTERDIPMSDSLYRHDSDTPSDSLDSSCSSPPACQATEDVDYTQVVFSDPGELKNDSPLDYENIKEITDYVNVNPERHKPSFWYFVNPALSEPAEYDQVAM

SEQ ID NO: 2876 - protein, 196 aa, Artificial Sequence
  Synthetic polypeptide
SQHFRRPRQADHLGSGVRDQPGQHGETLSLLKTEKLAGRGGYIQACRALMITAILLGFLGLLLGIAGLRCTNIGGLELSRKAKLAATAGALHILAGICGMVAISWYAFNITRDFFDPLYPGTKYELGPALYLGWSASLISILGGLCLCSACCCGSDEDPAASARRPYQAPVSVMPVATSDQEGDSSFGKYGRNAYV

SEQ ID NO: 2877 - protein, 196 aa, Artificial Sequence; identical to SEQ ID NO: 2876
  Synthetic polypeptide

SEQ ID NO: 2878 - protein, 196 aa, Artificial Sequence
  Synthetic polypeptide
GRARWLTPVIAALGEAEAGGSPEMYPELQIARVEQATQAIPMERWCGGSRSGSCAHPHHQVVPFRCLPGEFVSEALLVPEGCRFLHQERMDQCESSTRRHQEAQEACSSQGLILHGSGMLLPCGSDRFRGVEYVCCPPPGTPDPSGTAVGDPSTRSWPPGSRVEGAEDEEEEESFPQPVDDYFVEPPQAEEEEETV

SEQ ID NO: 2879 - protein, 196 aa, Artificial Sequence
  Synthetic polypeptide
KPPGFIPAPSYSSCGTWRLTLVLALATLIAAFGSSFQYGYNVAAVNSPALLMQQFYNETYYGRTGEFMEDFPLTLLWSVTVSMFPFGGFIGSLLVGPLVNKFGRKGALLFNNIFSIVPAILMGCSRVATSFELIIISRLLVGICAGVSSNVVPMYLGELAPKNLRGALGVVPQLFITVGILVAQIFGLRNLLANVD

SEQ ID NO: 2880 - protein, 196 aa, Artificial Sequence; identical to SEQ ID NO: 2879
  Synthetic polypeptide

SEQ ID NO: 2881 - protein, 196 aa, Artificial Sequence; identical to SEQ ID NO: 2879
  Synthetic polypeptide

SEQ ID NO: 2882 - protein, 196 aa, Artificial Sequence; identical to SEQ ID NO: 2879
  Synthetic polypeptide

SEQ ID NO: 2883 - protein, 195 aa, Artificial Sequence
  Synthetic polypeptide
AKISPLHSSLGNSQKTVRTATPFPMVSLFLVFTAFVISNIGHIRPQRTILAFVSGIFFILSGLSLVVGLVLYISSINDEVMNRPSSSEQYFHYRYGWSFAFAASSFLLKEGAGVMSVYLFTKRYAEEEMYRPHPAFYRPRLSDCSDYSGQFLQPEAWRRGRSPSDISSDVSIQMTQNYPPAIKYPDHLHISTSPC

SEQ ID NO: 2884 - protein, 195 aa, Artificial Sequence; identical to SEQ ID NO: 2883
  Synthetic polypeptide

SEQ ID NO: 2885 - protein, 195 aa, Artificial Sequence
  Synthetic polypeptide
DVGSAFAPPPRLGCEERLCPAATPSGRVMEVWHGLVIAVVSLFLQACFLTAINYLLSRHMAHKSEQILKAASLQVPRPSPGHHHPPAVKEMKETQTERDIPMSDSLYRHDSDTPSDSLDSSCSSPPACQATEDVDYTQVVFSDPGELKNDSPLDYENIKEITDYVNVNPERHKPSFWYFVNPALSEPAEYDQVAM

SEQ ID NO: 2886 - protein, 195 aa, Artificial Sequence
  Synthetic polypeptide
PGTVAHACNPSTLGGQSGWPQALWEATSPETIGRRVAVGLGSCLAILILAICGLKLQRRWKRTQSQQGLQENSSGQSFFVRNKKVRRAPLSEGPHSLGCYNPMMEDGISYTTLRFPEMNIPRTGDAESSEMQRPPPDCDDTVTYSALHKRQVGDYENVIPDFPEDEGIHYSELIQFGVGERPQAQENVDYVILKH

SEQ ID NO: 2887 - protein, 195 aa, Artificial Sequence; identical to SEQ ID NO: 2886
  Synthetic polypeptide

SEQ ID NO: 2888 - protein, 195 aa, Artificial Sequence; identical to SEQ ID NO: 2886
  Synthetic polypeptide

SEQ ID NO: 2889 - protein, 195 aa, Artificial Sequence; identical to SEQ ID NO: 2886
  Synthetic polypeptide

SEQ ID NO: 2890 - protein, 195 aa, Artificial Sequence; identical to SEQ ID NO: 2886
  Synthetic polypeptide

SEQ ID NO: 2891 - protein, 195 aa, Artificial Sequence
  Synthetic polypeptide
GQEFETSLRNMRCCPHPLRPEGSGAMGPEALSSLLLLLLVASGDADMKGHFDPAKCRYALGMQDRTIPDSDISASSSWSDSTAARHSRLESSDGDGAWCPAGSVFPKEEEYLQVDLQRLHLVALVGTQGRHAGGLGKEFSRSYRLRYSRDGRRWMGWKDRWGQEVISGNEDPEGVVLKDLGPPMVARLVRFYPRA

SEQ ID NO: 2892 - protein, 194 aa, Artificial Sequence
  Synthetic polypeptide
MGTVAHTCNPSTFGGQGSSSSYDNGFPTGDHELFTTFSWDDQKVRRVFVRKVYTILLIQLLVTLAVVALFTFCDPVKDYVQANPGWYWASYAVFFATYLTLACCSGPRRHFPWNLILLTVFTLSMAYLTGMLSSYYNTTSVLLCLGITALVCLSVTVFSFQTKFDFTSCQGVLFVLLMTLFFSGLILAILLPFQ

SEQ ID NO: 2893 - protein, 194 aa, Artificial Sequence
  Synthetic polypeptide
SRLALYLHRSCGPPIISSTQTQHALHGEKGQIKCFIRSTPPPDRIAWSWKENVLESGTSGRYTVETISTEEGVISTLTISNIVRADFQTIYNCTAWNSFGSDTEIIRLKEQGSEMKSGAGLEAESVPMAVIIGVAVGAGVAFLVLMATIVAFCCARSQRSTGGRSGISGRGTEKKARLRLPRRASKQECNEQGS

SEQ ID NO: 2894 - protein, 194 aa, Artificial Sequence
  Synthetic polypeptide
GQEFETSLANLEIYKDRQKFSEQVFKVASSDLVNMGISVVSYTLKDIHDDQDYLHSLGKARTAQVQKDARIGEAEAKRDAGIREAKAKQEKVSAQYLSEIEMAKAQRDYELKKAAYDIEVNTRRAQADLAYQLQVAKTKQQIEEQRVQVQVVERAQQVAVQEQEIARREKELEARVRKPAEAERYKLERLAEAE

SEQ ID NO: 2895 - protein, 193 aa, Artificial Sequence
  Synthetic polypeptide
TRQMRQEKGLHLSHGPQTDELQTSVVLKERKAGQATRLTELIISVAYRTTSKRTAQTISCPLVHVPCARGITGRHTAPEGEGSLGQRPLTRWYHNRTEGARGRHQPMPSPSQRAPDPSDGGPVQQHQGHLPHRTFWTTRTSGSRRVARTQRIGWTAWSSGPKRRKRSKWKKRKNGDTWSCRKSRGKGRKGRPW

SEQ ID NO: 2896 - protein, 193 aa, Artificial Sequence; identical to SEQ ID NO: 2895
  Synthetic polypeptide

SEQ ID NO: 2897 - protein, 192 aa, Artificial Sequence
  Synthetic polypeptide
ICIGSSIVTKLECQDALETAARAEGLSLDASMHSQLRILDEEHPKGKYHHGLSALKPIRTTSKHQHPVDNAGLFSCMTFSWLSSLARVAHKKGELSMEDVWSLSKHESSDVNCRRLERLWQEELNEVGPDAASLRRVVWIFCRTRLILSIVCLMITQLAGFSGPPSFGDCSISAEVCGNRLHCTAILLSCFT

SEQ ID NO: 2898 - protein, 191 aa, Artificial Sequence
  Synthetic polypeptide
SAKGHFLGNNTVIDILRQAGLEVDHTPAGQAIHSPAPQSPAPSPEGTSTSPAPVTPAAAVPEAPSVTPTAPPEDEDPALSPHLLLPDSLSQLEEFGRQRKWHKRQSTHQRPRQFNDLWVRIEDSTTASPPPLPLQPTHSSGTAKPPFQLSDQLQQQDPPGPASSSAPTLGLLPAIATTIAVCFLLHSLGPS

SEQ ID NO: 2899 - protein, 190 aa, Artificial Sequence
  Synthetic polypeptide
GQEIETILANKVVTLTANDKTSVSFSSLPGQGVIYNVIVWDPFLNTSAAYIPAHTYACSFEAGEGSCASLGRVSSKVFFTLFALLGFFICFFGHRFWKTELFFIGFIIMGFFFYILITRLTPIKYDVNLILTAVTGSVGGMFLVAVWWRFGILSICMLCVGLVLGFLISSVTFFTPLETGSLSVTHAGLQ

SEQ ID NO: 2900 - protein, 190 aa, Artificial Sequence
  Synthetic polypeptide
RLNEIKYGNYLPECLALDKQLDADVSPKPTIFLPSIAETKLQKAGTYLCLLEKFFPDVIKIHWQEKKSNTILGSQEGNTMKTNDTYMKFSWLTVPEKSLDKEHRCIVRHENNKNGVDQEIIFPPIKTDVITMDPKDNCSKDANDTLLLQLTNTSAYYMYLLLLLKSVVYFAIITCCLLRRTAFCCNGEKS

SEQ ID NO: 2901 - protein, 190 aa, Artificial Sequence
  Synthetic polypeptide
SQHFGRPRWADHLSKVAMNVYELSSAAGLPCEIDPALVVALSSQKSENISPEEEYKIACLLMVFVAVSLPTLASNVMSQYSPAIEGHCNNIHCLAKAINQIAAALFTIHKGSIEDRLKEFLALASSSLLKIGQETDKTTTRNRESVYLLLDMIVQESPFLTMDLLESCFPYVLLRNAYHAVYKQSVTSSA

SEQ ID NO: 2902 - protein, 190 aa, Artificial Sequence; identical to SEQ ID NO: 2901
  Synthetic polypeptide

SEQ ID NO: 2903 - protein, 190 aa, Artificial Sequence
  Synthetic polypeptide
FLLKMTLGFHDVLGNERPSAYMREHNQLNGWSSDENDWNEKLYPVWKRGDMRWKNSWKGGRVQAVLTSDSPALVGSNITFAVNLIFPRCQKEDANGNIVYEKNCRNEAGLSADPYVYNWTAWSEDSDGENGTGQSHHNVFPDGKPFPHHPGWRRWNFIYVFHTLGWLLQTPKLLLYLSLKFQPSLFLLYN

SEQ ID NO: 2904 - protein, 190 aa, Artificial Sequence
  Synthetic polypeptide
GSPTPVPQTGTGPWPVRNWAAQQEVSCGSIEPLYLTYGIIFACGCSFAYQPSLVILGHYFKKRLGLVNGIVTAGSSVFTILLPLLLRVLIDSVGLFYTLRVLCIFMFVLFLAGFTYRPLATSTKDKESGGSGSSLFSRKKFSPPKKIFNFAIFKVTAYAVWAVGIPLALFGYFVPYVHLAKFSFVILKYE

SEQ ID NO: 2905 - protein, 190 aa, Artificial Sequence
  Synthetic polypeptide
NQYRVLDENMTFGIIQSQVFGTNVMVTVAKSFEAPIKLVFPQDLLEKGLEANNFAMLGLGDVVIPGIFIALLLRFDISLKKNTHTYFYTSFAAYIFGLGLTIFIMHIFKHAQPALLYLVPACIGFPVLVALAKGEVTEMFSYESSAEILPHTPRLTHFPTVSGSPASLADSMQQKLAGPRRRRPQNPSAM

SEQ ID NO: 2906 - protein, 190 aa, Artificial Sequence
  Synthetic polypeptide
PGAVAHTCNPSTWRGQCRRIICSQSFEGNNNYDTPELRTFPALSTRFIRIYPERATHGGLGLRMELLGCEVEAPTAGPTTPNGNLVDECDDDQANCHSGTGDDFQLTGAETIFIPLLYHFSSCLSWDQLTPVCVLVTPHGRELPRNRSCLARTRASSFPHVIWIDELFLIATTICNNNLSHFESQRLGLS

SEQ ID NO: 2907 - protein, 189 aa, Artificial Sequence
  Synthetic polypeptide
PGTVAHACNPSTLGGQGRWITRSRDQDHPGQHGSETQVPGLDISALLPSDFSRYFQYEGSLTTPPCAQGVIWTVFNQTVMLSAKQLHTLSDTLWGPGDSRLQLNFRATQPLNGRVIEASFPAGVDSSPRAAEPVQLNSCLAAGDILALVFGLLFAVTSVAFLVQMRRQHRRGTKGGVSYRPAEVAETGA

SEQ ID NO: 2908 - protein, 189 aa, Artificial Sequence
  Synthetic polypeptide
TEIAPLRSSLGDRDQRPPREVHAPGGLVEAGRVPRQRLHDGPLRADGHHHGPEADAQQLRRVPGPVGDPQVPLSAGLRVRAPAPGPRAQGLAAQLPSEPGQHLQPVRRVHGDDDPVRLHHHLRGRLPAGAAARALQQPRGDPPGRHQDGLVAAAPGAAQGQGHRDLAAGAGDHRCAGGHCQWDGHCLHI

SEQ ID NO: 2909 - protein, 189 aa, Artificial Sequence
  Synthetic polypeptide
SQRFGRPREVDHLRPGVQDQPGQHSRNAKNQPGVVTQKSASSIFMLSFYLTCSLLLTLVVFVSVIYSCVKLFPSPLQTLSRKIVRSKMNSTLVGVFTITLVFLAAFVNMFTCNSRDLLGCLAQEHNISASQVNACHVAESAVNYSLGDEQGFCGSPWPNCNFPEYFTYSVLLSLLACSVFLQISCIGKL

SEQ ID NO: 2910 - protein, 189 aa, Artificial Sequence
  Synthetic polypeptide
GLQLTFLRLRTVSSIYIKSLRVMEVWHGLVIAVVSLFLQACFLTAINYLLSRHMAHKSEQILKAASLQVPRPSPGHHHPPAVKEMKETQTERDIPMSDSLYRHDSDTPSDSLDSSCSSPPACQATEDVDYTQVVFSDPGELKNDSPLDYENIKEITDYVNVNPERHKPSFWYFVNPALSEPAEYDQVAM

SEQ ID NO: 2911 - protein, 189 aa, Artificial Sequence
  Synthetic polypeptide
LATAQDLNITCRFAGVFHVEKNGRYSISRTEAADLCKAFNSTLPTMAQMEKALSIGFETCRYGFIEGHVVIPRIHPNSICGANTTSGPIRTPQIPEWLIILASLLALALILAVCIAVNSRRRCGQKKKLVINSGNGAVEDRKPSGLNGEASKSQEMVHLVNKESSETPDQFMTADETRNLQNVDMKIGV

SEQ ID NO: 2912 - protein, 188 aa, Artificial Sequence
  Synthetic polypeptide
TAEYVCLANPFSVKLLPQPLLLQSACLCSCTKAHFPDCRMAALHLYKKLYIQPMMGAGLNYECYRFGISPSTNALVIGATVMEGFYVIFDRAQKRVGFAASPCAEIAGAAVSEISGPFSTEDVASNCVPAQSLSEPILWIVSYALMSVCGAILLVLIVLLLLPFRCQRRPRDPEVVNDESSLVRHRWK

SEQ ID NO: 2913 - protein, 188 aa, Artificial Sequence; identical to SEQ ID NO: 2912
  Synthetic polypeptide

SEQ ID NO: 2914 - protein, 188 aa, Artificial Sequence
  Synthetic polypeptide
AVIALLHPSLRDRYNALLSNMSRIYSTAKVCLPNKTATCWSLDPDLTNILASSRSYAMLLFAWEGWHNAAGIPLKPLYEDFTALSNEAYKQDGFTDTGAYWRSWYNSPTFEDDLEHLYQQLEPLYLNLHAFVRRALHRRYGDRYINLRGPIPAHLLGDMWAQSWENIYDMVVPFPDKPNLDVTSTMLQ

SEQ ID NO: 2915 - protein, 188 aa, Artificial Sequence
  Synthetic polypeptide
ALDRDLNITCRFAGVFHVEKNGRYSISRTEAADLCKAFNSTLPTMAQMEKALSIGFETCRYGFIEGHVVIPRIHPNSICGANTTSGPIRTPQIPEWLIILASLLALALILAVCIAVNSRRRCGQKKKLVINSGNGAVEDRKPSGLNGEASKSQEMVHLVNKESSETPDQFMTADETRNLQNVDMKIGV

SEQ ID NO: 2916 - protein, 188 aa, Artificial Sequence
  Synthetic polypeptide
GRAGWFMPVIPALWDAKVFKVASSDLVNMGISVVSYTLKDIHDDQDYLHSLGKARTAQVQKDARIGEAEAKRDAGIREAKAKQEKVSAQYLSEIEMAKAQRDYELKKAAYDIEVNTRRAQADLAYQLQVAKTKQQIEEQRVQVQVVERAQQVAVQEQEIARREKELEARVRKPAEAERYKLERLAEAE

SEQ ID NO: 2917 - protein, 188 aa, Artificial Sequence
  Synthetic polypeptide
HTTYMSVIFCLCTLEHNLHEGWDFCLFPSLPYPQCSEQCRAHSRPQVSVCQEMLQELRHAVSCRKTSRSRRRRRPGGPSRALLSLRAVREMRLSNGKLYSAGAGGDAGSAHGGPQRLLDDPGPPSGARPAAPTPCTHVRVCQECRRIQALRASGAGAPPRGLGVPAEATSPPRPRPGPAGPRELAEHE

SEQ ID NO: 2918 - protein, 188 aa, Artificial Sequence; identical to SEQ ID NO: 2917
  Synthetic polypeptide

SEQ ID NO: 2919 - protein, 187 aa, Artificial Sequence
  Synthetic polypeptide
KDPQPLCHRLVRVHGLLGIGLHSRSSIEPLYLTYGIIFACGCSFAYQPSLVILGHYFKKRLGLVNGIVTAGSSVFTILLPLLLRVLIDSVGLFYTLRVLCIFMFVLFLAGFTYRPLATSTKDKESGGSGSSLFSRKKFSPPKKIFNFAIFKVTAYAVWAVGIPLALFGYFVPYVHLAKFSFVILKYE

SEQ ID NO: 2920 - protein, 187 aa, Artificial Sequence
  Synthetic polypeptide
LNLTFIYKTWSDVEGQRPALLICTAAAGPTQGVKAYPDATMHRQLLAPVEGRMAETLNQSKERNRFSLSRGCIIPQGRATAGRGLPQDIYKEMMPRRLTQTGKRKHGALARTPSFKKVVYDHKEDEENKAGRKQRSHLFKVMQLRNEQGGVRVQSAHSPSPLNKKACFPGDYRGESAGGHNCRAVSG

SEQ ID NO: 2921 - protein, 187 aa, Artificial Sequence; identical to SEQ ID NO: 2920
  Synthetic polypeptide

SEQ ID NO: 2922 - protein, 187 aa, Artificial Sequence
  Synthetic polypeptide
MDMVAQACDPSTLGGQNDYPCSGMLGMVSGLISDSQITSSNQGDRNWMPENIRLVTSRSGWALPPAPHSYINEWLQIDLGEEKIVRGIIIQGGKHRENKVFMRKFKIGYSNNGSDWKMIMDDSKRKAKVRAGDWEEVIPYVLDFNQGPLAFSRGRASYFLPAMTLEEVCDGVSKTLDSRKTGIWHEK

SEQ ID NO: 2923 - protein, 187 aa, Artificial Sequence
  Synthetic polypeptide
LVHTLAYGKYYIATMALITASTALTIMVMNIHFCGAEARPVPHWARVVILKYMSRVLFVYDVGESCLSPHHSRERDHLTKVYSKLPESNLKAARNKDLSRKKDMNKRLKNDLGCQGKNPQEAESYCAQYKVLTRNIEYIAKCLKDHKATNSKGSEWKKVAKVIDRFFMWIFFIMVFVMTILIIARAD

SEQ ID NO: 2924 - protein, 187 aa, Artificial Sequence
  Synthetic polypeptide
GRVRWLTPVIPALWEAEAGGSPELISTIPTSRLKFLKEAGHGTQKEEIPEEELAEDVEEIDHAERELRRGQILWFRGLNRIQTQIRVVNAFRSSLYEGLEKPESRSSIHNFMTHPEFRIEDSEPHIPLIDDTDAEDDAPTKRNSSPPPSPNKNNNAVDSGIHLTIEMNKSATSSSPGSPLHSLETSL

SEQ ID NO: 2925 - protein, 187 aa, Artificial Sequence; identical to SEQ ID NO: 2924
  Synthetic polypeptide

SEQ ID NO: 2926 - protein, 187 aa, Artificial Sequence; identical to SEQ ID NO: 2924
  Synthetic polypeptide

SEQ ID NO: 2927 - protein, 187 aa, Artificial Sequence; identical to SEQ ID NO: 2924
  Synthetic polypeptide

SEQ ID NO: 2928 - protein, 187 aa, Artificial Sequence
  Synthetic polypeptide
YENNTEDADVEWKFARAKLWLSYFDEGRTLPAPFNLVPSPKSFYYLIMRIKMCLIKLCKSKAKSCENDLEMGMLNSKFKKTRYQAGMRNSENLTANNTLSKPTRYQKIMKRLIKRYVLKAQVDRENDEVNEGELKEIKQDISSLRYELLEEKSQATGELADLIQQLSEKFGKNLNKDHLRVNKGKDI

SEQ ID NO: 2929 - protein, 187 aa, Artificial Sequence; identical to SEQ ID NO: 2928
  Synthetic polypeptide

SEQ ID NO: 2930 - protein, 187 aa, Artificial Sequence; identical to SEQ ID NO: 2928
  Synthetic polypeptide

SEQ ID NO: 2931 - protein, 187 aa, Artificial Sequence; identical to SEQ ID NO: 2928
  Synthetic polypeptide

SEQ ID NO: 2932 - protein, 187 aa, Artificial Sequence; identical to SEQ ID NO: 2928
  Synthetic polypeptide

SEQ ID NO: 2933 - protein, 187 aa, Artificial Sequence; identical to SEQ ID NO: 2928
  Synthetic polypeptide

SEQ ID NO: 2934 - protein, 186 aa, Artificial Sequence
  Synthetic polypeptide
PGREIYKDRQKFSEQVFKVASSDLVNMGISVVSYTLKDIHDDQDYLHSLGKARTAQVQKDARIGEAEAKRDAGIREAKAKQEKVSAQYLSEIEMAKAQRDYELKKAAYDIEVNTRRAQADLAYQLQVAKTKQQIEEQRVQVQVVERAQQVAVQEQEIARREKELEARVRKPAEAERYKLERLAEAE

SEQ ID NO: 2935 - protein, 186 aa, Artificial Sequence
  Synthetic polypeptide
NLRLPPGHAELHMPLNQKAKRELCIGWGDPSGLPRRSYRLLLLHQEETKKALCITLTLGTFLVGAALAAGLLWKFIRLYGPNFILQVYSSQRKSWHPVCQDDWNENYGRAACRDMGYKNNFYSSQGIVDDSGSTSFMKLNTSAGNVDIYKKLYHSDACSSKAVVSLRCIACGVNLNSSRQSRIVGG

SEQ ID NO: 2936 - protein, 186 aa, Artificial Sequence
  Synthetic polypeptide
CPGYPLSFVTSGHFMGNNTVLDVLRREGYEVEHAPAGRPIHKGKSKKTSTRPTLSTIFAPKVPTLEVPAPEAVSSGHSTLPPLVSRPGSADTPSEAEQRFRKKRRRSQRRPRLRQFSDLWVRLEESDIVPQLQVPVLDRHISTELRLPRRGHSHHSQMVASSACLSLWTPVFWVLVLAFQTETPLL

SEQ ID NO: 2937 - protein, 186 aa, Artificial Sequence; identical to SEQ ID NO: 2936
  Synthetic polypeptide

SEQ ID NO: 2938 - protein, 186 aa, Artificial Sequence
  Synthetic polypeptide
QGSTQCSPQDKSGVLPFLCERGLDHAIPHYVTMYLPLLLVLVANPILFQKTVTAVASLLKGRQGIYTENERRMGAVIKIRFFKIMLVLIICWLSNIINESLLFYLEMQTDINGGSLKPVRTAAKTTWFIMGILNPAQGFLLSLAFYGWTGCSLGFQSPRKEIQWESLTTSAAEGAHPSPLMPHENP

SEQ ID NO: 2939 - protein, 185 aa, Artificial Sequence
  Synthetic polypeptide
HGRSHVKHSAQSLEQERWNHVTTTTKRPVTTRAPANTLGNDFDLADALDDRNDRDDGRRKPIAGGGGFSDKDLEDIVGGGEYKPDKGKGDGRYGSNDDPGSGMVAEPGTIAGVASALAMALIGAVSSYISYQQKKFCFSIQQGLNADYVKGENLEAVVCEEPQVKYSTLHTQSAEPPPPPEPARI

SEQ ID NO: 2940 - protein, 185 aa, Artificial Sequence; identical to SEQ ID NO: 2939
  Synthetic polypeptide

SEQ ID NO: 2941 - protein, 185 aa, Artificial Sequence
  Synthetic polypeptide
GRARWLTPVIPALWEAEAGGSPEVRSSRPAWATWRNPVSTKIQKLARDAQNLIEAASTGAAISVKVVANIAANLIAFLAVLDFINAALSWLGDMVDIQGLSFQLICSYILRPVAFLMGVAWEDCPVVAELLGIKLFLNEFVAYQDLSKYKQRRLAGAEEWVGDRKQWISRRGLAMLTRLVLNSWP

SEQ ID NO: 2942 - protein, 185 aa, Artificial Sequence
  Synthetic polypeptide
GSPTPVPQTGTGPWPVRNWAAQQEVSCGSIEPLYLTYGIIFACGCSFAYQPSLVILGHYFKKRLGLVNGIVTAGSSVFTILLPLLLRVLIDSVGLFYTLRVLCIFMFVLFLAGFTYRPLATSTKDKESGGSGSSLFSRKKFSPPKKIFNFAIFKVTAYAVWAVGIPLALFGYFVPYVHLVSMLLH

SEQ ID NO: 2943 - protein, 185 aa, Artificial Sequence
  Synthetic polypeptide
PGTVAHACNPSTSGGRGKQIIWGQEFETSLDNMACRALMITAILLGFLGLLLGIAGLRCTNIGGLELSRKAKLAATAGALHILAGICGMVAISWYAFNITRDFFDPLYPGTKYELGPALYLGWSASLISILGGLCLCSACCCGSDEDPAASARRPYQAPVSVMPVATSDQEGDSSFGKYGRNAYV

SEQ ID NO: 2944 - protein, 185 aa, Artificial Sequence; identical to SEQ ID NO: 2943
  Synthetic polypeptide

SEQ ID NO: 2945 - protein, 184 aa, Artificial Sequence
  Synthetic polypeptide
YPLYLHTRIEGSNKIMDFASRAKLAVQKLVQKVGFFGILACASIPNPLFDLAGITCGHFLVPFWTFFGATLIGKAIIKMHIQKIFVIITFSKHIVEQMVAFIGAVPGIGPSLQKPFQEYLEAQRQKLHHKSEMGTPQGENWLSWMFEKLVVVMVCYFILSIINSMAQSYAKRIQQRLNSEEKTK

SEQ ID NO: 2946 - protein, 184 aa, Artificial Sequence; identical to SEQ ID NO: 2945
  Synthetic polypeptide

SEQ ID NO: 2947 - protein, 184 aa, Artificial Sequence; identical to SEQ ID NO: 2945
  Synthetic polypeptide

SEQ ID NO: 2948 - protein, 184 aa, Artificial Sequence; identical to SEQ ID NO: 2945
  Synthetic polypeptide

SEQ ID NO: 2949 - protein, 184 aa, Artificial Sequence; identical to SEQ ID NO: 2945
  Synthetic polypeptide

SEQ ID NO: 2950 - protein, 184 aa, Artificial Sequence
  Synthetic polypeptide
EFKTSLGNITWIHLLVIIGSILSYFLFAIVFGAMCVTCNPPSNPYWIMQEHMLDPVFYLVCILTTSIALLPRFVYRVLQGSLFPSPILRAKHFDRLTPEERTKALKKWRGAGKMNQVTSKYANQSAGKSGRRPMPGPSAVFAMKSASSCAIEQGNLSLCETALDQGYSETKAFEMAGPSKGKES

SEQ ID NO: 2951 - protein, 184 aa, Artificial Sequence
  Synthetic polypeptide
PDGTTTGLRVPGAGTNPCHHHHREPQIRVMVDLCNSTKGICLTGPSGPPGPPGAGGLPGHNGLDGQPGPQGPKGEKGANGKRGKMGIPGAAGNPGERGEKGDHGELGLQGNEGPPGQKGEKGDKGDVSNDVLLAGAKGDQGPPGPPGPPGPPGPPGPPGSRRAKGPRQPSMFNGQCPGETCAIP

SEQ ID NO: 2952 - protein, 184 aa, Artificial Sequence
  Synthetic polypeptide
DRGKKETDNLISIFIGQFTAMNEPQCFYNESIAFFYNRSGKHLATEWNTVSKLVMGLGITVCIFIMLANLLVMVAIYVNRRFHFPIYYLMANLAAADFFAGLAYFYLMFNTGPNTRRLTVSTWLLRQGLIDTSLTASVANLLAIAIERHITVFRMQLHTRMSNRRVVVVIVVIWTMAIVMGAIP

SEQ ID NO: 2953 - protein, 183 aa, Artificial Sequence
  Synthetic polypeptide
PVPQLRILLLGPQESNNSTGTMWKVSALLFVLGSASLWVLAEGASTGQPEDDTETTGLEGGVAMPGAEDDVVTPGTSEDRYKSGLTTLVATSVNSVTGIRIEDLPTSESTVHAQEQSPSATASNVATSHSTEKVDGDTQTTVEKDGLSTVTLVGIIVGVLLAIGFIGAIIVVVMRKMSGRYSP

SEQ ID NO: 2954 - protein, 182 aa, Artificial Sequence
  Synthetic polypeptide
IDILLDTATPMWVPVTWGCLHAPMAARDRTAHEAYNIDYSALSTKEMIQPVCLPNSEENFPDGKVCWTSGWGATEDGAGDASPVLNHAAVPLISNKICNHRDVYGGIISPSMLCAGYLTGGVDSCQGDSGGPLVCQERRLWKLVGATSFGIGCAEVNKPGVYTRVTSFLDWIHEQMERDLKT

SEQ ID NO: 2955 - protein, 182 aa, Artificial Sequence; identical to SEQ ID NO: 2954
  Synthetic polypeptide

SEQ ID NO: 2956 - protein, 182 aa, Artificial Sequence
  Synthetic polypeptide
KDPQPLCHRLVRVHGLLGIGLHSRSSIEPLYLTYGIIFACGCSFAYQPSLVILGHYFKKRLGLVNGIVTAGSSVFTILLPLLLRVLIDSVGLFYTLRVLCIFMFVLFLAGFTYRPLATSTKDKESGGSGSSLFSRKKFSPPKKIFNFAIFKVTAYAVWAVGIPLALFGYFVPYVHLVSMLLH

SEQ ID NO: 2957 - protein, 182 aa, Artificial Sequence
  Synthetic polypeptide
PVPQLRILLLGPQESNNSTGTMWKVSALLFVLGSASLWVLAEGASTGQPEDDTETTGLEGGVAMPGAEDDVVTPGTSEDRYKSGLTTLVATSVNSVTGIRIEDLPTSESTVHAQEQSPSATASNVATSHSTEKVDGDTQTTVEKDGLSTVTLVGIIVGVLLAIGFIGAIIVVVMRKMSGRYS

SEQ ID NO: 2958 - protein, 181 aa, Artificial Sequence
  Synthetic polypeptide
IDILLDTATPMWVPVTWGCLHAPMAARDRTAHEAYNIDYSALSTKEMIQPVCLPNSEENFPDGKVCWTSGWGATEDGGDASPVLNHAAVPLISNKICNHRDVYGGIISPSMLCAGYLTGGVDSCQGDSGGPLVCQERRLWKLVGATSFGIGCAEVNKPGVYTRVTSFLDWIHEQMERDLKT

SEQ ID NO: 2959 - protein, 181 aa, Artificial Sequence; identical to SEQ ID NO: 2958
  Synthetic polypeptide

SEQ ID NO: 2960 - protein, 181 aa, Artificial Sequence
  Synthetic polypeptide
SWPFTYCVQHLARVMEVWHGLVIAVVSLFLQACFLTAINYLLSRHMAHKSEQILKAASLQVPRPSPGHHHPPAVKEMKETQTERDIPMSDSLYRHDSDTPSDSLDSSCSSPPACQATEDVDYTQVVFSDPGELKNDSPLDYENIKEITDYVNVNPERHKPSFWYFVNPALSEPAEYDQVAM

SEQ ID NO: 2961 - protein, 181 aa, Artificial Sequence
  Synthetic polypeptide
PVPQLRILLLGPQESNNSTGTMWKVSALLFVLGSASLWVLAEGASTGQPEDDTETTGLEGGVAMPGAEDDVVTPGTSEDRYKSGLTTLVATSVNSVTGIRIEDLPTSESTVHAQEQSPSATASNVATSHSTEKVDGDTQTTVEKDGLSTVTLVGIIVGVLLAIGFIGAIIVVVMRKMSGRP

SEQ ID NO: 2962 - protein, 181 aa, Artificial Sequence
  Synthetic polypeptide
PLIHLSLIAVTFAIVLGVIIYRISMAAALAMNSSPSVRSNIRVTVTATAVIINLVVIILLDEVYGCIARWLTKIEVPKTEKSFEERLIFKAFLLKFVNSYTPIFYVAFFKGRFVGRPGDYVYIFRSFRMEEVTEILFISGSPFCLAYDLSTPCTWEKQLQHICSAKSSRFLSFLLETFLFP

SEQ ID NO: 2963 - protein, 181 aa, Artificial Sequence
  Synthetic polypeptide
YPLGSFSMHQHNLRLSTPNPLPWSFSGPLLCPQGTAVQQYCEFFVPHLKRSSRWWINTPAPSPSDPDGRRLERGHVRRDQVSGGRAGRHGVLHLFHCTDALWELHPPECVLGHRCGQSGQRPGAHQGRARGRRSSEPETCPTESQGGGRSESSVRGQHVYSCERATEESKASQVRVGAADQ

SEQ ID NO: 2964 - protein, 181 aa, Artificial Sequence; identical to SEQ ID NO: 2963
  Synthetic polypeptide

SEQ ID NO: 2965 - protein, 180 aa, Artificial Sequence
  Synthetic polypeptide
EPLRPAAAPSGKVMEVWHGLVIAVVSLFLQACFLTAINYLLSRHMAHKSEQILKAASLQVPRPSPGHHHPPAVKEMKETQTERDIPMSDSLYRHDSDTPSDSLDSSCSSPPACQATEDVDYTQVVFSDPGELKNDSPLDYENIKEITDYVNVNPERHKPSFWYFVNPALSEPAEYDQVAM

SEQ ID NO: 2966 - protein, 180 aa, Artificial Sequence
  Synthetic polypeptide
SQHFRRPRQADHLGSGVRDQPGQHGYIQACRALMITAILLGFLGLLLGIAGLRCTNIGGLELSRKAKLAATAGALHILAGICGMVAISWYAFNITRDFFDPLYPGTKYELGPALYLGWSASLISILGGLCLCSACCCGSDEDPAASARRPYQAPVSVMPVATSDQEGDSSFGKYGRNAYV

SEQ ID NO: 2967 - protein, 180 aa, Artificial Sequence; identical to SEQ ID NO: 2966
  Synthetic polypeptide

SEQ ID NO: 2968 - protein, 179 aa, Artificial Sequence
  Synthetic polypeptide
AEIQMKTTYFHLSDLQSNQQMHRKTASLNSPVSCKEKPDRVEEPPDYSLHWPEGLKGEEIKKCGREGITLNKYNQQYHKLFKDVPLEEVVLKVCSCALQRDFLLQGRLYISPNWLCFHASLFGKDIKVVIPVVSVQMIKKHKMARLLPNGLAITTNTSQKYIFVSLLSRDSVYDLLRRV

SEQ ID NO: 2969 - protein, 179 aa, Artificial Sequence
  Synthetic polypeptide
GWARWLTPVIPALWEAKASGSLEGPFVTWRSMSVLPAHAAREVPVWMGKMASAASARLAPCPHSASPRAIPVPMSPAVTASAMMHLAGSAVCVSLAGVAPAAARAWPETPVSPSRAGPVGHAAAMEWVSTAPARLVSRDVSVNSSPPAPRTPVSMGAAASLPLASCLSAPAPRAGKTHA

SEQ ID NO: 2970 - protein, 179 aa, Artificial Sequence
  Synthetic polypeptide
PPRASAVNAVFFATYLTLACCSGPRRHFPWNLILLTVFTLSMAYLTGMLSSYYNTTSVLLCLGITALVCLSVTVFSFQTKFDFTSCQGVLFVLLMTLFFSGLILAILLPFQYVPWLHAVYAALGAGVFTLFLALDTQLLMGNRRHSLSPEEYIFGALNIYLDIIYIFTFFLQLFGTNRE

SEQ ID NO: 2971 - protein, 179 aa, Artificial Sequence; identical to SEQ ID NO: 2970
  Synthetic polypeptide

SEQ ID NO: 2972 - protein, 179 aa, Artificial Sequence
  Synthetic polypeptide
ICIGSSIVTKLECQDALETAARAEGLSLDASMHSQLRILDEEHPKGKYHHGLSALKPIRTTSKHQHPVDNAGLFSCMTFSWLSSLARVAHKKGELSMEDVWSLSKHESSDVNCRRLERLWQEELNEVGPDAASLRRVVWIFCRTRLILSIVCLMITQLAGFSGPLAWCCQDLDLGGVSL

SEQ ID NO: 2973 - protein, 178 aa, Artificial Sequence
  Synthetic polypeptide
MGAVAHACNASTLRGRGGKITRRSRSCREDQKPVMDDQRDLISNNEQLPMLGRRPGAPESKCSRGALYTGFSILVTLLLAGQATTAYFLYQQQGRLDKLTVTSQNLQLENLRMKLPKPPKPVSKMRMATPLLMQALPMGALPQGPMQNATKYGNMTEDHVMHLLQSHWNWRTRLLGWV

SEQ ID NO: 2974 - protein, 177 aa, Artificial Sequence
  Synthetic polypeptide
CSQFGKFASISPRSIHKVTIGPNTSTPRTGEYIQPVCLPAAGQALVDGKICTVTGWGNTQYYGQQAGVLQEARVPIISNDVCNGADFYGNQIKPKMFCAGYPEGGIDACQGDSGGPFVCEDSISRTPRWRLCGIVSWGTGCALAQKPGVYTKVSDFREWIFQAIKTHSEASGMVTQL

SEQ ID NO: 2975 - protein, 177 aa, Artificial Sequence; identical to SEQ ID NO: 2974
  Synthetic polypeptide

SEQ ID NO: 2976 - protein, 177 aa, Artificial Sequence; identical to SEQ ID NO: 2974
  Synthetic polypeptide

SEQ ID NO: 2977 - protein, 177 aa, Artificial Sequence
  Synthetic polypeptide
GSFPCSCLLSLACCHVRHASSPFAMSLSFLRPPQPCRTVLTSVARLSSKSVNAQVTDINSKGLELRKTVTTVETQNLEGLHHDGQFCHKPCPPGERKARDCTVNGDEPDCVPCQEGKEYTDKAHFSSKCRRCRLCDEGHDVNMESSRNAHSPATPSAKRKDPDLTWGGFVFFFCQFH

SEQ ID NO: 2978 - protein, 177 aa, Artificial Sequence; identical to SEQ ID NO: 2977
  Synthetic polypeptide

SEQ ID NO: 2979 - protein, 177 aa, Artificial Sequence
  Synthetic polypeptide
IRVCIVNKGVLSDLTKVTRMHGIDPVVLVLMVGVVMFTLGFAGCVGALRENICLLNFNQCCGAYGPEDWDLNVYFNCSGASYSREKCGVPFSCCVPDPAQKVVNTQCGYDVRIQLKSKWDESIFTKGCIQALESWLPRNIYIVAGVFIAISLLQIFGIFLARTLISDIEAVKAGHHF

SEQ ID NO: 2980 - protein, 177 aa, Artificial Sequence
  Synthetic polypeptide
KSKNVSIVFLKSNFIQAKGTHTISSEIMFKCCGVVYFTDWLEMTEMDWPPDSCCVREFPGCSKQAHQEDLSDLYQEGCGKKMYSFLRGTKQLQVLRFLGISIGVTQILAMILTITLLWALYYDRREPGTDQMMSLKNDNSQHLSCPSVELLKPSLSRIFEHTSMANSFNTHFEMEEL

SEQ ID NO: 2981 - protein, 177 aa, Artificial Sequence; identical to SEQ ID NO: 2980
  Synthetic polypeptide

SEQ ID NO: 2982 - protein, 176 aa, Artificial Sequence
  Synthetic polypeptide
RAPVIPTTWEAEAGELLEPGRRRSCREDQKPVMDDQRDLISNNEQLPMLGRRPGAPESKCSRGALYTGFSILVTLLLAGQATTAYFLYQQQGRLDKLTVTSQNLQLENLRMKLPKPPKPVSKMRMATPLLMQALPMGALPQGPMQNATKYGNMTEDHVMHLLQSHWNWRTRLLGWV

SEQ ID NO: 2983 - protein, 176 aa, Artificial Sequence
  Synthetic polypeptide
KVIFYSTDYDCTRLETMQMFTAGELSCNGYHSTVKEKRDNSLYSEVEKPPRLTLHRKSKMQSDPFFRSAQRWIAALAGTLPVLLLLLGGAGYFLWQQQEEKKTQFRKKKREQELREMAWSTMKQEQSTRVKLLEELRWRSIQYASRGERHSAYNEWKKALFKPGEEMLQMRLHFVK

SEQ ID NO: 2984 - protein, 176 aa, Artificial Sequence
  Synthetic polypeptide
KYKKISQAWWCMPVIPAIREAESEYHYEYTACDSTGSRWRVAVPHTPGLCTSLPDPIKGTECSFSCNAGEFLDMKDQSCKPCAEGRYSLGTGIRFDEWDELPHGFASLSANMELDDSAAESTGNCTSSKWVPRGDYIASNTDECTATLMYAVNLKQSGTVNFEYYYPDSSIIFEFF

SEQ ID NO: 2985 - protein, 176 aa, Artificial Sequence
  Synthetic polypeptide
GVGGANKHKPWIEAEYQGIVMENDNTVLLNPPLFALDKDAPLRYAGEICGFRLHGSGVPFEAVILDKATGEGLIRAKEPVDCEAQKEHTFTIQAYDCGEGPDGANTKKSHKATVHVRVNDVNEFAPVFVERLYRAAVTEGKLYDRILRVEAIDGDCSPQYSQICYYEILTPNTPFL

SEQ ID NO: 2986 - protein, 175 aa, Artificial Sequence
  Synthetic polypeptide
GRRGGGEDGRGLGEGSALLHPDSRSHPRSLEKSAWRAFKESQCHHMLKHLHNGARITVQMPPTIEGHWVSTGCEVRSGPEFITRSYRFYHNNTFKAYQFYYGSNRCTNPTYTLIIRGKIRLRQASWIIRGGTEADYQLHNVQGHGRHRVRVQSESHEGHPHGCGHSLTAQRLQRE

SEQ ID NO: 2987 - protein, 175 aa, Artificial Sequence
  Synthetic polypeptide
GRAQWLTPIIPGLWEAKKCVLYWPEKRGIYGKVEVLVISVNECDNYTIRNLVLKQGSHTQHVKHYWYTSWPDHKTPDSAQPLLQLMLDVEEDRLASQGRGPVVVHCSAGIGRTGCFIATSIGCQQLKEEGVVDALSIVCQLRMDRGGMVQTSEQYEFVHHALCLYESRLSAETVQ

SEQ ID NO: 2988 - protein, 175 aa, Artificial Sequence; identical to SEQ ID NO: 2987
  Synthetic polypeptide

SEQ ID NO: 2989 - protein, 175 aa, Artificial Sequence; identical to SEQ ID NO: 2987
  Synthetic polypeptide

SEQ ID NO: 2990 - protein, 175 aa, Artificial Sequence; identical to SEQ ID NO: 2987
  Synthetic polypeptide

SEQ ID NO: 2991 - protein, 175 aa, Artificial Sequence; identical to SEQ ID NO: 2987
  Synthetic polypeptide

SEQ ID NO: 2992 - protein, 175 aa, Artificial Sequence
  Synthetic polypeptide
ICIGSSIVTKLECQDALETAARAEGLSLDASMHSQLRILDEEHPKGKYHHGLSALKPIRTTSKHQHPVDNAGLFSCMTFSWLSSLARVAHKKGELSMEDVWSLSKHESSDVNCRRLERLWQEELNEVGPDAASLRRVVWIFCRTRLILSIVCLMITQLAGFSGPNFQDGCILRSE

SEQ ID NO: 2993 - protein, 175 aa, Artificial Sequence
  Synthetic polypeptide
MLRHHFYVPWLTAITRAICKQMVLNSCSEQCMTRAYSAPRSSGNRSQAAIPCEKLCGQPPNYEMLKEEHEVAVLGAPHNPAPPTSTVIHIRSETSVPDHVVWSLFNTLFMNPCCLGFIAFAYSVKSRDRKMVGDVTGAQAYASTAKCLNIWALILGILMTILLIVIPVLIFQAYG

SEQ ID NO: 2994 - protein, 174 aa, Artificial Sequence
  Synthetic polypeptide
SQDGQIGTAPVYSSQHERRRRWVISAFPSEYAVWLVLWVTWNVFVICFYLEAGDLSKETDLILTFNISMHRSWWMENGPGCTVTSVTPAPDWAPEDHRYITVSGCLLEYQYIEVAHSSLQIVLALAGFIYACYVVKCITEEEDSFDFIGGFDSYGYQGPQKTSHLQLQPMYMSK

SEQ ID NO: 2995 - protein, 174 aa, Artificial Sequence
  Synthetic polypeptide
CRRMEWVFQMLSRQNNYTVNNKRNGVAKVNIFFKELNYKTNSESPSVTMVTLLSNLGSQWSLWFGSSVLSVVEMAELVFDLLVIMFLMLLRRFRSRYWSPGRGGRGAQEVASTLASSPPSHFCPHPMSLSLSQPGPAPSPALTAPPPAYATLGPRPSPGGSAGASSSTCPLGGP

SEQ ID NO: 2996 - protein, 174 aa, Artificial Sequence; identical to SEQ ID NO: 2995
  Synthetic polypeptide

SEQ ID NO: 2997 - protein, 174 aa, Artificial Sequence; identical to SEQ ID NO: 2995
  Synthetic polypeptide

SEQ ID NO: 2998 - protein, 174 aa, Artificial Sequence; identical to SEQ ID NO: 2995
  Synthetic polypeptide

SEQ ID NO: 2999 - protein, 174 aa, Artificial Sequence; identical to SEQ ID NO: 2995
  Synthetic polypeptide

SEQ ID NO: 3000 - protein, 173 aa, Artificial Sequence
  Synthetic polypeptide
QALWLTPVIPALWEAEAGGSRGQEIETTSTLACARASALCLNFNSTLILLPVCRNLLSFLRGTCSFCSRTLRKQLDHNLTFHKLVAYMICLHTAIHIIAHLFNFDCYSRSRQATDGSLASILSSLSHDEKKGGSWLNPIHPHITPTVYMFTVTFDMVLSSVNSNLFLFLLIKK

SEQ ID NO: 3001 - protein, 173 aa, Artificial Sequence
  Synthetic polypeptide
KECTFSRNCTWNLEWRSSIGLVICSMILFGDACTAPSQPRKHKIMMLKMIFNQTSVEHCKTHTEKQKECNFFLIAVRLASLNQILDPWVYLLLRKILLRKFCQMRKRRLREQFWRPASSGSGCQQIRCLMESCSLTQTGVQWSDFRSLQPSPPPLTAIFASWVQVILLPQPPK

SEQ ID NO: 3002 - protein, 173 aa, Artificial Sequence
  Synthetic polypeptide
KPLLNEIKEDTNKWKNIPCSWIGRINIVKMAILPKALAANAGTGFAVAEPQIAMFCGKLNMHVNIQTGKWEPDPTGTKSCFETKEEVLQYCQEMYPELQITNVMEANQRVSIDNWCRRDKKQCKSRFVTPFKCLVGEFVSDVLLVPEKCQFFHKERMEVCENHQHWHTVVKEV

SEQ ID NO: 3003 - protein, 173 aa, Artificial Sequence
  Synthetic polypeptide
VPQIKGLIVVTLAVCWMPNQIRRIMAAAKPKHDWTRSYFRAYMILLPFSETFFYLSSVINPLLYTVSSQQFRRVFVQVLCCRLSLQHANHEKRLRVHAHSTTDSARFVQRPLLFASRRQSSARRTEKIFLSTFQSEAEPQSKSQSLSLESLEPNSGAKPANSAAENGFQEHEV

SEQ ID NO: 3004 - protein, 173 aa, Artificial Sequence
  Synthetic polypeptide
NQYRVLDENMTFGIIQSQVFGTNVMVTVAKSFEAPIKLVFPQDLLEKGLEANNFAMLGLGDVVIPGIFIALLLRFDISLKKNTHTYFYTSFAAYIFGLGLTIFIMHIFKHAQPALLYLVPACIGFPVLVALAKGEVTEMFSYEESNPKDPAAVTESKEGTEASASKGLEKKEK

SEQ ID NO: 3005 - protein, 173 aa, Artificial Sequence; identical to SEQ ID NO: 3004
  Synthetic polypeptide

SEQ ID NO: 3006 - protein, 173 aa, Artificial Sequence
  Synthetic polypeptide
VANTEKSGRLNIKIYFLLFLEDQNIWQHQVGIVGRTGAGKSSLTLGLFRINESAEGEIIIDGINIAKIGLHDLRFKITIIPQDPVLFSGSLRMNLDPFSQYSDEEVWTSLELAHLKDFVSALPDKLDHECAEGGENLRVIVLDKGEIQEYGAPSDLLQQRGLFYSMAKDAGLV

SEQ ID NO: 3007 - protein, 172 aa, Artificial Sequence
  Synthetic polypeptide
SQDGQIGTAPVYSSQHERRRRWVISAFPSEYAVWLVLWVTWNVFVICFYLEAGDLSKETDLILTFNISMHRSWWMENGPGCTVTSVTPAPDWAPEDHRYITVSGCLLEYQYIEVAHSSLQIVLALAGFIYACYVVKCITEEEDSFDFIGGFDSYGYQGPQKTSHLQLQPMYM

SEQ ID NO: 3008 - protein, 172 aa, Artificial Sequence
  Synthetic polypeptide
MHSPRPGTQRLDANLISLVPERSFEGLSSLRHLWLDDNALTEIPVRALNNLPALQAMTLALNRISHIPDYAFQNLTSLVVLDLNYNKLQEFPVAIRTLGRLQELSLNGAMDIQEFPDLKGTTSLEILTLTRAGIRLLPSGMCQQLPRLRVLELSHNQIEELPSLHRCQKLEE

SEQ ID NO: 3009 - protein, 172 aa, Artificial Sequence
  Synthetic polypeptide
KPPGFIPAPSYSSCGTWRLTLVLALATLIAAFGSSFQYGYNVAAVNSPALLMQQFYNETYYGRTGEFMEDFPLTLLWSVTVSMFPFGGFIGSLLVGPLVNKFGRKGALLFNNIFSIVPAILMGCSRVATSFELIIISRLLVGICAGVSSNVVPMYLGELAPKNLRGALGVVP

SEQ ID NO: 3010 - protein, 172 aa, Artificial Sequence
  Synthetic polypeptide
STKLEIRNTRNLTYIDPDALKELPLLKFLGIFNTGLKMFPDLTKVYSTDIFFILEITDNPYMTSIPVNAFQGLCNETLTLKLYNNGFTSVQGYAFNGTKLDAVYLNKNKYLTVIDKDAFGGVYSGPSLLVENVAVSGKGFCKSLFSWLYRLPLGRKSLSFETQKAPRSSMPS

SEQ ID NO: 3011 - protein, 172 aa, Artificial Sequence
  Synthetic polypeptide
PPRGLGLLSVSFSAISPVLRTVPGTQQATGVGVPGDAAGAAPRRFLPQDVAFPPAPTPGRPEPGPAVTARGPRDAPQQRQALLGRRGRGCGQRARGPAAPPGRPGAPQRSPTRRPHPLHPRARLPGVPAHPGAAGLGGRRASAWPGRPRRSHQPAPAAAWPRRPPGAGGARV

SEQ ID NO: 3012 - protein, 172 aa, Artificial Sequence; identical to SEQ ID NO: 3011
  Synthetic polypeptide

SEQ ID NO: 3013 - protein, 171 aa, Artificial Sequence
  Synthetic polypeptide
PPRASAVNAVFFATYLTLACCSGPRRHFPWNLILLTVFTLSMAYLTGMLSSYYNTTSVLLCLGITALVCLSVTVFSFQTKFDFTSCQGVLFVLLMTLFFSGLILAILLPFQYVPWLHAVYAALGAGVFTLFLALDTQLLMGNRRHSLSPEEYIFGALNIYLDIIYIFTFFL

SEQ ID NO: 3014 - protein, 170 aa, Artificial Sequence
  Synthetic polypeptide
GRGRPRRGGGGGGARWGAAAVLHRLLRQLVQPPPVPEPCCTRQSPPAAGLLHPRQRASGLRQCQWGPGLPVPAQPPPGTPQPRGACPPLPPQARPCPGCGGRGPQPGHQQGGGARAHRPRRVPGEDAHAHPPVLRAACARPAACQWLRPATVRGADGQCAAGPGPCAVRG

SEQ ID NO: 3015 - protein, 170 aa, Artificial Sequence; identical to SEQ ID NO: 3014
  Synthetic polypeptide

SEQ ID NO: 3016 - protein, 170 aa, Artificial Sequence; identical to SEQ ID NO: 3014
  Synthetic polypeptide

SEQ ID NO: 3017 - protein, 170 aa, Artificial Sequence; identical to SEQ ID NO: 3014
  Synthetic polypeptide

SEQ ID NO: 3018 - protein, 170 aa, Artificial Sequence
  Synthetic polypeptide
MITQEKAPGPGCQALWMHKVPASLMVSLGEDAHFQCPHNSSNNANVTWWRVLHGNYTWPPEFLGPGEDPNEPPPRPFLDMGEGTKNRIITAEGIILLFCAVVPGTLLLFRKRWQNEKLGLDAGDEYEDENLYEGLNLDDCSMYEDISRGLQGTYQDVGSLNIGDVQLEKP

SEQ ID NO: 3019 - protein, 170 aa, Artificial Sequence
  Synthetic polypeptide
MGAVAHACNASTLRGRGGKITRRSRSCREDQKPVMDDQRDLISNNEQLPMLGRRPGAPESKCSRGALYTGFSILVTLLLAGQATTAYFLYQQQGRLDKLTVTSQNLQLENLRMKLPKPPKPVSKMRMATPLLMQALPMGALPQGPMQNATKYGNMTEDHVMHLLQEVAKS

SEQ ID NO: 3020 - protein, 169 aa, Artificial Sequence
  Synthetic polypeptide
KECTFSRNCTWNLEWRSSIGLVICSMILFGDACTAPSQPRKHKIMMLKMIFNQTSVEHCKTHTEKQKECNFFLIAVRLASLNQILDPWVYLLLRKILLRKFCQMRKRRLREQAPLLPTSTVIDPSRFCAQPFRWFLDLSFPAMSSSHPQLPLTLASFKLLREPCSVQLS

SEQ ID NO: 3021 - protein, 169 aa, Artificial Sequence
  Synthetic polypeptide
WYYQGFLLLRLPHFSLATAMYEVPVASRHDSEGSPAMWNCTEGAVFGHSVETPHIRAEPSQDLRLESPTRSLIMEAPRGVQVSAAAGDFKATCRKELHLQSTEGEIFLNAETIKLGNLPTGSFSSSSPSSSSSRQTVYELCVCPNGKLYLSPAGVGSTCQSSSNICLWS

SEQ ID NO: 3022 - protein, 169 aa, Artificial Sequence; identical to SEQ ID NO: 3021
  Synthetic polypeptide

SEQ ID NO: 3023 - protein, 169 aa, Artificial Sequence
  Synthetic polypeptide
FWGPVWDFSKAIRVMVDLCNSTKGICLTGPSGPPGPPGAGGLPGHNGLDGQPGPQGPKGEKGANGKRGKMGIPGAAGNPGERGEKGDHGELGLQGNEGPPGQKGEKGDKGDVSNDVLLAGAKGDQGPPGPPGPPGPPGPPGPPGSRRAKGPRQPSMFNGQCPGETCAIP

SEQ ID NO: 3024 - protein, 169 aa, Artificial Sequence
  Synthetic polypeptide
QCGAVVMSRDSGARVPGFSSCFCSVVAGWPWTSRLTSPCLSSKCCVLCNLPDPGLLFWTQEAFPLEPDSPDRLYPVHGLPHWDAVQLLQHHLRAAVPGHHGPCLPLSHRLQLPDQVRLHLLPGRALRASHDSFLQRTHPGHPPTLPICALAPCSLCSTGSGCIYIVPGT

SEQ ID NO: 3025 - protein, 169 aa, Artificial Sequence; identical to SEQ ID NO: 3024
  Synthetic polypeptide

SEQ ID NO: 3026 - protein, 169 aa, Artificial Sequence; identical to SEQ ID NO: 3024
  Synthetic polypeptide

SEQ ID NO: 3027 - protein, 169 aa, Artificial Sequence
  Synthetic polypeptide
DNRNNMRACPMGYSENELETDKLALPMSPSPLSPSPIPSPNAKLENSALLTVEPSPQDKNKGFFVDESEPLLRCDSTSSGSSALSRNGSFITKEKKDTVLRQVRLDPCDLQPIFDDMLHFLNPEELRVIEEIPQAEDKLDRLFEIIGVKSQEASQTLLDSVYSHLPDLL

SEQ ID NO: 3028 - protein, 168 aa, Artificial Sequence
  Synthetic polypeptide
RAPVIPTTWEAEAGELLEPGRRRSCREDQKPVMDDQRDLISNNEQLPMLGRRPGAPESKCSRGALYTGFSILVTLLLAGQATTAYFLYQQQGRLDKLTVTSQNLQLENLRMKLPKPPKPVSKMRMATPLLMQALPMGALPQGPMQNATKYGNMTEDHVMHLLQEVAKS

SEQ ID NO: 3029 - protein, 168 aa, Artificial Sequence
  Synthetic polypeptide
GRRITCAQEVKVTVSQEHTTALQPGQQNIQNPDPAVYQLRDSKSSDKSVCLFTDFDSQTNVSQSKDSDVYITDKTVLDMRSMDFKSNSAVAWSNKSDFACANAFNNSIIPEDTFFPSPESSCDVKLVEKSFETDTNLNFQNLSVIGFRILLLKVAGFNLLMTLRLWSS

SEQ ID NO: 3030 - protein, 168 aa, Artificial Sequence
  Synthetic polypeptide
CLPLPPDDVKPLRKPRIPMETFRKVGIPIIIALLSLASIIIVVVLIRLSKDRSTLQVLDSATGNWFSACFDNFTEALAETACRQMGYSSKPTFRAVEIGPDQDLDVVEITENSQELRMRNSSGPCLSGSLVSLHCLACGKSLKTPRVVGVEEASVDSWPWQVSIQYDK

SEQ ID NO: 3031 - protein, 167 aa, Artificial Sequence
  Synthetic polypeptide
SRQKKVECGDLTEFSGLHLSPMLHASCSRTSDSKFFSLWTLGLTRMVCQGLLGLQPQTEGCTVCFPTFEVLGLGLAPLLHSLQTAYCGTSSCDRMPHHMKPLPYYSYDQPVIGYCQAHQPLHVTKGYETVSPEQDESPGLELGRDHSFIATIARSAAPAIYLERIAN

SEQ ID NO: 3032 - protein, 167 aa, Artificial Sequence; identical to SEQ ID NO: 3031
  Synthetic polypeptide

SEQ ID NO: 3033 - protein, 167 aa, Artificial Sequence; identical to SEQ ID NO: 3031
  Synthetic polypeptide

SEQ ID NO: 3034 - protein, 167 aa, Artificial Sequence
  Synthetic polypeptide
LNLTFIYKTWSDVEGQRPALLICTAAAGPTQGVKDLEEVPPSAASQSAQARCALGSWGYGKPFEPRSVKNIHSTPAYPDATMHRQLLAPVEGRMAETLNQKLHVANVLEDDPGYLPHVYSEEGECGGAPSLSSLASLEQELQPDLLDSLGSKATPFEEIYSESGVPS

SEQ ID NO: 3035 - protein, 167 aa, Artificial Sequence; identical to SEQ ID NO: 3034
  Synthetic polypeptide

SEQ ID NO: 3036 - protein, 167 aa, Artificial Sequence
  Synthetic polypeptide
VSSLRAGSRTGGRPGPPGLREPRLLLAVASRHPDLELCGAHRSCYNHQHSHFCPICKGFLPKKAPLLWEKRDRLPAEDRIPPAAAHQRHLAAGAAGCEPRCTELSLPLRHLQRLTGPLRPPFPLRAQPGGPEAPEGRARREEAAPGGLRHHQGHPADALPQLQHHLR

SEQ ID NO: 3037 - protein, 167 aa, Artificial Sequence
  Synthetic polypeptide
GSHLVGREWPDQEAATATTGGPTAATGASARTAPCVTPSQAPACAPPASVDGAARSSAHLAPTARDASCRASADTVPAATPAPASASAHLATPASTARSCALLGAMELTVSCAAPVRMGAPATTSLASVPAPQAGREQCVPSPAHQGHLARTAARIVLATMEGSVTT

SEQ ID NO: 3038 - protein, 167 aa, Artificial Sequence; identical to SEQ ID NO: 3037
  Synthetic polypeptide

SEQ ID NO: 3039 - protein, 167 aa, Artificial Sequence; identical to SEQ ID NO: 3037
  Synthetic polypeptide

SEQ ID NO: 3040 - protein, 167 aa, Artificial Sequence; identical to SEQ ID NO: 3037
  Synthetic polypeptide

SEQ ID NO: 3041 - protein, 167 aa, Artificial Sequence; identical to SEQ ID NO: 3037
  Synthetic polypeptide

SEQ ID NO: 3042 - protein, 166 aa, Artificial Sequence
  Synthetic polypeptide
MGAVAHACNASTLRGRGGKITRRSRSCREDQKPVMDDQRDLISNNEQLPMLGRRPGAPESKCSRGALYTGFSILVTLLLAGQATTAYFLYQQQGRLDKLTVTSQNLQLENLRMKLPKPPKPVSKMRMATPLLMQALPMGALPQGPMQNATKYGNMTEDHVMHLLQY

SEQ ID NO: 3043 - protein, 166 aa, Artificial Sequence
  Synthetic polypeptide
IPEITSYHAGLSSLVATSEKPTFILQTEEGTLQATRALMVVGILLGVIAIFVATVGMKCMKCLEDDEVQKMRMAVIGGAIFLLAGLAILVATAWYGNRIVQEFYDPMTPVNARYEFGQALFTGWAAASLCLLGGALLCCSCPRKTTSYPTPRPYPKPAPSSGKDYV

SEQ ID NO: 3044 - protein, 166 aa, Artificial Sequence
  Synthetic polypeptide
DKWKDYRFLEIQKPRLCKVIRVLAFAYPYTWDSLPIFYRLFLFPGESAQNEATSYHQKHMIMTLLASFLYSAHLPERLAPGRFDYIGHSHQLFHVCVILATHMQMEAILLDKTLRKEWLLATSKPFSFSQIAGAILLCIIFSLSNIIYFSAALYRIPKPELHKKET

SEQ ID NO: 3045 - protein, 166 aa, Artificial Sequence; identical to SEQ ID NO: 3044
  Synthetic polypeptide

SEQ ID NO: 3046 - protein, 166 aa, Artificial Sequence; identical to SEQ ID NO: 3044
  Synthetic polypeptide

SEQ ID NO: 3047 - protein, 166 aa, Artificial Sequence
  Synthetic polypeptide
RSRVPGAAQIKLKQEMGGIVTELIRDYNSSREDSLQDAWDYVQAQVKCCGWVSFYNWTDNAELMNRPEVTYPCSCEVKGEEDNSLSVRKGFCEAPGNRTQSGNHPEDWPVYQEGCMEKVQAWLQENLGIILGVGVGVAIIELLGMVLSICLCRHVHSEDYSKVPKY

SEQ ID NO: 3048 - protein, 166 aa, Artificial Sequence; identical to SEQ ID NO: 3047
  Synthetic polypeptide

SEQ ID NO: 3049 - protein, 166 aa, Artificial Sequence
  Synthetic polypeptide
SAQFRFVAQPNCQQLLASRWYDEFPGWRRRHWAVKMVTCFIIGLLFPVFSVCYLIAPKSPLGLFIRKPFIKFICHTASYLTFLFLLLLASQHIDRSDLNRQGPPPTIVEWMILPWVLGFIWGEIKQMWDGGLQDYIHDWWNLMDFVMNSLYLATISLKIVAFVKVI

SEQ ID NO: 3050 - protein, 165 aa, Artificial Sequence
  Synthetic polypeptide
THLLASLSLRKFIEMGFIDEKRIAIWGWSYGGYVSSLALASGTGLFKCGIAVAPVSSWEYYASVYTERFMGLPTKDDNLEHYKNSTVMARAEYFRNVDYLLIHGTADDNVHFQNSAQIAKALVNAQVDFQAMWYSDQNHGLSGLSTNHLYTHMTHFLKQCFSLSD

SEQ ID NO: 3051 - protein, 165 aa, Artificial Sequence; identical to SEQ ID NO: 3050
  Synthetic polypeptide

SEQ ID NO: 3052 - protein, 164 aa, Artificial Sequence
  Synthetic polypeptide
RAPVIPTTWEAEAGELLEPGRRRSCREDQKPVMDDQRDLISNNEQLPMLGRRPGAPESKCSRGALYTGFSILVTLLLAGQATTAYFLYQQQGRLDKLTVTSQNLQLENLRMKLPKPPKPVSKMRMATPLLMQALPMGALPQGPMQNATKYGNMTEDHVMHLLQY

SEQ ID NO: 3053 - protein, 164 aa, Artificial Sequence
  Synthetic polypeptide
EGQHSVLDGALTSQRLRDLGPVWVVPHSSCKIIAFDELRTDFKSPIDQCNPVHARERLRNIERICFLLRKLVLPEYSIHSLFCIMFLCAQEWLTLGLNVPLLFYHFWRYFHCPADSSELAYDPPVVMNADTLSYCQKEAWCKLAFYLLSFFYYLYCMIYTLVSS

SEQ ID NO: 3054 - protein, 164 aa, Artificial Sequence
  Synthetic polypeptide
QTVTHEPVGNHLVKVYDYQEDGSVLLTCDAEAKNITWFKDGKMIGFLTEDKKKWNLGSNAKDPRGMYQCKGSQNKSKPLQVYYRMCQNCIELNAATISGFLFAEIVSIFVLAVGVYFIAGQDGVRQSRASDKQTLLPNDQLYQPLKDREDDQYSHLQGNQLRRN

SEQ ID NO: 3055 - protein, 163 aa, Artificial Sequence
  Synthetic polypeptide
KECTFSRNCTWNLEWRSSIGLVICSMILFGDACTAPSQPRKHKIMMLKMIFNQTSVEHCKTHTEKQKECNFFLIAVRLASLNQILDPWVYLLLRKILLRKFCQVANAVSSCSNDGQKGQPISLSNEIIQTEAIRYHTNNYASSSTSLPCQCSSTLMWSDHLER

SEQ ID NO: 3056 - protein, 162 aa, Artificial Sequence
  Synthetic polypeptide
KECTFSRNCTWNLEWRSSIGLVICSMILFGDACTAPSQPRKHKIMMLKMIFNQTSVEHCKTHTEKQKECNFFLIAVRLASLNQILDPWVYLLLRKILLRKFCQMRKRRLREQLICSLQNSQIQRATAHCGQVQTYRVLNREEMEVLVSSINVYTRISTVKTE

SEQ ID NO: 3057 - protein, 162 aa, Artificial Sequence
  Synthetic polypeptide
CGIEEKMLSLAPKRNKVESELLKGYSKYLSHDVVVMTVKLCILFAVLLTVPLIHFPARKAVTMMFFSNFPFSWIRHFLITLALNIIIVLLAIYVPDIRNVFGVVGASTSTCLIFIFPGLFYLKLSREDFLSWKKLGAFVLLIFGILVGNFSLALIIFDWINK

SEQ ID NO: 3058 - protein, 162 aa, Artificial Sequence; identical to SEQ ID NO: 3057
  Synthetic polypeptide

SEQ ID NO: 3059 - protein, 162 aa, Artificial Sequence
  Synthetic polypeptide
RAYGNSLYLCNSFASLNLFPVLCLAQTIHTQEEDLPRPSISAEPGTVIPLGSHVTFVCRGPVGVQTFRLERESRSTYNDTEDVSQASPSESEARFRIDSVSEGNAGPYRCIYYKPPKWSEQSDYLELLVKETSGGPDSPDTEPGSSAGPTQRPSDNSHNERE

SEQ ID NO: 3060 - protein, 161 aa, Artificial Sequence
  Synthetic polypeptide
HDLPLPRCSLYSLSFPCGTSSAPVQILNPLRLTWYCCCSFPLLLLLQLGASMRLTMGSHVSVPGKVASMGLAQRRTRWLFEADGSPHAGRGRSSAWLPAVWLQHWSHQCPPEGDRGVLQPDMGPPLWGEHPAHHAHHALVPLSGHLFCWGHDWLLLCGPFR

SEQ ID NO: 3061 - protein, 161 aa, Artificial Sequence; identical to SEQ ID NO: 3060
  Synthetic polypeptide

SEQ ID NO: 3062 - protein, 161 aa, Artificial Sequence; identical to SEQ ID NO: 3060
  Synthetic polypeptide

SEQ ID NO: 3063 - protein, 161 aa, Artificial Sequence
  Synthetic polypeptide
KNLKANEELSQKNGLEVLISHAKSEVGRTSEDPDCSGSSIRMCLPPRAPWTARQAWEKRRPWSSRAIRTRWLPGTPGFGWQARTSRPERGKGCTRRLWPPGRPRTRWSCWASGAPWTSWGPGPSWRHWERWPQGSTRPSGPQRRARTRRRDGPKGTPRAQG

SEQ ID NO: 3064 - protein, 160 aa, Artificial Sequence
  Synthetic polypeptide
AEIQMKTTYFHLSDLQSNQQMHRKTASLNSPVSCKEKPDRVEEPPDYSLHWPEGLKGEEIKKCGREGITLNKYNQQYHKLFKDVPLEEVVLKVCSCALQRDFLLQGRLYISPNWLCFHASLFGKDIKVVIPVVSVQMIKKHKMARLLPNGLAITTNTSQK

SEQ ID NO: 3065 - protein, 160 aa, Artificial Sequence
  Synthetic polypeptide
IVAPVIPTCHWRDLVGGYTPGTPYKVSCSPTSGAVPPYSSSPNPYQTAVYPVRSAYPQQSPYAQQGTYYTQPLYAAPPHVIHHTTVVQPNGMPATVYPAPIPPPRGNGVTMGMVAGTTMAMSAGTLLTAHSPTPVAPHPVTVPTYRAPGTPTYSYVPPQW

SEQ ID NO: 3066 - protein, 160 aa, Artificial Sequence; identical to SEQ ID NO: 3065
  Synthetic polypeptide

SEQ ID NO: 3067 - protein, 160 aa, Artificial Sequence
  Synthetic polypeptide
IFQIFQQLMMGNSPSKVGIVGRTGAGKSSLTLGLFRINESAEGEIIIDGINIAKIGLHDLRFKITIIPQDPVLFSGSLRMNLDPFSQYSDEEVWTSLELAHLKDFVSALPDKLDHECAEGGENLRVIVLDKGEIQEYGAPSDLLQQRGLFYSMAKDAGLV

SEQ ID NO: 3068 - protein, 160 aa, Artificial Sequence
  Synthetic polypeptide
GSFPCSCLLSLACCHVRHASSPFAMSLSFLRPPQPCRTVLTSVARLSSKSVNAQVTDINSKGLELRKTVTTVETQNLEGLHHDGQFCHKPCPPGERKARDCTVNGDEPDCVPCQEGKEYTDKAHFSSKCRRCRLCDEGHDVNMESSRNAHSPATPSAKRK

SEQ ID NO: 3069 - protein, 160 aa, Artificial Sequence
  Synthetic polypeptide
GRAGWFMPVIPALWDAKDYLHSLGKARTAQVQKDARIGEAEAKRDAGIREAKAKQEKVSAQYLSEIEMAKAQRDYELKKAAYDIEVNTRRAQADLAYQLQVAKTKQQIEEQRVQVQVVERAQQVAVQEQEIARREKELEARVRKPAEAERYKLERLAEAE

SEQ ID NO: 3070 - protein, 160 aa, Artificial Sequence
  Synthetic polypeptide
SNFLLSVCLHTRQWFLEEGAIWFISKACLTGATAVLFAVFVRYNHKTDAALWHRSNHSNADNEFYFRYPKESHSVAQAGVQRRNLGSLQPSPPRLPGRACHGLRGLWLPHGLPAALRLQQRGLHLPPGRLCPAVVHTGPGLSPLLPRWPHPCWRGEHDQC

SEQ ID NO: 3071 - protein, 159 aa, Artificial Sequence
  Synthetic polypeptide
TTEGTILSRPSNAKEIDCSTDWRTLELRAATKLTEEKYELKEGQTLDVKCDYTLEKFASSQKAWQIIRDGEMPKTLACTERPSKNSHPVQVGRIILEDYHDHGLLRVRMVNLQVEDSGLYQCVIYQPPKEPHMLFDRIRLVVTKGFRCSTLSFSWLVDS

SEQ ID NO: 3072 - protein, 159 aa, Artificial Sequence
  Synthetic polypeptide
CQHFERPRREDHEPVMDDQRDLISNNEQLPMLGRRPGAPESKCSRGALYTGFSILVTLLLAGQATTAYFLYQQQGRLDKLTVTSQNLQLENLRMKLPKPPKPVSKMRMATPLLMQALPMGALPQGPMQNATKYGNMTEDHVMHLLQSHWNWRTRLLGWV

SEQ ID NO: 3073 - protein, 157 aa, Artificial Sequence
  Synthetic polypeptide
NLRLPPGHAELHMPLNQKAKRELCIGWGDPSGLPRRSYRLLLLHQEVRLYGPNFILQVYSSQRKSWHPVCQDDWNENYGRAACRDMGYKNNFYSSQGIVDDSGSTSFMKLNTSAGNVDIYKKLYHSDACSSKAVVSLRCIACGVNLNSSRQSRIVGG

SEQ ID NO: 3074 - protein, 157 aa, Artificial Sequence
  Synthetic polypeptide
DMDLTTPLCCCVLFNASPQNFCVKIIAFDELRTDFKNPIDQGNPARARERLKNIERICCLLRKLVVPEYSIHGLFCLMFLCAAEWVTLGLNIPLLFYHLWRYFHRPADGSEVMYDAVSIMNADILNYCQKESWCKLAFYLLSFFYYLYSMVYTLVSF

SEQ ID NO: 3075 - protein, 157 aa, Artificial Sequence
  Synthetic polypeptide
IIQLQLETDKLALPMSPSPLSPSPIPSPNAKLENSALLTVEPSPQDKNKGFFVDESEPLLRCDSTSSGSSALSRNGSFITKEKKDTVLRQVRLDPCDLQPIFDDMLHFLNPEELRVIEEIPQAEDKLDRLFEIIGVKSQEASQTLLDSVYSHLPDLL

SEQ ID NO: 3076 - protein, 157 aa, Artificial Sequence
  Synthetic polypeptide
FYCQLCNWWPWTNLLTCIFFSLLTCKMRFLSPFNMILGGIVVVLVFTGFVWAAHNKDVLRRMKKRYPTTFVMVVMLASYFLISMFGGVMVFVFGITFPLLLMFIHASLRLRNLKNKLENKMEGIGLKRTPMGIVLDALEQQEEGINRLTDYISKVKE

SEQ ID NO: 3077 - protein, 156 aa, Artificial Sequence
  Synthetic polypeptide
VMEMLYIWLMYLPYYLSSPSGMPAARGPGIVAGPYPCACSSAQHMVVTRCTRSTAPTTLPTAAATRAATRRSAAGMGWIVPARCRPCWPAACWCSQCCCRQRSYCVPAPTFCSGSAPSCAPRCASAWTRTARPWSSLTTGLVLAPNPGPVGSWPPR

SEQ ID NO: 3078 - protein, 156 aa, Artificial Sequence
  Synthetic polypeptide
ADLYRLHRPSSTVFWLPGGSSQRKTPAGYQSWENRELERQLIMQSEMRERQMAMQIAWSREFLKYFGTFFGLAAISLTAGAIKKKKPAFLVPIVPLSFILTYQYDLGYGTLLERMKGEAEDILETEKSKLQLPRGMITFESIEKARKEQSRFFIDK

SEQ ID NO: 3079 - protein, 156 aa, Artificial Sequence
  Synthetic polypeptide
IIVHTTTWMNLQGIMLSEKKPISKGPSKLNDRADSRRSLWDQGNFPLIIKNLKIEDSDTYICEVEDQKEEVQLLVFGLTANSDTHLLQGQSLTLTLESPPGSSPSVQCRSPRGKNIQGGKTLSVSQLELQDSGTWTCTVLQNQKKVEFKIDIVVLG

SEQ ID NO: 3080 - protein, 155 aa, Artificial Sequence
  Synthetic polypeptide
GTGDQTRNQDTRDRDSGSASCCCVTLIKVILDKYYFLCGQPLHFIPRKQLCDGELDCPLGEDEEHCVKSFPEGPAVAVRLSKDRSTLQVLDSATGNWFSACFDNFTEALAETACRQMGYSSKPTFRAVEIGPDQDLDVVEITENSQELRMRNSSG

SEQ ID NO: 3081 - protein, 155 aa, Artificial Sequence
  Synthetic polypeptide
LCLPLPEIPLLGIPRSPPNEKSWFAHKNKNYIEERCGQPPNYEMLKEEHEVAVLGAPHNPAPPTSTVIHIRSETSVPDHVVWSLFNTLFMNPCCLGFIAFAYSVKSRDRKMVGDVTGAQAYASTAKCLNIWALILGILMTILLIVIPVLIFQAYG

SEQ ID NO: 3082 - protein, 155 aa, Artificial Sequence
  Synthetic polypeptide
VSVSTPDSGSWRKGLSGSSPKPASQAPLPSSLLSLSATTTKPTLPSGTGATTVTRTMNFTFATQKSLTLLPRLECNGAISAHCNLHLPGFQDVHAMVFVGFGFLMVFLQRYGFSSVGFTFLLAAFALQWSTLVQGFLHSFHGGHIHVGVESMINA

SEQ ID NO: 3083 - protein, 154 aa, Artificial Sequence
  Synthetic polypeptide
MGTVAHTCNPSTFGGQGSSSSYDNGFPTGDHELFTTFSWDDQKVRRVFVRKNPSHPQVYTILLIQLLVTLAVVALFTFCDPVKDYVQANPGWYWASYAVFFATYLTLACCSGPRRHFPWNLILLTVFTLSMAYLTGMLSSSTSPPARACSSCFS

SEQ ID NO: 3084 - protein, 154 aa, Artificial Sequence
  Synthetic polypeptide
LSVVVQACNPSYSNAKVLCPGIAAVRAGGKGCCGAGCCGNRCRMLRSVFSSAFGVLGAIYCLSVSGAGLRNGPRCLMNGEWGYHFEDTAGAYLLNRTLWDRCEAPPRVVPWNVTLFSLLVAASCLEIVLCGIQLVNATIGVFCGDCRKKQDTPH

SEQ ID NO: 3085 - protein, 154 aa, Artificial Sequence
  Synthetic polypeptide
SQDGQIGTAPVYSSQHERRRRWVISAFPSEYAVWLVLWVTWNVFVICFYLEAGDLSKETDLILTFNISMHRSWWMENGPGCTVTSVTPAPDWAPEDHRYITVSGCLLEYQYIEVAHSSLQIVLAVSVGSQPLLLVPLGLFYFCANSVHTNGICG

SEQ ID NO: 3086 - protein, 154 aa, Artificial Sequence
  Synthetic polypeptide
THGGSGPSPSHIWGLRILPWVDIASGLRVPVWRSLRLDDVRLHGGHDLQYHLPHHRALRAHVHAAEAPGRQVQSLLRLPAGQAGQEDPLGGCEPGGGRAHPLPLLAALLFHHAHGVPSSHVYVHICGPGHHHRHLSLPRLLWTLQIPQCPQLQD

SEQ ID NO: 3087 - protein, 154 aa, Artificial Sequence; identical to SEQ ID NO: 3086
  Synthetic polypeptide

SEQ ID NO: 3088 - protein, 154 aa, Artificial Sequence; identical to SEQ ID NO: 3086
  Synthetic polypeptide

SEQ ID NO: 3089 - protein, 154 aa, Artificial Sequence
  Synthetic polypeptide
NQPGQQDPHVRTRQTQPENQSLASGVLEHHRSRGHFHIHDWSNSSPTEPALHGLWPGDLLCGYHLLVHPCPGHLWCQQVSGAIRDDDWKDDDRHAVLCGHHAGRAHEFRSSPSSHSASRGEALLETGPKHLLHALLDDLWRGVCRPDRPLRHGN

SEQ ID NO: 3090 - protein, 154 aa, Artificial Sequence; identical to SEQ ID NO: 3089
  Synthetic polypeptide

SEQ ID NO: 3091 - protein, 154 aa, Artificial Sequence; identical to SEQ ID NO: 3089
  Synthetic polypeptide

SEQ ID NO: 3092 - protein, 154 aa, Artificial Sequence; identical to SEQ ID NO: 3089
  Synthetic polypeptide

SEQ ID NO: 3093 - protein, 154 aa, Artificial Sequence; identical to SEQ ID NO: 3089
  Synthetic polypeptide

SEQ ID NO: 3094 - protein, 153 aa, Artificial Sequence
  Synthetic polypeptide
QKADHILFGHRCKERAELQGHEESFGGNGNVLCLVCGGGGFTGKYTYQKLAFETMSVISVVTNCALIGMSPQVNAVFPESKADLILIVVAVEHALLALKFILAFAIPDKPRHIQMKLARLEFESLEALKQQQMKLVTENLKEEPMESGKEKAT

SEQ ID NO: 3095 - protein, 153 aa, Artificial Sequence; identical to SEQ ID NO: 3094
  Synthetic polypeptide

SEQ ID NO: 3096 - protein, 153 aa, Artificial Sequence; identical to SEQ ID NO: 3094
  Synthetic polypeptide

SEQ ID NO: 3097 - protein, 153 aa, Artificial Sequence; identical to SEQ ID NO: 3094
  Synthetic polypeptide

SEQ ID NO: 3098 - protein, 153 aa, Artificial Sequence; identical to SEQ ID NO: 3094
  Synthetic polypeptide

SEQ ID NO: 3099 - protein, 153 aa, Artificial Sequence
  Synthetic polypeptide
TFLSLSLLLCKDKEVNLEQVHRRMNSLMDEDIAHKQISPASIELSALEMGGLAPTQTLEPTREYQNTQLSVSTFLPEQSSHGTSRTLSSGPSSNLPLPLSSSATMPSMQCKHRSPNGGLFRQSPVKTPIPMSFQPVPGGVLPEALDTSHGTSI

SEQ ID NO: 3100 - protein, 153 aa, Artificial Sequence; identical to SEQ ID NO: 3099
  Synthetic polypeptide

SEQ ID NO: 3101 - protein, 153 aa, Artificial Sequence
  Synthetic polypeptide
PGAVTHACNPSTLGGRGGQITRSRDQDHPGQHGVGQFSDDIQQMTGQRPSLYWRLCWKLVSPCFLLFVVVVSIVTFRPPHYGAYIFPDWANALGWVIATSSMAMVPIYAAYKFCSLPGSFREKLAYAIAPEKDRELVDRGEVRQFTLRHWLKV

SEQ ID NO: 3102 - protein, 153 aa, Artificial Sequence; identical to SEQ ID NO: 3101
  Synthetic polypeptide

SEQ ID NO: 3103 - protein, 152 aa, Artificial Sequence
  Synthetic polypeptide
KNLKANEELSQKNGLEVLISHAKSEVGRTSEDPDCSGSSIRMCLPPRAPWTARQAWEKRRPWSSRTPGFGWQARTSRPERGKGCTRRLWPPGRPRTRWSCWASGAPWTSWGPGPSWRHWERWPQGSTRPSGPQRRARTRRRDGPKGTPRAQG

SEQ ID NO: 3104 - protein, 151 aa, Artificial Sequence
  Synthetic polypeptide
NVTSLNLQLENLRMKLPKPPKPVSKMRMATPLLMQALPMGALPQGPMQNATKYGNMTEDHVMHLLQNADPLKVYPPLKGSFPENLRHLKNTMETIDWKVFESWMHHWLLFEMSRHSLEQKPTDAPPKESLELEDPSSGLGVTKQDLGPVPM

SEQ ID NO: 3105 - protein, 151 aa, Artificial Sequence
  Synthetic polypeptide
CLPGRVMSELETACGKPMRHKTSSSSLRMGAYVFIGVGAVTMLMGFLGCIGAVNEVRCLLGLYFAFLLLILIAQVTAGALFYFNMGKLKQEMGGIVTELIRDYNSSREDSLQDAWDYVQAQVKCCGWVSFYNWTDNAELMNRPEVTYPCSC

SEQ ID NO: 3106 - protein, 151 aa, Artificial Sequence
  Synthetic polypeptide
IGTAPVYSSQHQRCRRWVISAFPSEFPRAMGTSHPAFLVLGCLLTGLSLILCQLSLPSILPNENEKVVQLNSSFSLRCFGESEVSWQYPMSEEESSDVEIRNEENNSGLFVTVLEVSSASAAHTGLYTCYYNHTQTEENELEGRHIYIYVP

SEQ ID NO: 3107 - protein, 151 aa, Artificial Sequence
  Synthetic polypeptide
QCGAVVMSRDSGARVPGFSSCFCSVVAGWPWTSRLTSPCLSSKCCVLCNLPDPGLLFWTQEAFPLEPDSPDRLYPVHGLPHWDAVQLLQHHLRAAVPGHHGPCLPLSHRLQLPDQVRLHLLPGRALRASHDSFLQRTHPGHPPTLPIFPGT

SEQ ID NO: 3108 - protein, 151 aa, Artificial Sequence
  Synthetic polypeptide
AQELEAAAAGESCRHHRGPAEGRDQSLGSHGRQDGDGRGHVLRLQALPQEHAAAGADHQEDRGAEPARRPVRAEQDGPAPQREPDQRQPVRTFSRYAGLRFNYRRSCTVSDNEASRRREFRQLQGALPGNLPELQRGALLPHGALAEGSDC

SEQ ID NO: 3109 - protein, 151 aa, Artificial Sequence; identical to SEQ ID NO: 3108
  Synthetic polypeptide

SEQ ID NO: 3110 - protein, 151 aa, Artificial Sequence; identical to SEQ ID NO: 3108
  Synthetic polypeptide

SEQ ID NO: 3111 - protein, 151 aa, Artificial Sequence; identical to SEQ ID NO: 3108
  Synthetic polypeptide

SEQ ID NO: 3112 - protein, 151 aa, Artificial Sequence; identical to SEQ ID NO: 3108
  Synthetic polypeptide

SEQ ID NO: 3113 - protein, 151 aa, Artificial Sequence; identical to SEQ ID NO: 3108
  Synthetic polypeptide

SEQ ID NO: 3114 - protein, 151 aa, Artificial Sequence
  Synthetic polypeptide
GCPLSLLLFNILMEVQAKAIRCCCGQFTNQHIPPLPSATPSKNEEESKQVETQPEKWSVAKHTQSYPTDSYGVLEFQGGGYSNKAMVRKAFRHGATRITAFIGGQSPSPKLQIPGLLHGCGSIFLDISLKNQEIYLCTWLLAMRLGNWTPL

SEQ ID NO: 3115 - protein, 151 aa, Artificial Sequence
  Synthetic polypeptide
QENKLGAPIDSTLCFSQMPTSSVKDETNDNITIFTRILDGLLDGYDNRLRPGLGERITQVRTDIYVTSFGPVSDTEMEYTIDVFFRQSWKDERLRFKGPMQRLPLNNLLASKIWTPDTFFHNGKKSIAHNMTTPNKLLRLEDDGTLLYTMR

SEQ ID NO: 3116 - protein, 151 aa, Artificial Sequence
  Synthetic polypeptide
CQHFERPRREDHEPVMDDQRDLISNNEQLPMLGRRPGAPESKCSRGALYTGFSILVTLLLAGQATTAYFLYQQQGRLDKLTVTSQNLQLENLRMKLPKPPKPVSKMRMATPLLMQALPMGALPQGPMQNATKYGNMTEDHVMHLLQEVAKS

SEQ ID NO: 3117 - protein, 151 aa, Artificial Sequence
  Synthetic polypeptide
STKLEIRNTRNLTYIDPDALKELPLLKFLGIFNTGLKMFPDLTKVYSTDIFFILEITDNPYMTSIPVNAFQGLCNETLTLKLYNNGFTSVQGYAFNGTKLDAVYLNKNKYLTVIDKDAFGGVYSGPSLLLPLGRKSLSFETQKAPRSSMPS

SEQ ID NO: 3118 - protein, 150 aa, Artificial Sequence
  Synthetic polypeptide
GWMQWLTPVIPTLWEAESLVREPLSRRRQLLRENFVETEGEFVFATSLDTKDIEQIAEFLEQSVKDSCEGLMVKTLDVDATYEIAKRSHNWLKLKKDYLDGVGDTLDLVVIGAYLGRGKRAGRYGGFLLASYDEDSEELQAICKVLGNWG

SEQ ID NO: 3119 - protein, 150 aa, Artificial Sequence; identical to SEQ ID NO: 3118
  Synthetic polypeptide

SEQ ID NO: 3120 - protein, 150 aa, Artificial Sequence
  Synthetic polypeptide
DVPASPSAMIVSFLRPPQPCGTVSVLTTLERRFNLQSADVGVIASSFEIGNLALILFVSYFGARGHRPRLIGCGGIVMALGALLSALPEFLTHQYKYEAGEIRWGAEGRDVCAANGSGGDEGPDPDLICRNRTATNMMYLLLIGAQVLLG

SEQ ID NO: 3121 - protein, 150 aa, Artificial Sequence
  Synthetic polypeptide
FPTSASQLDVRPKLLSLLAFICEEVVSQCTLCGGLYFFEFVSCSAFLLSLLILIVYCTPFYERVDTTKVKSSDFYITLGTGCVFLLASIIFVSTHDRTSAEIAAIVFGFIASFMFLLDFITMLYEKRQESQLRKPENTTRAEALTEPLNA

SEQ ID NO: 3122 - protein, 149 aa, Artificial Sequence
  Synthetic polypeptide
LVLVETGFCCDGRAGLQPLTASDPPALASRGAGIADGLSFTQCSMQAVVDDDANNAKAVVKTFHETLDCCGSSTLTALTTSVLKNNLCPSGSNIISNLFKEDCHQKIDDLFSGKLYLIGIAAIVVAVIMIFEMILSMVLCCGIRNSSVY

SEQ ID NO: 3123 - protein, 149 aa, Artificial Sequence; identical to SEQ ID NO: 3122
  Synthetic polypeptide

SEQ ID NO: 3124 - protein, 149 aa, Artificial Sequence; identical to SEQ ID NO: 3122
  Synthetic polypeptide

SEQ ID NO: 3125 - protein, 149 aa, Artificial Sequence
  Synthetic polypeptide
LVLVETGFCCDGRAGLQPLTASDPPALASRGAGIADGLSFTQCSMQAVVDDDANNAKAVVKTFHETLDCCGSSTLTALTTSVLKNNLCPSGSNIISNLFKEDCHQKIDDLFSGKLYLIGIAAIVVAVIMVSGRGRRACSLGCPFRGALC

SEQ ID NO: 3126 - protein, 149 aa, Artificial Sequence; identical to SEQ ID NO: 3122
  Synthetic polypeptide

SEQ ID NO: 3127 - protein, 149 aa, Artificial Sequence; identical to SEQ ID NO: 3122
  Synthetic polypeptide

SEQ ID NO: 3128 - protein, 149 aa, Artificial Sequence; identical to SEQ ID NO: 3122
  Synthetic polypeptide

SEQ ID NO: 3129 - protein, 149 aa, Artificial Sequence
  Synthetic polypeptide
DMDLTTPLCCCVLFNASPQNFCVKIIAFDELRTDFKNPIDQGNPARARERLKNIERICCLLRKLVVPEYSIHGLFCLMFLCAAEWVTLGLNIPLLFYHLWRYFHRPADGSEVMYDAVSIMNADILNYCQKESWCKLAFYLLSFFYYLYR

SEQ ID NO: 3130 - protein, 149 aa, Artificial Sequence
  Synthetic polypeptide
GTLCRGKSKKTSTRPTLSTIFAPKVPTLEVPAPEAVSSGHSTLPPLVSRPGSADTPSEAEQRFRKKRRRSQRRPRLRQFSDLWVRLEESDIVPQLQVPVLDRHISTELRLPRRGHSHHSQMVASSACLSLWTPVFWVLVLAFQTETPLL

SEQ ID NO: 3131 - protein, 149 aa, Artificial Sequence; identical to SEQ ID NO: 3130
  Synthetic polypeptide

SEQ ID NO: 3132 - protein, 149 aa, Artificial Sequence
  Synthetic polypeptide
GQEFKATRASGLLPGPTQAKPVQPAGSVWTCAPGNWRPLHTWLPFLQSNPVPSSCIIRPSQHPSPAHQCRHCLPPAEEAQRPCGPPRMAGEPPRLPLSPGPRATTAASGQQSQDLHPHQQHLRLHRRPLRARSLRCHRGPEGCMGPRSS

SEQ ID NO: 3133 - protein, 149 aa, Artificial Sequence; identical to SEQ ID NO: 3132
  Synthetic polypeptide

SEQ ID NO: 3134 - protein, 148 aa, Artificial Sequence
  Synthetic polypeptide
GVPIREPQTSNCLWFVRNEATQQEARGSSPVSLDLIIPFLRPGCCVLLHASLSSPGGEDAWLIGVGGSVPSGVAVRCPVCLEAPLVSGCLLQTPGALDPGTAGPPHPTGCCSGPHLPAPTVRPGPSAASAPPARGGLGGAAAPGGSAG

SEQ ID NO: 3135 - protein, 148 aa, Artificial Sequence
  Synthetic polypeptide
GRVRWLTPVIPALWEAEAGGSPELISTIPTSRLKFLKEAGHGTQKEEIPEEELAEDVEEIDHAERELRRGQILWFRGLNRIQTQIRVVNAFRSSLYEGLEKPESRSSIHNFMTHPEFRIEDSEPHIPLIDDTDAEDDAPTKRNSSPPP

SEQ ID NO: 3136 - protein, 148 aa, Artificial Sequence
  Synthetic polypeptide
GLAQWLMPVIPALQEAEASRSFGVRSSRPAWTTWVYSGLPGTHDHRHPPGLPRPLARHSGPALHQHWGPGALQESQAGGHRRGPPHSGRYLRDGGHLLVRLQHHPGLLRPLVPRNQVRAGPRPLPGVERLTDLHPGWPLPLLRLLLRL

SEQ ID NO: 3137 - protein, 148 aa, Artificial Sequence; identical to SEQ ID NO: 3136
  Synthetic polypeptide

SEQ ID NO: 3138 - protein, 148 aa, Artificial Sequence
  Synthetic polypeptide
SQYSGLRQENRLNPGGRDELLQKEQNYSDDVLANMISEPRISYGNDALMPSLTETKTTVELLPVNGEFSLDDLQPWHSFGADSVPANTENEGSGLTNIKTEEISEVKMDAEFRHDSGYEVHHQKLVFFAEDVGSNKGAIIGLMVGGVV

SEQ ID NO: 3139 - protein, 148 aa, Artificial Sequence
  Synthetic polypeptide
QLTLEQHRFELHGSIYTHISSTSATPKIARPTPSLFLSLPPPQPTQCEDDEDENLCDDPLPLNECVHRHRHEAAAPCQSRDPPGHAPPPLPGLPGGAGKPGTHLPAHQCQPVLPAGYPGGAGLRAHRSQPSEAGPTAEAADCARHPAL

SEQ ID NO: 3140 - protein, 148 aa, Artificial Sequence; identical to SEQ ID NO: 3139
  Synthetic polypeptide

SEQ ID NO: 3141 - protein, 148 aa, Artificial Sequence; identical to SEQ ID NO: 3139
  Synthetic polypeptide

SEQ ID NO: 3142 - protein, 147 aa, Artificial Sequence
  Synthetic polypeptide
YWLACRVIGRPTHKKGLIPCPAHRPAHHAVSVAPLQRRPRLQWHPPKGGLQQPQRGPHHAGSGDPYLPLDPLHERGRLPGGALLVHPAGSLERQCGPPPAASAGLAGPAAPGPSVRFCGAAAAPRRLLRAGSHPLCPPRRLRWPSGC

SEQ ID NO: 3143 - protein, 147 aa, Artificial Sequence; identical to SEQ ID NO: 3142
  Synthetic polypeptide

SEQ ID NO: 3144 - protein, 147 aa, Artificial Sequence
  Synthetic polypeptide
QCGAVVMSRDSGARVPGFSSCFCSVVAGWPWTSRLTSPCLSSKCCVLCNLPDPGLLFWTQEAFPLEPDSPDRLYPVHGLPHWDAVQLLQHHLRAAVPGHHGPCLPLSHRLQLPDQVRLHLLPGRALRASHDSFLQRTHPGHPPTLPI

SEQ ID NO: 3145 - protein, 147 aa, Artificial Sequence
  Synthetic polypeptide
CQHFERPRREDHEPVMDDQRDLISNNEQLPMLGRRPGAPESKCSRGALYTGFSILVTLLLAGQATTAYFLYQQQGRLDKLTVTSQNLQLENLRMKLPKPPKPVSKMRMATPLLMQALPMGALPQGPMQNATKYGNMTEDHVMHLLQY

SEQ ID NO: 3146 - protein, 146 aa, Artificial Sequence
  Synthetic polypeptide
KECTFSRNCTWNLEWRSSIGLVICSMILFGDACTAPSQPRKHKIMMLKMIFNQTSVEHCKTHTEKQKECNFFLIAVRLASLNQILDPWVYLLLRKILLRKFCQMRKRRLREQEMGPDGRCFCHAWRQVPRTWCSSHDREPCSVQLS

SEQ ID NO: 3147 - protein, 146 aa, Artificial Sequence
  Synthetic polypeptide
ADPGQPPASRTHNLGYVQACRALMIAASVLGLPAILLLLTVLPCIRMGQEPGVAKYRRAQLAGVLLILLALCALVATIWFPVCAHRETTIVSFGYSLYAGWIGAVLCLVGGCVILCCAGDAQAFGENRFYYTAGSSSPTHAKSAHV

SEQ ID NO: 3148 - protein, 146 aa, Artificial Sequence
  Synthetic polypeptide
LELTQISFNRYSITRSKVFNINDNGTITTSNSLDREISAWYNLSITATEKYNIEQISSIPLYVQVLNINDHAPEFSQYYETYVCENAGSGQVIQTISAVDRDESIEEHHFYFNLSVEDTNNSSFTIIDNQELVLTFKKNLSSTSPS

SEQ ID NO: 3149 - protein, 145 aa, Artificial Sequence
  Synthetic polypeptide
KPPGFIPAPSYSSCGTWRLTLVLALATLIAAFGSSFQYGYNVAAVNSPALLMQQFYNETYYGRTGEFMEDFPLTLLWSVTVSMFPFGGFIGSLLVGPLVNKFGRKGALLFNNIFSIVPAILMGCSRVATSFELIIISRLLVGICA

SEQ ID NO: 3150 - protein, 145 aa, Artificial Sequence
  Synthetic polypeptide
GQEFETSLANLEIYKDRQKFSEQVFKVASSDLVNMGISVVSYTLKDIHDDQDYLHSLGKARTAQVQKDARIGEAEAKRDAGIREAKAKQEKVSAQYLSEIEMAKAQRDYELKKAAYDIEVNTRRAQADLAYQLQVAKTKQQIEEQ

SEQ ID NO: 3151 - protein, 145 aa, Artificial Sequence
  Synthetic polypeptide
LDMVAASTGQPEDDTETTGLEGGVAMPGAEDDVVTPGTSEDRYKSGLTTLVATSVNSVTGIRIEDLPTSESTVHAQEQSPSATASNVATSHSTEKVDGDTQTTVEKDGLSTVTLVGIIVGVLLAIGFIGAIIVVVMRKMSGRYSP

SEQ ID NO: 3152 - protein, 145 aa, Artificial Sequence; identical to SEQ ID NO: 3151
  Synthetic polypeptide

SEQ ID NO: 3153 - protein, 144 aa, Artificial Sequence
  Synthetic polypeptide
NSSGLNLIIKNKVEITYSLQAAELSGQPPNYEMLKEEHEVAVLGAPHNPAPPTSTVIHIRSETSVPDHVVWSLFNTLFMNPCCLGFIAFAYSVKSRDRKMVGDVTGAQAYASTAKCLNIWALILGILMTILLIVIPVLIFQAYG

SEQ ID NO: 3154 - protein, 144 aa, Artificial Sequence
  Synthetic polypeptide
GQEIETILANKVVTLTANDKTSVSFSSLPGQGVIYNVIVWDPFLNTSAAYIPAHTYACSFEAGEGSCASLGRVSSKVFFTLFALLGFFICFFGHRFWKTELFFIGFIIMGFFFYILITRLTPIKYDAEHTDLWSHWLLFGGFSH

SEQ ID NO: 3155 - protein, 144 aa, Artificial Sequence
  Synthetic polypeptide
PGAVALACNLSTLDAKAGGSLEVRSSRPASTTCCETKDLVVQQAGTNKTDVVCGPQDRLRALVVIPIIFGILFAILLVLVFIKKVAKKPTNKAPHPKQEPQEINFPDDLPGSNTAAPVQETLHGCQPVTQEDGKESRISVQERQ

SEQ ID NO: 3156 - protein, 144 aa, Artificial Sequence
  Synthetic polypeptide
LDMVAASTGQPEDDTETTGLEGGVAMPGAEDDVVTPGTSEDRYKSGLTTLVATSVNSVTGIRIEDLPTSESTVHAQEQSPSATASNVATSHSTEKVDGDTQTTVEKDGLSTVTLVGIIVGVLLAIGFIGAIIVVVMRKMSGRYS

SEQ ID NO: 3157 - protein, 143 aa, Artificial Sequence
  Synthetic polypeptide
DLGHVPLRQCWNKLRVWGTVGKDPDDVVPVGQRRAWCWCMCFGLAFMLAGVILGGAYLYKYFALQAGTYLPQSYLIHEHMVITDRIENIDHLGFFIYRLCHDKETYKLQRRETIKGIQKREASNCFAIRHFENKFAVETLICS

SEQ ID NO: 3158 - protein, 143 aa, Artificial Sequence
  Synthetic polypeptide
GRVRWLTPVIPALWEAEAGGSPELISTIPTSRLKFLKEAGHGTQKEEIPEEELAEDVEEIDHAERELRRGQILWFRGLNRIQTQMDVVNAFQSGSSIQGALRRQPSIASQHHDVTNISTPTHVVFSSSTASTTVGYSSGECIS

SEQ ID NO: 3159 - protein, 143 aa, Artificial Sequence
  Synthetic polypeptide
PPNSLCPSLKTHSKGSIKGTASGSITSQRTMTTTTTARSTSSASCEPPASSPSSAPSCSCWVACASVLAGSTAARTTSSSVPASSSWLQASVTSSVSSSTFPATQVTRVTSGTKTKRTITTTAGLFTLELCLSLWLRPWASWL

SEQ ID NO: 3160 - protein, 143 aa, Artificial Sequence
  Synthetic polypeptide
MGRSTGQESQERGIQALTLTLTFWQVQPRSPVHRLFHPGDSAPRWPGHHRLLPVPAAGPAGQTDSHLPEPAAGEPAHEASQASQACEQDAHGHPAADAGAAHGSPAPGAHAECHQVWQHDRGPCDAPAPESLELEDPSSGLGV

SEQ ID NO: 3161 - protein, 143 aa, Artificial Sequence
  Synthetic polypeptide
LDMVAASTGQPEDDTETTGLEGGVAMPGAEDDVVTPGTSEDRYKSGLTTLVATSVNSVTGIRIEDLPTSESTVHAQEQSPSATASNVATSHSTEKVDGDTQTTVEKDGLSTVTLVGIIVGVLLAIGFIGAIIVVVMRKMSGRP

SEQ ID NO: 3162 - protein, 141 aa, Artificial Sequence
  Synthetic polypeptide
RADACVCVCCSLLYGAWARGNEIINAVVLLILLSALADPDQYNFSSSELGGDFEFMDDAKILFNLSADMCIAIAISLLMILICAMATYGAYKQRAAWIIPFFCYQIFDFALNMLVAITVLIYPNSIQEYIRQLPPNFPYRD

SEQ ID NO: 3163 - protein, 141 aa, Artificial Sequence
  Synthetic polypeptide
TGHYHLAHLLRGTGIGIGFYGNSETSDGVSQLSSALLHANHTLSTIDHLVLETVERLGEAVRTELTTLEEVLEPRTELVAAARGARRQAEAAAQQLQGLAFWQGVPLSPLQVAENVSFVEEYRWLAYVLLLLLELLVCLFT

SEQ ID NO: 3164 - protein, 141 aa, Artificial Sequence
  Synthetic polypeptide
PGAVAHTCNPSTLGGRGGQITSGQPPNYEMLKEEHEVAVLGAPHNPAPPTSTVIHIRSETSVPDHVVWSLFNTLFMNPCCLGFIAFAYSVKSRDRKMVGDVTGAQAYASTAKCLNIWALILGILMTILLIVIPVLIFQAYG

SEQ ID NO: 3165 - protein, 141 aa, Artificial Sequence
  Synthetic polypeptide
DILYINAPASQGLKAEHLYILIGVSVVFLFCLLLLVLFCLHRQNQIKQGPPRSKDEEQKPQQRPDLAVDVLERTADKATVNGLPEKDRETDTSALAAGSSQEVTYAQLDHWALTQRTARAVSPQSTKPMAESITYAAVARH

SEQ ID NO: 3166 - protein, 141 aa, Artificial Sequence; identical to SEQ ID NO: 3165
  Synthetic polypeptide

SEQ ID NO: 3167 - protein, 141 aa, Artificial Sequence; identical to SEQ ID NO: 3165
  Synthetic polypeptide

SEQ ID NO: 3168 - protein, 141 aa, Artificial Sequence; identical to SEQ ID NO: 3165
  Synthetic polypeptide

SEQ ID NO: 3169 - protein, 141 aa, Artificial Sequence; identical to SEQ ID NO: 3165
  Synthetic polypeptide

SEQ ID NO: 3170 - protein, 141 aa, Artificial Sequence; identical to SEQ ID NO: 3165
  Synthetic polypeptide

SEQ ID NO: 3171 - protein, 141 aa, Artificial Sequence
  Synthetic polypeptide
QHRVKVKEDILWSPRNIGSYPSSASYYYCDYTSYLTSQSLSCLSCKVERRTGCDKGKWYMKKHSAWFMHFLPLANLECSPNIETFLCKAFVPTCIEQIHVVPPCRKLCEKVYSDCKKLIDTFGIRWPEELECDSCRKKMEL

SEQ ID NO: 3172 - protein, 140 aa, Artificial Sequence
  Synthetic polypeptide
RDIRDEDEGGRALEPKRISSNIASAPSRQCDSGQVACLLWAATSFHHCKRRQRERDYGAALRGLCEDALEGLLFLLLFSLLSAGALATALCSLPRAWALFPPRNPSALCSGSRLSEPLLPAGLEPGSPLRSFPGCRRRPH

SEQ ID NO: 3173 - protein, 140 aa, Artificial Sequence
  Synthetic polypeptide
SLHFGRPRRADHERVVLLQTATLLGVLLLGYGYFWLLVPNPEARLQQLGLFCSVFTISMYLSPLADLAKVIQTKSTQCLSYPLTIATLLTSASWCLYGFRLRDPYIMVSNFPGIVTSFIRFWLFWKYPQEQDRNYWLLQT

SEQ ID NO: 3174 - protein, 140 aa, Artificial Sequence; identical to SEQ ID NO: 3173
  Synthetic polypeptide

SEQ ID NO: 3175 - protein, 140 aa, Artificial Sequence; identical to SEQ ID NO: 3173
  Synthetic polypeptide

SEQ ID NO: 3176 - protein, 140 aa, Artificial Sequence
  Synthetic polypeptide
QWGHMSLSLGKWPAWGWPREGQGGCLKLTGRLMLAVGGAVLGSLQFGYNTGVINAPQKVIEEFYNQTWVHRYGESILPTTLTTLWSLSVAIFSVGGMIGSFSVGLFVNRFGRRNSMLMMNLLAFVSAVLMGFSKLGKSQT

SEQ ID NO: 3177 - protein, 140 aa, Artificial Sequence
  Synthetic polypeptide
MGAVAHACNASTLRGRGGKITRRSRSCREDQKPVMDDQRDLISNNEQLPMLGRRPGAPESKCSRGALYTGFSILVTLLLAGQATTAYFLYQQQGRLDKLTVTSQNLQLENLRMKLPKPHAECHQVWQHDRGPCDAPAPEC

SEQ ID NO: 3178 - protein, 139 aa, Artificial Sequence
  Synthetic polypeptide
QLGLVEGMWDLKAGQPEFQSCLLLTSFMRRELTPASLSCLLCKMEVAAPVSGACYADPPRVPARHTVVCTGTDMKLRLPASPETHLDMLRHLYQGCQVVQGNLELTYLPTNASLSFLQTTTFLRTWDPAPSSAPCTTKR

SEQ ID NO: 3179 - protein, 139 aa, Artificial Sequence
  Synthetic polypeptide
PPRASAVNAVFFATYLTLACCSGPRRHFPWNLILLTVFTLSMAYLTGMLSSYYNTTSVLLCLGITALVCLSVTVFSFQTKFDFTSCQGVLFVLLMTLFFSGLILAILLPFQYFLALDTQLLMGNRRHSLSPEEYIFGAL

SEQ ID NO: 3180 - protein, 139 aa, Artificial Sequence
  Synthetic polypeptide
GRAGWFMPVIPALWDAKVFKVASSDLVNMGISVVSYTLKDIHDDQDYLHSLGKARTAQVQKDARIGEAEAKRDAGIREAKAKQEKVSAQYLSEIEMAKAQRDYELKKAAYDIEVNTRRAQADLAYQLQVAKTKQQIEEQ

SEQ ID NO: 3181 - protein, 139 aa, Artificial Sequence
  Synthetic polypeptide
TECDLSIRSSYQEERALPLATTRMGRGDVTLSGGSQTGKAVQLAMPLAGNARGGEVRGAPYTLAVARAWGTRNQERLLNVGVGLEILRHQPLAHRPALHVAVLRANGHRAHVQFANSNLRGLQTYPPAEPAGAAEEPQE

SEQ ID NO: 3182 - protein, 139 aa, Artificial Sequence; identical to SEQ ID NO: 3181
  Synthetic polypeptide

SEQ ID NO: 3183 - protein, 139 aa, Artificial Sequence; identical to SEQ ID NO: 3181
  Synthetic polypeptide

SEQ ID NO: 3184 - protein, 139 aa, Artificial Sequence; identical to SEQ ID NO: 3181
  Synthetic polypeptide

SEQ ID NO: 3185 - protein, 138 aa, Artificial Sequence
  Synthetic polypeptide
KELGLRHSYNRKLQAMKAAKEARKTAAGVMPSAPAIPGTNMYNTERANPMLNLPNKDLGLEYLSPSNDLDSVSVNSLDDNSVDVDKNSQEIKEHRPPHTPPEPDPEPLSVVLLGRQAGASGQLEGPSYTNAGLDTTDL

SEQ ID NO: 3186 - protein, 138 aa, Artificial Sequence; identical to SEQ ID NO: 3185
  Synthetic polypeptide

SEQ ID NO: 3187 - protein, 138 aa, Artificial Sequence; identical to SEQ ID NO: 3185
  Synthetic polypeptide

SEQ ID NO: 3188 - protein, 138 aa, Artificial Sequence
  Synthetic polypeptide
RAPVIPTTWEAEAGELLEPGRRRSCREDQKPVMDDQRDLISNNEQLPMLGRRPGAPESKCSRGALYTGFSILVTLLLAGQATTAYFLYQQQGRLDKLTVTSQNLQLENLRMKLPKPHAECHQVWQHDRGPCDAPAPEC

SEQ ID NO: 3189 - protein, 138 aa, Artificial Sequence
  Synthetic polypeptide
RPKIDIAVGAPFEGLGKVYIYHSSSKGLLRQPQQVIHGEKLGLPGLATFGYSLSGQMDVDENFYPDLLVGSLSDHIVLLRARPVINIVHKTLVPRPAVLDPALCTATSCVQVELCFAYNQSAGNPNYRRNISECWGAA

SEQ ID NO: 3190 - protein, 138 aa, Artificial Sequence
  Synthetic polypeptide
DLMVLEASGVCPAVTHTVLLPSEESACFSLHHDCRSPEAPPALQNCQHLHVLHIPHGGHLGPEHHHRQQADRHGTPGGRAGPSVHGRGRAQHIQHGHRAWQGPGPAARRARPTCSGHRLCGLLAALPRAAPHVLLHLG

SEQ ID NO: 3191 - protein, 137 aa, Artificial Sequence
  Synthetic polypeptide
PGREIYKDRQKFSEQVFKVASSDLVNMGISVVSYTLKDIHDDQDYLHSLGKARTAQVQKDARIGEAEAKRDAGIREAKAKQEKVSAQYLSEIEMAKAQRDYELKKAAYDIEVNTRRAQADLAYQLQVAKTKQQIEEQ

SEQ ID NO: 3192 - protein, 137 aa, Artificial Sequence
  Synthetic polypeptide
SSAPHMTISAITAQAWITEERQAPPSQATSASRGPCSTPTATTCPAQTSLSLEGGTPTAGTPEARWRAPGALRRIKTYAWNCVTYPRVVPETAARWGFCTSWSPASQFHWSSLAFSSWFACAGISRRHLRPHRSGDS

SEQ ID NO: 3193 - protein, 137 aa, Artificial Sequence; identical to SEQ ID NO: 3192
  Synthetic polypeptide

SEQ ID NO: 3194 - protein, 137 aa, Artificial Sequence
  Synthetic polypeptide
KECTFSRNCTWNLEWRSSIGLVICSMILFGDACTAPSQPRKHKIMMLKMIFNQTSVEHCKTHTEKQKECNFFLIAVRLASLNQILDPWVYLLLRKILLRKFCQEMGPDGRCFCHAWRQVPRTWCSSHDREPCSVQLS

SEQ ID NO: 3195 - protein, 137 aa, Artificial Sequence
  Synthetic polypeptide
SQHFGGQGGWMDSLSPGVQDQPGQHGEPPSLQKFSQRSPPRRQRRDHQHRRPPSRRSPCPCAQRRAGQRRGAQCTRGGWTSPVISTSGRPWPGLVGSFSCHWLSPFTATTGTEDVFANVPGLWSNRETSPAFRRDTS

SEQ ID NO: 3196 - protein, 137 aa, Artificial Sequence; identical to SEQ ID NO: 3195
  Synthetic polypeptide

SEQ ID NO: 3197 - protein, 137 aa, Artificial Sequence; identical to SEQ ID NO: 3195
  Synthetic polypeptide

SEQ ID NO: 3198 - protein, 137 aa, Artificial Sequence
  Synthetic polypeptide
QLTLEQHRFELHGSIYTHISSTSATPKIARPTPSLFLSLPPPQPTQCEDDEDENLCDDPLPLNECVHRHRHEAAAPCQSRDPPGHAPPPLPGLPGGAGKPGTHLPAHQCQPVLPADNYLSTDVGSCTLVCPLHNQEV

SEQ ID NO: 3199 - protein, 137 aa, Artificial Sequence
  Synthetic polypeptide
ARHRKKNFAQSHLYEIKKSFGQRVYFAAEDTDCCTRNCCGPSRPFTLRIIDNMGQEVITLERPLRCSSCCCPCCLQEIEIQAPPGVPIGYVIQTWHPCLPKFTIQNEKREDVLKISGPCVVCSCCGDVDFEIKSLDE

SEQ ID NO: 3200 - protein, 136 aa, Artificial Sequence
  Synthetic polypeptide
GASLPGRPSSEMWGAPLPHRPVWDVRSASARPRPRLGGEERLCPAAPSEKGGDPPPGNRPVSEVRSPSTRQSPRLGREERLRQAATPSGREEPVDPLKEEALLVRLMAHPTSLEKELQLKQSFLWMSFLHLSSLEN

SEQ ID NO: 3201 - protein, 136 aa, Artificial Sequence
  Synthetic polypeptide
GLLELRNPRPAWATWEVPSCHTSIPPGLYHACLASLSILVLLLLAMLVRRRQLWPDCVRGRPGLPSPVDFLAGDRPRAVPAAVFMVLLSSLCLLLPDEDALPFLTLASAPSQDGKTEAPRGNLPKITELRLVRAWI

SEQ ID NO: 3202 - protein, 136 aa, Artificial Sequence
  Synthetic polypeptide
RAYGNSLYLCNSFASLNLFPVLCLAQTIHTQEEDLPRPSISAEPGTVIPLGSHVTFVCRGPVGVQTFRLERESRSTYNDTEDVSQASPSESEARFRIDSKPLEARTPRTQSPAPQLDPRRGRRTTVTMSMHLLPKA

SEQ ID NO: 3203 - protein, 136 aa, Artificial Sequence
  Synthetic polypeptide
PGLLQPRLLRTHLTKQHRLQHPVSPSWLQIQPSRAQSPLPRPTKSWPRSRRPPLVYPVTHRGLQPWLSKSQAQSTLPWLEEAAQATLLPPSRAPRAQKVQTPLQLQPPQPQLNLTPQAARMEQKIQQTLGGKAATV

SEQ ID NO: 3204 - protein, 136 aa, Artificial Sequence; identical to SEQ ID NO: 3203
  Synthetic polypeptide

SEQ ID NO: 3205 - protein, 136 aa, Artificial Sequence; identical to SEQ ID NO: 3203
  Synthetic polypeptide

SEQ ID NO: 3206 - protein, 136 aa, Artificial Sequence; identical to SEQ ID NO: 3203
  Synthetic polypeptide

SEQ ID NO: 3207 - protein, 136 aa, Artificial Sequence; identical to SEQ ID NO: 3203
  Synthetic polypeptide

SEQ ID NO: 3208 - protein, 135 aa, Artificial Sequence
  Synthetic polypeptide
PCGTTTDDILVASAECPSDDEDIDPCEPSSGGLANPTRAGGREPYPGSAEVIRESSSTTGMVVGIVAAAALCILILLYAMYKYRNRDEGSYHVDESRNYISNSAQSNGAVVKEKQPSSAKSSNKNKKNKDKEYYV

SEQ ID NO: 3209 - protein, 135 aa, Artificial Sequence; identical to SEQ ID NO: 3208
  Synthetic polypeptide

SEQ ID NO: 3210 - protein, 135 aa, Artificial Sequence; identical to SEQ ID NO: 3208
  Synthetic polypeptide

SEQ ID NO: 3211 - protein, 135 aa, Artificial Sequence; identical to SEQ ID NO: 3208
  Synthetic polypeptide

SEQ ID NO: 3212 - protein, 135 aa, Artificial Sequence; identical to SEQ ID NO: 3208
  Synthetic polypeptide

SEQ ID NO: 3213 - protein, 135 aa, Artificial Sequence; identical to SEQ ID NO: 3208
  Synthetic polypeptide

SEQ ID NO: 3214 - protein, 135 aa, Artificial Sequence; identical to SEQ ID NO: 3208
  Synthetic polypeptide

SEQ ID NO: 3215 - protein, 135 aa, Artificial Sequence; identical to SEQ ID NO: 3208
  Synthetic polypeptide

SEQ ID NO: 3216 - protein, 135 aa, Artificial Sequence; identical to SEQ ID NO: 3208
  Synthetic polypeptide

SEQ ID NO: 3217 - protein, 135 aa, Artificial Sequence; identical to SEQ ID NO: 3208
  Synthetic polypeptide

SEQ ID NO: 3218 - protein, 135 aa, Artificial Sequence
  Synthetic polypeptide
EAKTGGSLEARNSRQHGAPGNWRPLHTWLPFLQSNPVPSSCIIRPSQHPSPAHQCRHCLPPAEEAQRPCGPPRMAGEPPRLPLSPGPRATTAASGQQSQDLHPHQQHLRLHRRPLRARSLRCHRGPEGCMGPRSS

SEQ ID NO: 3219 - protein, 135 aa, Artificial Sequence; identical to SEQ ID NO: 3218
  Synthetic polypeptide

SEQ ID NO: 3220 - protein, 135 aa, Artificial Sequence
  Synthetic polypeptide
QIRKLAGGVILGVALWLRHDPQTTNLLYLELGDKPAPNTFYVGIYILIAVGAVMMFVGFLGCYGAIQESQCLLGTFFTCLVILFACEVAAGIWGFVNKDQIAKDVKQFYDQALQQAVVDDDANNAKAVVKTFHET

SEQ ID NO: 3221 - protein, 135 aa, Artificial Sequence
  Synthetic polypeptide
MGRSTGQESQERGIQALTLTLTFWQVQPRSPVHRLFHPGDSAPRWPGHHRLLPVPAAGPAGQTDSHLPEPAAGEPAHEASQASQACEQDAHGHPAADAGAAHGSPAPGAHAECHQVWQHDRGPCDAPAPGSGQKL

SEQ ID NO: 3222 - protein, 135 aa, Artificial Sequence
  Synthetic polypeptide
SQHFRRPRQADHLGSGVRDQPGQHGLPGTHDHRHPPGLPRPLARHSGPALHQHWGPGALQESQAGGHRRGPPHSGRYLRDGGHLLVRLQHHPGLLRPLVPRNQVRAGPRPLPGVERLTDLHPGWPLPLLRLLLRL

SEQ ID NO: 3223 - protein, 135 aa, Artificial Sequence; identical to SEQ ID NO: 3222
  Synthetic polypeptide

SEQ ID NO: 3224 - protein, 134 aa, Artificial Sequence
  Synthetic polypeptide
KECTFSRNCTWNLEWRSSIGLVICSMILFGDACTAPSQPRKHKIMMLKMIFNQTSVEHCKTHTEKQKECNFFLIAVRLASLNQILDPWVYLLLRKILLRKFCQIRYHTNNYASSSTSLPCQCSSTLMWSDHLER

SEQ ID NO: 3225 - protein, 134 aa, Artificial Sequence; identical to SEQ ID NO: 3224
  Synthetic polypeptide

SEQ ID NO: 3226 - protein, 134 aa, Artificial Sequence; identical to SEQ ID NO: 3224
  Synthetic polypeptide

SEQ ID NO: 3227 - protein, 134 aa, Artificial Sequence
  Synthetic polypeptide
GAGAEGVSVLTTLERRFNLQSADVGVIASSFEIGNLALILFVSYFGARGHRPRLIGCGGIVMALGALLSALPEFLTHQYKYEAGEIRWGAEGRDVCAANGSGGDEGPDPDLICRNRTATNMMYLLLIGAQVLLG

SEQ ID NO: 3228 - protein, 134 aa, Artificial Sequence
  Synthetic polypeptide
RAAPPLPPPRAVGWSCLPWSRAVGMERKGCAVRPHQSDPDAWNRPCGAGPDGGRGDVHPGVRRLRGGSAGEYLLAQLFLWHHRAHLLPGAGCGRAGLPVPGLGEGPVPGVLREQHQVLPGRYRSAKPHRLPSES

SEQ ID NO: 3229 - protein, 134 aa, Artificial Sequence; identical to SEQ ID NO: 3228
  Synthetic polypeptide

SEQ ID NO: 3230 - protein, 134 aa, Artificial Sequence; identical to SEQ ID NO: 3228
  Synthetic polypeptide

SEQ ID NO: 3231 - protein, 134 aa, Artificial Sequence
  Synthetic polypeptide
PGQQEMNTALRDGLLVFFFLIVPLIVCAIFIFIKRDQLWRSYFRKKRSQTYESDGKNQANPSRQPGSVPRHVSPVTPPREVPIYANRFAVPTYAAKQPQQFPSRPPPPQPKVSSQGNLIPARPAPAPPLYSSLT

SEQ ID NO: 3232 - protein, 134 aa, Artificial Sequence
  Synthetic polypeptide
SGSWMAVLKQVLHMRTFSPAHGEMRKIRTTKGGVYKECVCENYKLAVNCFVNNNRQCQCTSVGAQNTVICSKLAAKCLVMKAEMNGSKLGRRAKPEGALQNNDGLYDPDCDESGLFKAKQCNGTSMCWCVNTAG

SEQ ID NO: 3233 - protein, 134 aa, Artificial Sequence
  Synthetic polypeptide
VPVLPVAHKLYEARANPCQPQLSSLQDGGCSPSLWSMLCRSTESACQAHSSVHRHRHEAAAPCQSRDPPGHAPPPLPGLPGGAGKPGTHLPAHQCQPVLPAGYPGGAGLRAHRSQPSEAGPTAEAADCARHPAL

SEQ ID NO: 3234 - protein, 134 aa, Artificial Sequence; identical to SEQ ID NO: 3233
  Synthetic polypeptide

SEQ ID NO: 3235 - protein, 134 aa, Artificial Sequence; identical to SEQ ID NO: 3233
  Synthetic polypeptide

SEQ ID NO: 3236 - protein, 134 aa, Artificial Sequence
  Synthetic polypeptide
RAAICTGIGIGFYGNSETSDGVSQLSSALLHANHTLSTIDHLVLETVERLGEAVRTELTTLEEVLEPRTELVAAARGARRQAEAAAQQLQGLAFWQGVPLSPLQVAENVSFVEEYRWLAYVLLLLLELLVCLFT

SEQ ID NO: 3237 - protein, 134 aa, Artificial Sequence
  Synthetic polypeptide
SQESQKERDSAQARLKSRHSPPCAGVFGQDLYPVQDSDQVQGQHLHVLHIPHGGHLGPEHHHRQQADRHGTPGGRAGPSVHGRGRAQHIQHGHRAWQGPGPAARRARPTCSGHRLCGLLAALPRAAPHVLLHLG

SEQ ID NO: 3238 - protein, 134 aa, Artificial Sequence
  Synthetic polypeptide
TECDLSIRSSYQEERALPLATTRMGRGDVTLSGGSQTGKAVQLAMPLAGNARGGEVRGAPYTLAVARAWGTRNQERLLNVGVGLEILRHQPLAHRPALHVAVLRANGHRAHVQVPPPGTCHQATVSFFIFHLFL

SEQ ID NO: 3239 - protein, 134 aa, Artificial Sequence
  Synthetic polypeptide
EAKTGGSLEARNSRQHEPADFSQDPPKPSLSSQQAVYGHVHLGTGDPYTPGFPSFNQTQFPPVASSGLPSIPAQPISADIASRLLRLECSGAILAHCNLHLPGSSDSSASDSRVSRITGSSKALWPPKNGRGAS

SEQ ID NO: 3240 - protein, 134 aa, Artificial Sequence
  Synthetic polypeptide
KDDQKQFAFTRYLDLLKDTNLIKTQDVFTVIRYISYNSYGKNMAWNWIQLNWDYLVNRYTLNNRNLGRIVTIAEPFNTELQLWQMESFFAKYPQAGAGEKPREQVLETVKNNIEWLKQHRNTIREWFFNLLESG

SEQ ID NO: 3241 - protein, 134 aa, Artificial Sequence
  Synthetic polypeptide
ARHRKKNFAQSHLYEIKKSFGQRVYFAAEDTDCCTRNCCGPSRPFTLRIIDNMGQEVITLERPLRCSSCCCPCCLQEIEIQAPPGVPIGYVIQTWHPCLPKFTIQNEKREDVLKISGPCVVCSCCGDVDFEIKS

SEQ ID NO: 3242 - protein, 133 aa, Artificial Sequence
  Synthetic polypeptide
QLGLVEGMWDLKAGQPEFQSCLLLTSFMRRELTPASLSCLLCKMEVAAPVSGACYADPPRVPARHTVVCTGTDMKLRLPASPETHLDMLRHLYQGCQVVQGNLELTYLPTNASLSFLQVRPVGNPARPCLQLG

SEQ ID NO: 3243 - protein, 133 aa, Artificial Sequence
  Synthetic polypeptide
KPLLNEIKEDTNKWKNIPCSWIGRINIVKMAILPKALAANAGTGFAVAEPQIAMFCGKLNMHVNIQTGKWEPDPTGTKSCFETKEEVLQYCQEMYPELQITNVMEANQRVSIDNWCRRDKKQCKSRFVTPFKC

SEQ ID NO: 3244 - protein, 133 aa, Artificial Sequence
  Synthetic polypeptide
QENKLGAPIDSTLCFSQMPTSSVKDETNDNITIFTRILDGLLDGYDNRLRPGLGERITQVRTDIYVTSFGPVSDTEMEYTIDVFFRQSWKDERLRFKGPMQRLPLNNLLASKIWTPDTFFHNGKKSIAHNMTT

SEQ ID NO: 3245 - protein, 133 aa, Artificial Sequence
  Synthetic polypeptide
PGAVAHPCNPSTLGGQGGQITRNLAIGIGIQNFPEGLAVSLPLRGAGFSTWRAFWYGQLSGMVEPLAGVFGAFAVVLAEPILPYALAFAAGAMVYVVMDDIIPEAQISGNGKLASWASILGFVVMMSLDVGLG

SEQ ID NO: 3246 - protein, 133 aa, Artificial Sequence; identical to SEQ ID NO: 3245
  Synthetic polypeptide

SEQ ID NO: 3247 - protein, 132 aa, Artificial Sequence
  Synthetic polypeptide
KECTFSRNCTWNLEWRSSIGLVICSMILFGDACTAPSQPRKHKIMMLKMIFNQTSVEHCKTHTEKQKECNFFLIAVRLASLNQILDPWVYLLLRKILLRKFCQVANAVSSCSNDGQKGQPISLSNEIIQTEA

SEQ ID NO: 3248 - protein, 132 aa, Artificial Sequence
  Synthetic polypeptide
GWEFKTSLASMLILFGLSNQLAVTFREENTIAFRHLFLLGYSDGADDTFAAYTREQLYQAIFHAVDQYLALPDVSLGRYAYVRGGGDPWTNGSGLALCQRYYHRGHVDPANDTFDIDPMVVTGWSMSPSTSG

SEQ ID NO: 3249 - protein, 132 aa, Artificial Sequence
  Synthetic polypeptide
QPGVAEGAGLSSGQAQIQAQPPLRWSLWAGPLPCPGLGSGQHLHVLHIPHGGHLGPEHHHRQQADRHGTPGGRAGPSVHGRGRAQHIQHGHRAWQGPGPAARRARPTCSGHRLCGLLAALPRAAPHVLLHLG

SEQ ID NO: 3250 - protein, 132 aa, Artificial Sequence
  Synthetic polypeptide
LPLTRSSPKRHHFQRQRAASESTEQEEGDAPQEDFIQYIARAGDAVAFPHPRPFLASPPPALGRYFSVDGGARGGPVGPCPPSPPPRRPRERSPGPVDTRSPASSGKAPPRGGLTGATSPAWTRGGKQGETG

SEQ ID NO: 3251 - protein, 132 aa, Artificial Sequence; identical to SEQ ID NO: 3250
  Synthetic polypeptide

SEQ ID NO: 3252 - protein, 131 aa, Artificial Sequence
  Synthetic polypeptide
RDIRDEDEGGRALEPKRISSNIASAPSRQCDSGQVACLLWAATSFHHCKRRQRERDYGAALRGLCEDALEGLLFLLLFSLLSAGALATALCSLPRAWALFPPSDDYDDTDDDDPFNPQQESKRFVQWQSSI

SEQ ID NO: 3253 - protein, 131 aa, Artificial Sequence
  Synthetic polypeptide
MGTVADACNPALWEAEKIFVIITFSKHIVEQMVAFIGLEDNGALQPPPPSAVPGIGPSLQKPFQEYLEAQRQKLHHKSEMGTPQGENWLSWMFEKLVVVMVCYFILSIINSMAQSYAKRIQQRLNSEEKTK

SEQ ID NO: 3254 - protein, 131 aa, Artificial Sequence
  Synthetic polypeptide
GDQGEFPRAMGTSHPAFLVLGCLLTGLSLILCQLSLPSILPNENEKVVQLNSSFSLRCFGESEVSWQYPMSEEESSDVEIRNEENNSGLFVTVLEVSSASAAHTGLYTCYYNHTQTEENELEGRHIYIYVP

SEQ ID NO: 3255 - protein, 131 aa, Artificial Sequence
  Synthetic polypeptide
GSFPCSCLLSLACCHVRHASSPFAMSLSFLRPPQPCRTVLTSVARLSSKSVNAQVTDINSKGLELRKTVTTVETQNLEGLHHDGQFCHKPCPPDVNMESSRNAHSPATPSAKRKDPDLTWGGFVFFFCQFH

SEQ ID NO: 3256 - protein, 131 aa, Artificial Sequence
  Synthetic polypeptide
LRSCLVDRQQFQCEWTPTCFEGYYFDQTRPSLFLQPAAPGPGGGVGTASDATLRHPRIRWLRSVDQGRLGSGCGQGPLKLPTVPGGREPPVRGAPPEDPEGRAARRCGVRVPGHPGRHPLPPRTPHSPGAA

SEQ ID NO: 3257 - protein, 131 aa, Artificial Sequence; identical to SEQ ID NO: 3256
  Synthetic polypeptide

SEQ ID NO: 3258 - protein, 131 aa, Artificial Sequence; identical to SEQ ID NO: 3256
  Synthetic polypeptide

SEQ ID NO: 3259 - protein, 131 aa, Artificial Sequence
  Synthetic polypeptide
KSPVDMESQYLDLILTVLQKDKTSALSLSNVAGVFYILIGGLGLAMLVALIEFCYKSRSESKRMKGFCLIPQQSINEAIRTSTLPRNSGAGASSGGSGENGRVVSHDFPKSMQSIPCMSHSSGMPLGATGL

SEQ ID NO: 3260 - protein, 131 aa, Artificial Sequence; identical to SEQ ID NO: 3259
  Synthetic polypeptide

SEQ ID NO: 3261 - protein, 131 aa, Artificial Sequence; identical to SEQ ID NO: 3259
  Synthetic polypeptide

SEQ ID NO: 3262 - protein, 131 aa, Artificial Sequence; identical to SEQ ID NO: 3259
  Synthetic polypeptide

SEQ ID NO: 3263 - protein, 131 aa, Artificial Sequence; identical to SEQ ID NO: 3259
  Synthetic polypeptide

SEQ ID NO: 3264 - protein, 131 aa, Artificial Sequence; identical to SEQ ID NO: 3259
  Synthetic polypeptide

SEQ ID NO: 3265 - protein, 131 aa, Artificial Sequence
  Synthetic polypeptide
MGRSTGQESQERGIQALTLTLTFWQVQPRSPVHRLFHPGDSAPRWPGHHRLLPVPAAGPAGQTDSHLPEPAAGEPAHEASQASQACEQDAHGHPAADAGAAHGSPAPGAHAECHQVWQHDRGPCDAPAPEC

SEQ ID NO: 3266 - protein, 131 aa, Artificial Sequence; identical to SEQ ID NO: 3265
  Synthetic polypeptide

SEQ ID NO: 3267 - protein, 131 aa, Artificial Sequence; identical to SEQ ID NO: 3265
  Synthetic polypeptide

SEQ ID NO: 3268 - protein, 131 aa, Artificial Sequence
  Synthetic polypeptide
MGRSTGQESQERGIQALTLTLTFWQVQPRSPVHRLFHPGDSAPRWPGHHRLLPVPAAGPAGQTDSHLPEPAAGEPAHEASQASQACEQDAHGHPAADAGAAHGSPAPGAHAECHQVWQHDRGPCDAPAPVL

SEQ ID NO: 3269 - protein, 131 aa, Artificial Sequence
  Synthetic polypeptide
WGASLLPSGAPFPHITLEREPDPGMASASTTMHTTTIAEPDPGMSGWPDGRMETSTPTIMDIVVIAGVIAAVAIVLVSLLFVMLRYMYRHKGTYHTNEAKGTEFAESADAALQGDPALQDAGDSSRKEYFI

SEQ ID NO: 3270 - protein, 131 aa, Artificial Sequence
  Synthetic polypeptide
QLTLEQHRFELHGSIYTHISSTSATPKIARPTPSLFLSLPPPQPTQCEDDEDENLCDDPLPLNECVHRHRHEAAAPCQSRDPPGHAPPPLPGLPGGAGKPGTHLPAHQCQPVLPAGEARGQPSQALPPAGL

SEQ ID NO: 3271 - protein, 131 aa, Artificial Sequence
  Synthetic polypeptide
HLTQCLHTFIFPITLAEVVLRPHSYPSKKTGLTLLAAASIAYISRILWLYFETGTWVYPVFAKLSLLGLAAFFSLSYVFIASIYLLGEKLNHWKWVSVQILQRWRLESVGICFQWPDWKSPAKHQLVKNIR

SEQ ID NO: 3272 - protein, 130 aa, Artificial Sequence
  Synthetic polypeptide
RDIRDEDEGGRALEPKRISSNIASAPSRQCDSGQVACLLWAATSFHHCKRRQRERDYGAALRGLCEDALEGLLFLLLFSLLSAGALATALCSLPRAWALFPPSDDYDDTDDDDPFNPQESKRFVQWQSSI

SEQ ID NO: 3273 - protein, 130 aa, Artificial Sequence
  Synthetic polypeptide
KKKRKKMWYMSTMEYYTAIKKDGIMSFAPTRMELEAIILSKIESQIPHVLTYKWNLNSRYTKIGIMDSGDYKRSPGCASSSATRGARPARGHRGAAVPPAATCSWTVHLPGDLAAPRCTCEPPECGRLPP

SEQ ID NO: 3274 - protein, 130 aa, Artificial Sequence; identical to SEQ ID NO: 3273
  Synthetic polypeptide

SEQ ID NO: 3275 - protein, 130 aa, Artificial Sequence
  Synthetic polypeptide
SPLLRRPRWEDPLSPGVQDQPVQYGETSSPQKIKESARRGGAHLQSLLLRRLSTSRWSSTCPSTSCQLTSARRSTTTMSTVTRARCLTRTASWASSTGPCGRRSSTSTAGSWWPPCRCSPTPTPTSSRPC

SEQ ID NO: 3276 - protein, 130 aa, Artificial Sequence
  Synthetic polypeptide
GAPLPGRPYWEVRSPSARPAAPSGREVGGSAPRPASRPVREGGWGGSAPNPASRPVREETSWCYGQLAAQPCSNLSPTGSLKTWPARGFVPAWSVCPSTSSSAPVLTVAGGSTPCSSARSSNFCTKYSAL

SEQ ID NO: 3277 - protein, 130 aa, Artificial Sequence; identical to SEQ ID NO: 3276
  Synthetic polypeptide

SEQ ID NO: 3278 - protein, 130 aa, Artificial Sequence
  Synthetic polypeptide
PGTVAHACNPSTLGGQSGWPQALWEATSPETIGRRVAVGLGSCLAILILAICGLKLQRRDAESSEMQRPPPDCDDTVTYSALHKRQVGDYENVIPDFPEDEGIHYSELIQFGVGERPQAQENVDYVILKH

SEQ ID NO: 3279 - protein, 130 aa, Artificial Sequence
  Synthetic polypeptide
PGAVAHTCNPSTWRGQCRRIICSQSFEGNNNYDTPELRTFPALSTRFIRIYPERATHGGLGLRMELLGCEVEAPTAGPTTPNGNLVDECDDDQANCHSGTGDDFQLTGGTTVLATEKPTVIDSTIQSGIK

SEQ ID NO: 3280 - protein, 130 aa, Artificial Sequence
  Synthetic polypeptide
STPTRGQLESKQTSSAAGDYKGRCLQSPPVPVPQTRALQGPSARLPRVVAIPVGPWSPGAVPPSHATTALCVCPRVQIPPASAATACRVSRAHAASWTSMSVHPGRATMGPPAATWPIATSAIAPLAMQA

SEQ ID NO: 3281 - protein, 130 aa, Artificial Sequence; identical to SEQ ID NO: 3280
  Synthetic polypeptide

SEQ ID NO: 3282 - protein, 130 aa, Artificial Sequence
  Synthetic polypeptide
FIHTILLSGGAGAAPCYDADGPRGRHAQWREPDGEGRAACDALGRKCPGRGSPWSPVHPGGGQGLGDQEPGAPAERRGRPGDSTPPTSRAQTCTPRGSTTSERSPCPCTGTAAGHLPPSNCFIFYFPFVL

SEQ ID NO: 3283 - protein, 129 aa, Artificial Sequence
  Synthetic polypeptide
LVLVETGFCCDGRAGLQPLTASDPPALASRGAGIADGLSFTQCSMQAVVDDDANNAKAVVKTFHETLDCCGSSTLTALTTSVLKNNLCPSGSNIISNLFKEDCHQKIDDLFSGKLYLIGIAAIVVAVIM

SEQ ID NO: 3284 - protein, 129 aa, Artificial Sequence
  Synthetic polypeptide
NPVSTKNRKISRAWWVYSGLPGTHDHRHPPGLPRPLARHSGPALHQHWGPGALQESQAGGHRRGPPHSGRYLRDGGHLLVRLQHHPGLLRPLVPRNQVRAGPRPLPGVERLTDLHPGWPLPLLRLLLRL

SEQ ID NO: 3285 - protein, 129 aa, Artificial Sequence; identical to SEQ ID NO: 3284
  Synthetic polypeptide

SEQ ID NO: 3286 - protein, 129 aa, Artificial Sequence
  Synthetic polypeptide
LPLILHYAWGRAAAAMLFCGFIILVICFILSFFALCGPQMLVFLRVIGGLLALAAVFQIISLVIYPVKYTQTFTLHANPAVTYIYNWAYGFGWAATIILIGCAFFFCCLPNYEDDLLGNAKPRYFYTSA

SEQ ID NO: 3287 - protein, 129 aa, Artificial Sequence
  Synthetic polypeptide
GTSAKSQDTKSMCKNHNHSYTPIIDKQPIMSEIPFTFTLKRIKYLGSRLTRDVKDLFKENYKPLLNEIKEDRNKWKNIPRSWIGRINIMKMAILPKAALFLGLGVLFSLVSIPLVIYDWACSSSSDEGH

SEQ ID NO: 3288 - protein, 129 aa, Artificial Sequence; identical to SEQ ID NO: 3287
  Synthetic polypeptide

SEQ ID NO: 3289 - protein, 129 aa, Artificial Sequence; identical to SEQ ID NO: 3287
  Synthetic polypeptide

SEQ ID NO: 3290 - protein, 129 aa, Artificial Sequence; identical to SEQ ID NO: 3287
  Synthetic polypeptide

SEQ ID NO: 3291 - protein, 129 aa, Artificial Sequence
  Synthetic polypeptide
GAPLPGRPYWEVRSPSARPAAPSGREVGGSAPAWPAAPPGREVGGSAPRPASRPAREETSWCYGQLAAQPCSNLSPTGSLKTWPARGFVPAWSVCPSTSSSAPVLTVAGGSTPCSSARSSNFCTKYSAL

SEQ ID NO: 3292 - protein, 129 aa, Artificial Sequence; identical to SEQ ID NO: 3291
  Synthetic polypeptide

SEQ ID NO: 3293 - protein, 129 aa, Artificial Sequence
  Synthetic polypeptide
TECDLSIRSSYQEERALPLATTRMGRGDVTLSGGSQTGKAVQLAMPLAGNARGGEVRGAPYTLAVARAWGTRNQERLLNVGVGLEILRHQPLAHRPALHVAVLRANGHRAHVQTYPPAEPAGAAEEPQE

SEQ ID NO: 3294 - protein, 129 aa, Artificial Sequence; identical to SEQ ID NO: 3293
  Synthetic polypeptide

SEQ ID NO: 3295 - protein, 129 aa, Artificial Sequence; identical to SEQ ID NO: 3293
  Synthetic polypeptide

SEQ ID NO: 3296 - protein, 129 aa, Artificial Sequence
  Synthetic polypeptide
STKLEIRNTRNLTYIDPDALKELPLLKFLGIFNTGLKMFPDLTKVYSTDIFFILEITDNPYMTSIPVNAFQGLCNETLTLKLYNNGFTSVQGYAFNGTKLDAVYLNKNKYLTVIDKDAFGGVYSGPSLL

SEQ ID NO: 3297 - protein, 128 aa, Artificial Sequence
  Synthetic polypeptide
VVPGRQQLGVMGQATPRPKLRQRNRPPWLPTRSPTLLALWPGSWLRTSTSQVRNIRSAGCCRRSWRTRRACWSPPTGAPAQRASHSRPARARSCTSVRPLGPRVAPRHRPGRPRSPSGPGPGCPRTAC

SEQ ID NO: 3298 - protein, 128 aa, Artificial Sequence
  Synthetic polypeptide
QTIIGGREKEEVWVLIHWLPYCKLPSGWLHCLAEALGSNLHVEVKGYEDGGIHLECRSTGWYPQPQIQWSNAKGENIPAVEAPVVADGVGLYEVAASVIMRGGSGEGVSCIIRNSLLGLEKTASISIA

SEQ ID NO: 3299 - protein, 128 aa, Artificial Sequence
  Synthetic polypeptide
PWISRPPEWADCCDIGRMLDAQPDSEDHGCGQTQARLDEVLLPGVHDPPPLLGDVFLPQLGHQPAPVHGVLAAVSAGVRAGAVLPPVAAARQPREAPARTCALHHRQRPLCAAPVALRVPAPVLCKEN

SEQ ID NO: 3300 - protein, 128 aa, Artificial Sequence
  Synthetic polypeptide
QVQWLTPVIPALGEANAGGSFAASLLRATTTMIHLSCGLFQLSPRDSSGSTPREPLMADWGSEWSCWAVKWKPLQLDRPLPTGTWWMNVMTTRPTATVEQVMTSSSQVQKPSSSHCCTISVHVLVGTS

SEQ ID NO: 3301 - protein, 128 aa, Artificial Sequence
  Synthetic polypeptide
GQEFETSLANLEIYKDRQKFSEQVFKVASSDLVNMGISVVSYTLKDIHDDQDYLHSLGKARTAQVQKDARIGEAEAKRDAGIREAKAKQEKVSAQYLSEIEMAKAQRDYELKKAAYDIEVNTRRAQAD

SEQ ID NO: 3302 - protein, 128 aa, Artificial Sequence
  Synthetic polypeptide
TLLPQVVRNMTSEFFAAQLRAQISDDTTHPISYYKPEFYTPDDGGTAHLSVVAEDGSAVSATSTINLYFGSKVRSPVSGILFNNEMDDFSSPSITNEFGVPPSPANFIQPGKQPLSSMCPTIMVGQDG

SEQ ID NO: 3303 - protein, 127 aa, Artificial Sequence
  Synthetic polypeptide
LLPGGAWGRAAAAMLFCGFIILVICFILSFFALCGPQMLVFLRVIGGLLALAAVFQIISLVIYPVKYTQTFTLHANPAVTYIYNWAYGFGWAATIILIGCAFFFCCLPNYEDDLLGNAKPRYFYTSA

SEQ ID NO: 3304 - protein, 127 aa, Artificial Sequence
  Synthetic polypeptide
PGAVAHTCNPSTWRGQCRRIICSQSFEGNNNYDTPELRTFPALSTRFIRIYPERATHGGLGLRMELLGCEVEGTINTDQECPCARALAKDAKKKKRWADSTHCRCVRSIHGEMWSSGKGVCSLDANL

SEQ ID NO: 3305 - protein, 127 aa, Artificial Sequence
  Synthetic polypeptide
QVQWLTPVIPALGEANAGGSFAASLLRATTTMIHLSCGLFQLSPRDSSGSTPREPLMADWGSEWSCWAVKWKALSTQTKNVHVPGLWQRMPRKRRDGQTPLTADAFVQFTEKCGHLEKESAPWMRIC

SEQ ID NO: 3306 - protein, 127 aa, Artificial Sequence
  Synthetic polypeptide
VSVSTPDSGSWRKGLSGSSPKPASQAPLPSSLLSLSATTTKPTLPSGTGATTVTRTMNFTFATQASRTCMPWSSWALASSWSSCSVTASAAWASPSSWPPLPCSGPHWSRAFSTPSTVATSMLAWRA

SEQ ID NO: 3307 - protein, 127 aa, Artificial Sequence; identical to SEQ ID NO: 3306
  Synthetic polypeptide

SEQ ID NO: 3308 - protein, 126 aa, Artificial Sequence
  Synthetic polypeptide
SLGLSLLFCKMGRTEASTPPPGCWKGPTRQQPGLPPHCQHRGQEAVPHGGHGLPLHPVLRGAPPCLQWTRLVCAVLHASRHPGVFQCLRDSPEHVGLADGTGRLRRTQEVNICDVRRPDHCCADLP

SEQ ID NO: 3309 - protein, 126 aa, Artificial Sequence
  Synthetic polypeptide
LNLTFIYKTWSDVEGQRPALLICTAAAGPTQGVKAYPDATMHRQLLAPVEGRMAETLNQKLHVANVLEDDPGYLPHVYSEEGECGGAPSLSSLASLEQELQPDLLDSLGSKATPFEEIYSESGVPS

SEQ ID NO: 3310 - protein, 126 aa, Artificial Sequence
  Synthetic polypeptide
GQEIETILANKVVTLTANDKTSVSFSSLPGQGVIYNVIVWDPFLNTSAAYIPAHTYACSFEAGEGSCASLGRVSSKVFFTLFALLGFFICFFGHRFWKTELFFIGFIIMGFFFYILITRLTPIKYD

SEQ ID NO: 3311 - protein, 126 aa, Artificial Sequence; identical to SEQ ID NO: 3310
  Synthetic polypeptide

SEQ ID NO: 3312 - protein, 126 aa, Artificial Sequence
  Synthetic polypeptide
PWLNHSLPWTSVFPAVKWLYVQARLCWKWARLLRPTVQFFLVAFALYVGYTRVSDYKHHWSDVLVGLLQGALVAALTVCYISDFFKARPPQHCLKEEELERKPSLSLTLTLGEADHNHYGYPHSSS

SEQ ID NO: 3313 - protein, 126 aa, Artificial Sequence; identical to SEQ ID NO: 3312
  Synthetic polypeptide

SEQ ID NO: 3314 - protein, 126 aa, Artificial Sequence; identical to SEQ ID NO: 3312
  Synthetic polypeptide

SEQ ID NO: 3315 - protein, 126 aa, Artificial Sequence
  Synthetic polypeptide
LDMVIRGGSHTDPAGARRKVPAGSGLRGGRVPWGGAARGTWRPPALPAAAGRALRPGARLWRAGGARRRARRGGLFREPDDAGGGILVLLQGPGEGRGHRRAEGGRSGSGPRARPAAPQTRQPVPR

SEQ ID NO: 3316 - protein, 126 aa, Artificial Sequence; identical to SEQ ID NO: 3315
  Synthetic polypeptide

SEQ ID NO: 3317 - protein, 126 aa, Artificial Sequence; identical to SEQ ID NO: 3315
  Synthetic polypeptide

SEQ ID NO: 3318 - protein, 126 aa, Artificial Sequence; identical to SEQ ID NO: 3315
  Synthetic polypeptide

SEQ ID NO: 3319 - protein, 126 aa, Artificial Sequence
  Synthetic polypeptide
KYKKISQAWWCMPVIPAIREAESEYHYEYTACDSTGSRWRVAVPHTPGLCTSLPDPIKGTECSFSCNAGEFLDMKDQSCKPCAEGRYSLGTGIRFDEWDELPHGFASLSANMELDDSAAESTGNCT

SEQ ID NO: 3320 - protein, 126 aa, Artificial Sequence
  Synthetic polypeptide
ASGISPAHSSLSCQLLKKVLASPSPSAMIVSFLRPPQPCGTLALQGHSRPARKLKAAPTAPPTAAPLQRRLPSAPVGPVITERTLTLQKWHALASHQVPAMLSPSSMRRPSFWSGTLQGRQVGGMM

SEQ ID NO: 3321 - protein, 125 aa, Artificial Sequence
  Synthetic polypeptide
SQHFGRPRWADHEIKRSRPSWPTWCWAVQRRHPADDRAAAQPVLAAVLEAGQPLLSPVRGRGQHCDLQTPPLRSLHLPRLGQRAGLGHRHILHGHGAHLCGLQVLQPAWVLSRETGLRHCTREGP

SEQ ID NO: 3322 - protein, 125 aa, Artificial Sequence; identical to SEQ ID NO: 3321
  Synthetic polypeptide

SEQ ID NO: 3323 - protein, 125 aa, Artificial Sequence
  Synthetic polypeptide
RYTSKNMKLRRHTRNLAIGIGIQNFPEGLAVSLPLRGAGFSTWRAFWYGQLSGMVEPLAGVFGAFAVVLAEPILPYALAFAAGAMVYVVMDDIIPEAQISGNGKLASWASILGFVVMMSLDVGLG

SEQ ID NO: 3324 - protein, 125 aa, Artificial Sequence; identical to SEQ ID NO: 3323
  Synthetic polypeptide

SEQ ID NO: 3325 - protein, 125 aa, Artificial Sequence
  Synthetic polypeptide
LMPVIPALWGTEMADHLRSGVQDQAGQRGELPVSTKNTKISQVCWCMPLVPATQEAKALLLLGAAALACLALDLLFLLFYSFWLCCRRRKSEEHLDADCCCTAWCVIIATLVCSAGIAVGFYGNG

SEQ ID NO: 3326 - protein, 125 aa, Artificial Sequence
  Synthetic polypeptide
EAFPFELGSHSSPSCRPVKKDLFASPSAMVISFLRLPQPCRTVSALERQIFDFLGFQWAPILGNFLHIIVVILGLFGTIQYRPRYIMVDTDLMTFNISVHRSWWREHGPGCVRRVLPPSAHGMMD

SEQ ID NO: 3327 - protein, 125 aa, Artificial Sequence
  Synthetic polypeptide
SPTDQRADCCDIGRMLDAQPDSEDHGCGQTQARLDEVLLPGVHDPPPLLGDVFLPQLGHQPAPVHGVLAAVSAGVRAGAVLPPVAAARQPREAPARTCALHHRQRPLCAAPVALRVPAPVLCKEN

SEQ ID NO: 3328 - protein, 125 aa, Artificial Sequence
  Synthetic polypeptide
AGHDGSHLQSQHFRRPRQEDRLRPGIQGNTVHLGTGDPYTPGFPSFNQTQFPPVASSGLPSIPAQPISADIASRLLRLECSGAILAHCNLHLPGSSDSSASDSRVSRITGSSKALWPPKNGRGAS

SEQ ID NO: 3329 - protein, 125 aa, Artificial Sequence
  Synthetic polypeptide
ENILILRRYILNNLLVMFMFATFIFTGPCESMHVYVYIYRERKNLLWKTERFILGGEYSKSSLLMTCRSSPNSPPKLAEDLCLARSHSPPLTATVQLHPTQIALMMRFLPERSSKPTPRAAAISV

SEQ ID NO: 3330 - protein, 124 aa, Artificial Sequence
  Synthetic polypeptide
SQHFGRPRRADHLRGQEFETTLTNMEEASEGGGNDRVRNLQSEVEGVKNIMTQNVERILARGENLEHLRNKTEDLEATSEHFKTTSQKVARKFWWKNVKMIVLICVIVFIIILFIVLFATGAFS

SEQ ID NO: 3331 - protein, 124 aa, Artificial Sequence
  Synthetic polypeptide
IETWLPPVDVKLTGRLMLAVGGAVLGSLQFGYNTGVINAPQKVIEEFYNQTWVHRYGESILPTTLTTLWSLSVAIFSVGGMIGSFSVGLFVNRFGRRNSMLMMNLLAFVSAVLMGFSKLGKSQT

SEQ ID NO: 3332 - protein, 124 aa, Artificial Sequence
  Synthetic polypeptide
GRVQWLTPIIPTLREAELQAECSRQTQLALEEKAVLRKERDNLAKELEEKKREAEQLRMELAIRNSALDTCIKTKSQPMMPVSRPMGPVPNPQPIDPASLEEFKRKILESQRPPAGIPVAPSSG

SEQ ID NO: 3333 - protein, 124 aa, Artificial Sequence
  Synthetic polypeptide
ELGRKGSEYFIKGPRPASARSQLTRRWWLDSGPCSPVCCSTTLELCNGPRTGWPWAWARASKPGHGTGLWAPQTLGSTTWRSQMLSSLTTPLTSARPRRPPCALGGPNSPCSSPQRTPGLTEAL

SEQ ID NO: 3334 - protein, 124 aa, Artificial Sequence; identical to SEQ ID NO: 3333
  Synthetic polypeptide

SEQ ID NO: 3335 - protein, 124 aa, Artificial Sequence
  Synthetic polypeptide
FIHTILLSGGAGAAPCYDADGPRGRHAQWREPDGEGRAACDALGRKCPGRGSPWSPVHPGGGQGLGDQEPGAPAERRGRPGDSTPPTSRAQTCTPRGSTTSERSPCPCTVRKLKPTGPPDLSPR

SEQ ID NO: 3336 - protein, 124 aa, Artificial Sequence; identical to SEQ ID NO: 3335
  Synthetic polypeptide

SEQ ID NO: 3337 - protein, 124 aa, Artificial Sequence; identical to SEQ ID NO: 3335
  Synthetic polypeptide

SEQ ID NO: 3338 - protein, 124 aa, Artificial Sequence; identical to SEQ ID NO: 3335
  Synthetic polypeptide

SEQ ID NO: 3339 - protein, 124 aa, Artificial Sequence
  Synthetic polypeptide
GQARWLLPVISALWMPRRVDHLRSGVQDQPAQHGPQDRLRALVVIPIIFGILFAILLVLVFIKKVAKKPTNKAPHPKQEPQEINFPDDLPGSNTAAPVQETLHGCQPVTQEDGKESRISVQERQ

SEQ ID NO: 3340 - protein, 123 aa, Artificial Sequence
  Synthetic polypeptide
SQHFGRPRRADHLRGQEFETTLTNMEEASEGGGNDRVRNLQSEVEGVKNIMTQNVERILARGENLEHLRNKTEDLEATPGAEASCFREEVTPKLSKVWSLKFCVQRGGWLWLSESCVNSWLLV

SEQ ID NO: 3341 - protein, 123 aa, Artificial Sequence
  Synthetic polypeptide
LMSVIPALWEAEVGGSLEVSHIPAVHPGSFRPKCDENGNYLPLQCYGSIGYCWCVFPNGTEVPNTRSRGHHNCSESLELEDPSSGLGVTKQDLGPGKGLAEGHLVTSSSSPAGPAPLWAGEGV

SEQ ID NO: 3342 - protein, 123 aa, Artificial Sequence
  Synthetic polypeptide
LGDMWTCVDTFVAARTGGLRSSGHGWPTCCCPTSTGTSPAQSWGPHGCGRCGCRKHSTQTLPAPGSTRARPQEASAPAITTLAGRVLTMARGRGPIQRRICWGHGPGAPVPCMTAGATCRSWA

SEQ ID NO: 3343 - protein, 123 aa, Artificial Sequence; identical to SEQ ID NO: 3342
  Synthetic polypeptide

SEQ ID NO: 3344 - protein, 123 aa, Artificial Sequence
  Synthetic polypeptide
VPVLPVAHKLYEARANPCQPQLSSLQDGGCSPSLWSMLCRSTESACQAHSSVHRHRHEAAAPCQSRDPPGHAPPPLPGLPGGAGKPGTHLPAHQCQPVLPADNYLSTDVGSCTLVCPLHNQEV

SEQ ID NO: 3345 - protein, 123 aa, Artificial Sequence
  Synthetic polypeptide
KYKKISQAWWCMPVIPAIREAESEYHYEYTACDSTGSRWRVAVPHTPGLCTSLPDPIKGTECSFSCNAGEFLDMKDQSCKPCAEGRYSLGTGIRFDEWDELPHGFASLSANMELDDSAAESTG

SEQ ID NO: 3346 - protein, 123 aa, Artificial Sequence
  Synthetic polypeptide
ASFSASVKWGIELERCQQQANEVTEIMRNNFGKVLERGVKLAELQQRSDQLLDMSSTFNKTTQNLAQKKCWENIRYRICVGLVVVGVLLIILIVLLVVFLPQSSDSSSAPRTQDAGIASGPGN

SEQ ID NO: 3347 - protein, 123 aa, Artificial Sequence
  Synthetic polypeptide
DLMVLKRRVSLQKLSLSLPATIHLRCDLLLPAFHYDCEASPAIWNCAKKATKESVVINFCRKLIPSYRIQQTTWGLNSWRVKKFIKGRCCQFHVSSLELSSWACSVQHSTSKARNKLNKSKSS

SEQ ID NO: 3348 - protein, 123 aa, Artificial Sequence; identical to SEQ ID NO: 3347
  Synthetic polypeptide

SEQ ID NO: 3349 - protein, 123 aa, Artificial Sequence; identical to SEQ ID NO: 3347
  Synthetic polypeptide

SEQ ID NO: 3350 - protein, 123 aa, Artificial Sequence; identical to SEQ ID NO: 3347
  Synthetic polypeptide

SEQ ID NO: 3351 - protein, 123 aa, Artificial Sequence; identical to SEQ ID NO: 3347
  Synthetic polypeptide

SEQ ID NO: 3352 - protein, 122 aa, Artificial Sequence
  Synthetic polypeptide
SQYFWRLRWEDPLKPGVQDQPGQHSWMIDSECRPRFRELVSEFSRMARDPQRFVVIQNEDLGPASPLDSTFYRSLLEDDDMGDLVDAEEYLVPQQGFFCPDPAPGAGGMVHHRHRSSSTRNM

SEQ ID NO: 3353 - protein, 122 aa, Artificial Sequence
  Synthetic polypeptide
GRAGWFMPVIPALWDAKVFKVASSDLVNMGISVVSYTLKDIHDDQDYLHSLGKARTAQVQKDARIGEAEAKRDAGIREAKAKQEKVSAQYLSEIEMAKAQRDYELKKAAYDIEVNTRRAQAD

SEQ ID NO: 3354 - protein, 122 aa, Artificial Sequence
  Synthetic polypeptide
IIASPGAFAKMQPALLYLVPACIGFPVLVALAKGEVTEMFSYESSAEILPHTPRLTHFPTVSGSPASLADSMQQKLAGPRRRRPQNPSAIYEESNPKDPAAVTESKEGTEASASKGLEKKEK

SEQ ID NO: 3355 - protein, 122 aa, Artificial Sequence
  Synthetic polypeptide
LATAQDLNITCRFAGVFHVEKNGRYSISRTEAADLCKAFNSTLPTMAQMEKALSIGFETCSLHCSQQSKKVWAEEKASDQQWQWSCGGQKAKWTQRRGQQVSGNGAFGEQGVVRNSRPVYDS

SEQ ID NO: 3356 - protein, 121 aa, Artificial Sequence
  Synthetic polypeptide
SPHVTGGTWWEVTLLAHLTKCPVPPPAGLCHRTPPPRTPTRLPCTLCEVPTPSRARMHSKARTTHSRCMQHLLTSSTTPRWCSPTACLQRCTLLPSPLLEATGSPWAWWLGPPWPCQQVPC

SEQ ID NO: 3357 - protein, 121 aa, Artificial Sequence; identical to SEQ ID NO: 3356
  Synthetic polypeptide

SEQ ID NO: 3358 - protein, 121 aa, Artificial Sequence
  Synthetic polypeptide
VDWEDAGRAVERTLPPAPGNAAAPERLEALKYQRIKKPKKSSKGSSKSKKRSDDSASQTQQLPNSQVLWPDEAVCLRKKKRHSRPDPFARLSDLCHRQLPEDQTAILNSVDHDDPGHATLL

SEQ ID NO: 3359 - protein, 121 aa, Artificial Sequence
  Synthetic polypeptide
ALDRDLNITCRFAGVFHVEKNGRYSISRTEAADLCKAFNSTLPTMAQMEKALSIGFETCSLHCSQQSKKVWAEEKASDQQWQWSCGGQKAKWTQRRGQQVSGNGAFGEQGVVRNSRPVYDS

SEQ ID NO: 3360 - protein, 121 aa, Artificial Sequence
  Synthetic polypeptide
VPVLPVAHKLYEARANPCQPQLSSLQDGGCSPSLWSMLCRSTESACQAHMCTGTDMKLRLPASPETHLDMLRHLYQGCQVVQGNLELTYLPTNASLSFLQTTTFLRTWDPAPSSAPCTTKR

SEQ ID NO: 3361 - protein, 121 aa, Artificial Sequence
  Synthetic polypeptide
NGKKKKKKKPPVHKPWTDGVFFYLSSAVNPIIYNLLSRRFQAAFQNVISSFHKQWHSQHDPQLPPAQRNIFLTECHFVELTEDIGPQFPCQSSMHNSHLPAALSSEQMSRTNYQSFHFNKT

SEQ ID NO: 3362 - protein, 121 aa, Artificial Sequence
  Synthetic polypeptide
CQHFERPRREDHEPVMDDQRDLISNNEQLPMLGRRPGAPESKCSRGALYTGFSILVTLLLAGQATTAYFLYQQQGRLDKLTVTSQNLQLENLRMKLPKPHAECHQVWQHDRGPCDAPAPEC

SEQ ID NO: 3363 - protein, 120 aa, Artificial Sequence
  Synthetic polypeptide
QKADHILFGHRCKERAELQGHEESFGGNGNVLCLVCGGGGFTGKYTYQKLAFETMSVISVVTNCALIGMSPQVNAVFPESKADLILIVVAVEAASCKLVSLPRYSWSTNSVPGTVIGPGV

SEQ ID NO: 3364 - protein, 120 aa, Artificial Sequence
  Synthetic polypeptide
PGREIYKDRQKFSEQVFKVASSDLVNMGISVVSYTLKDIHDDQDYLHSLGKARTAQVQKDARIGEAEAKRDAGIREAKAKQEKVSAQYLSEIEMAKAQRDYELKKAAYDIEVNTRRAQAD

SEQ ID NO: 3365 - protein, 120 aa, Artificial Sequence
  Synthetic polypeptide
QVQWLTPVIPALGEANAGGSFAASLLRATTTMIHLSCGLFQLSPRDSSGSTPREPLMADWGSEWSCWAVKWKPLQLDRPLPTGTWWMNVMTTRPTATVEQVMTSSSQVAPLCWPQKSPRS

SEQ ID NO: 3366 - protein, 120 aa, Artificial Sequence; identical to SEQ ID NO: 3365
  Synthetic polypeptide

SEQ ID NO: 3367 - protein, 120 aa, Artificial Sequence; identical to SEQ ID NO: 3365
  Synthetic polypeptide

SEQ ID NO: 3368 - protein, 120 aa, Artificial Sequence; identical to SEQ ID NO: 3365
  Synthetic polypeptide

SEQ ID NO: 3369 - protein, 120 aa, Artificial Sequence
  Synthetic polypeptide
ARNTWDARRNLAIGIGIQNFPEGLAVSLPLRGAGFSTWRAFWYGQLSGMVEPLAGVFGAFAVVLAEPILPYALAFAAGAMVYVVMDDIIPEAQISGNGKLASWASILGFVVMMSLDVGLG

SEQ ID NO: 3370 - protein, 120 aa, Artificial Sequence; identical to SEQ ID NO: 3369
  Synthetic polypeptide

SEQ ID NO: 3371 - protein, 119 aa, Artificial Sequence
  Synthetic polypeptide
GLPSHVELTMGLSNILFVMAFLLSELEDPQPPPDHIPWITAVLPTVIICVMVFCLILWKWKKKKRPRNSYKCGTNTMEREESEQTKKREKIHIPERSDEAQRVFKSSKTSSCDKSDTCF

SEQ ID NO: 3372 - protein, 119 aa, Artificial Sequence
  Synthetic polypeptide
GALPPGSHPVWDVRSVSARQPPRPGGRWGSAPTRPAAPSGREVGGDQPPARPAAPSGRKVGGPAPRPASRPVWEEPVDPLKEEALLVRLMAHPTSLEKELQLKQSFLWMSFLHLSSLEN

SEQ ID NO: 3373 - protein, 119 aa, Artificial Sequence
  Synthetic polypeptide
IVLPDHLHTFITFSGSNSPSQSPPLPLSLGPLRPLLLDPCSLCSSLGWSLIPLVIKFPPKCLSPHQTVVPGGRGYLVHLQSLPHNGVSLLLPRLECNGTISAHHNLCLPGSSDSPASVS

SEQ ID NO: 3374 - protein, 119 aa, Artificial Sequence; identical to SEQ ID NO: 3373
  Synthetic polypeptide

SEQ ID NO: 3375 - protein, 119 aa, Artificial Sequence; identical to SEQ ID NO: 3373
  Synthetic polypeptide

SEQ ID NO: 3376 - protein, 118 aa, Artificial Sequence
  Synthetic polypeptide
QAQWLMPVIPALWEAQWGFQDVEAQAATCNHTVMALMASLDAEKAQGQKKVEELEGEITTLNHKLQDASAEVERLRRENQVLSVRIADKKYYPSSQDSSSAAAPQLLIVLLGLSALLQ

SEQ ID NO: 3377 - protein, 118 aa, Artificial Sequence
  Synthetic polypeptide
MGTVADACNPALWEAEKIFVIITFSKHIVEQMVAFIGAVPGIGPSLQKPFQEYLEAQRQKLHHKSEMGTPQGENWLSWMFEKLVVVMVCYFILSIINSMAQSYAKRIQQRLNSEEKTK

SEQ ID NO: 3378 - protein, 118 aa, Artificial Sequence; identical to SEQ ID NO: 3377
  Synthetic polypeptide

SEQ ID NO: 3379 - protein, 118 aa, Artificial Sequence; identical to SEQ ID NO: 3377
  Synthetic polypeptide

SEQ ID NO: 3380 - protein, 118 aa, Artificial Sequence; identical to SEQ ID NO: 3377
  Synthetic polypeptide

SEQ ID NO: 3381 - protein, 118 aa, Artificial Sequence; identical to SEQ ID NO: 3377
  Synthetic polypeptide

SEQ ID NO: 3382 - protein, 118 aa, Artificial Sequence
  Synthetic polypeptide
AKISPLHSSLGNSQKTVRTATPFPMVSLFLVFTAFVISNIGHIRPQRTILAFVSGIFFILSGLSLVVGLVLYISSINDEVMNRPSSSEQYFHYRYGWSFAFAASSFLLKEVTSVGPRL

SEQ ID NO: 3383 - protein, 118 aa, Artificial Sequence
  Synthetic polypeptide
KECTFSRNCTWNLEWRSSIGLVICSMILFGDACTAPSQPRKHKIMMLKMIFNQTSVEHCKTHTEKQKECNFFLIAVRLASLNQILDPWVYLLLRKILLRKFCQMRKRRLREQEEFWGN

SEQ ID NO: 3384 - protein, 118 aa, Artificial Sequence
  Synthetic polypeptide
NPGSGQNPGCKSWLCCSLSGFPCDPHYLKHRPGELPADRGGAAGGGPDQGCRRDTPLPAVRRLLPLPAAAHHPGCGLLPATAAVHRKPGHHPDLCRGGHAVERLLPGRPHVRRVPGGR

SEQ ID NO: 3385 - protein, 118 aa, Artificial Sequence; identical to SEQ ID NO: 3384
  Synthetic polypeptide

SEQ ID NO: 3386 - protein, 118 aa, Artificial Sequence
  Synthetic polypeptide
GAPLPSRDPVWEVRSVSARPPRLRSEETLRPAAAPSEKLGASPPGSRPVWEVRSVSARQPPRPGGRWGGSAPRPASRPVRESHGGLAWLSDRGGVPLPAGLLPHRHQLPAQQAHGPQE

SEQ ID NO: 3387 - protein, 118 aa, Artificial Sequence
  Synthetic polypeptide
VQQWLLHFLSLWLWNVRIDPSSLSFNMWKEIPIPFYLSVYFFDVMNPSEILKGEKPQVRERGPYVYREFRHKSNITFNNNDTVSFLEYRTFQFQPSKSHGSESDYIVMPNILVLVRLP

SEQ ID NO: 3388 - protein, 117 aa, Artificial Sequence
  Synthetic polypeptide
SGQHSKTLSLWTTVLASVGQKQLLCLARALLRKTQILILDEATAAVDPGTELQMQAMLGSWFAQCTVLLIAHRLRSVMDCARVLVMDKGQVAESGSPAQLLAQKGLFYRLAQESGLV

SEQ ID NO: 3389 - protein, 117 aa, Artificial Sequence
  Synthetic polypeptide
SQLLGRLKQENCLTPGGGGGGPDRVPPLLPRALRVLLQQHHHPRRHPPGVLPAQPHEDGLLGSAVALHLWHDVLAIRPAFRRVLQLPRQPQHQPQLGQARLPRSDHLHPQSLQVPGN

SEQ ID NO: 3390 - protein, 117 aa, Artificial Sequence; identical to SEQ ID NO: 3389
  Synthetic polypeptide

SEQ ID NO: 3391 - protein, 117 aa, Artificial Sequence; identical to SEQ ID NO: 3389
  Synthetic polypeptide

SEQ ID NO: 3392 - protein, 117 aa, Artificial Sequence; identical to SEQ ID NO: 3389
  Synthetic polypeptide

SEQ ID NO: 3393 - protein, 117 aa, Artificial Sequence; identical to SEQ ID NO: 3389
  Synthetic polypeptide

SEQ ID NO: 3394 - protein, 117 aa, Artificial Sequence; identical to SEQ ID NO: 3389
  Synthetic polypeptide

SEQ ID NO: 3395 - protein, 117 aa, Artificial Sequence
  Synthetic polypeptide
DMVWLCPHPNLILNCSSCNPHMSLEGPGGRLHSWHTLQSVLFPHQRGCATVLLLPEPLPDCRVPCAKCLPPAEPVCTARHVLHTAAVCSTSSRHPPHHGGAAQRHACNGVPCSHPPS

SEQ ID NO: 3396 - protein, 117 aa, Artificial Sequence; identical to SEQ ID NO: 3395
  Synthetic polypeptide

SEQ ID NO: 3397 - protein, 117 aa, Artificial Sequence
  Synthetic polypeptide
HGRSHVKHSAQSLEQERWNHVTTTTKRPVTTRAPANTLGNDFDLADALDDRNDRDDGRRKPIAGGGGFSDKDLEDIVGGGEYKPDKGKGDGRYGSNDDPGSGGFLNPEAPVGHVKGK

SEQ ID NO: 3398 - protein, 117 aa, Artificial Sequence
  Synthetic polypeptide
EHWKLTGRLMLAVGGAVLGSLQFGYNTGVINAPQKVIEEFYNQTWVHRYGESILPTTLTTLWSLSVAIFSVGGMIGSFSVGLFVNRFGRRNSMLMMNLLAFVSAVLMGFSKLGKSQT

SEQ ID NO: 3399 - protein, 117 aa, Artificial Sequence
  Synthetic polypeptide
VPVLPVAHKLYEARANPCQPQLSSLQDGGCSPSLWSMLCRSTESACQAHSSVHRHRHEAAAPCQSRDPPGHAPPPLPGLPGGAGKPGTHLPAHQCQPVLPAGEARGQPSQALPPAGL

SEQ ID NO: 3400 - protein, 117 aa, Artificial Sequence
  Synthetic polypeptide
PLPASVVFFARWRLQPQSLEHVMQIHRECLPGTHVHRHRHEAAAPCQSRDPPGHAPPPLPGLPGGAGKPGTHLPAHQCQPVLPAGYPGGAGLRAHRSQPSEAGPTAEAADCARHPAL

SEQ ID NO: 3401 - protein, 117 aa, Artificial Sequence; identical to SEQ ID NO: 3400
  Synthetic polypeptide

SEQ ID NO: 3402 - protein, 117 aa, Artificial Sequence; identical to SEQ ID NO: 3400
  Synthetic polypeptide

SEQ ID NO: 3403 - protein, 117 aa, Artificial Sequence
  Synthetic polypeptide
SFPRPPDRIILSPLKSVSTLSAPLLWTPHHLQHPDPARPPRREGPDQVLHPEHAAAGPHRLVLEGERSGVGHIGALYGGDHQHRGGRHLHPDHQQHRAGRLPDHLQLHGLEQLRLRH

SEQ ID NO: 3404 - protein, 117 aa, Artificial Sequence; identical to SEQ ID NO: 3403
  Synthetic polypeptide

SEQ ID NO: 3405 - protein, 117 aa, Artificial Sequence; identical to SEQ ID NO: 3403
  Synthetic polypeptide

SEQ ID NO: 3406 - protein, 117 aa, Artificial Sequence
  Synthetic polypeptide
VWPPSPLSCVLFCPSGIGMIQQEGPQQMLSLDLGLPSLQNLCLWRSSERNWEAGLWCRCECHHILHHRPTTGHPSDLCGQNENHGPLAGHAGLCLPGNCCLCCLYCPAGLEACCRGG

SEQ ID NO: 3407 - protein, 117 aa, Artificial Sequence; identical to SEQ ID NO: 3406
  Synthetic polypeptide

SEQ ID NO: 3408 - protein, 117 aa, Artificial Sequence
  Synthetic polypeptide
ADGIGKGTLESGQNAVAQQVLTLLCIRKHTLLANNGFAISAALLMACSLQAGAFEMLIVGRFIMGIDGGVALSVLPMYLSEISPKEIRGSLGQVTAIFICIGVFTGQLLGLPELLGK

SEQ ID NO: 3409 - protein, 117 aa, Artificial Sequence
  Synthetic polypeptide
WARWLMPVIPAFWEAEVGESPEEMHSTATSYTGPGGPQRRVRTALERGRTRGARAFIQPPSRNRPPASRTWRQDPAPARDPAPAPGPATPSLWSGSLLDQAPPSSRGQKGSPKWERS

SEQ ID NO: 3410 - protein, 117 aa, Artificial Sequence; identical to SEQ ID NO: 3409
  Synthetic polypeptide

SEQ ID NO: 3411 - protein, 117 aa, Artificial Sequence; identical to SEQ ID NO: 3409
  Synthetic polypeptide

SEQ ID NO: 3412 - protein, 117 aa, Artificial Sequence; identical to SEQ ID NO: 3409
  Synthetic polypeptide

SEQ ID NO: 3413 - protein, 117 aa, Artificial Sequence
  Synthetic polypeptide
GVGGANKHKPWIEAEYQGIVMENDNTVLLNPPLFALDKDAPLRYAGEICGFRLHGSGVPFEAVILDKATGEGLIRAKEPVDCEAQKEHTFTIQAYDCGEGPDGANTKKSHKATVHVR

SEQ ID NO: 3414 - protein, 116 aa, Artificial Sequence
  Synthetic polypeptide
QKQASEGTHARLSTRHTEFEEREYVVLIRINDGGRPPLEGIVSLPVTFCSCVEGSCFRPAGHQTGIPTVGMAVGILLTTLLVIGIILAVVFIRIKKDKGKDNVESAQASEVKPLRS

SEQ ID NO: 3415 - protein, 116 aa, Artificial Sequence; identical to SEQ ID NO: 3414
  Synthetic polypeptide

SEQ ID NO: 3416 - protein, 116 aa, Artificial Sequence
  Synthetic polypeptide
CQHFGRPRLLLLVVRDQTEHQTWRDLPPTSHQPQKRSWRHRRCPPSSSLWGPRSTAHSRPPTLMLAPHALSRKCLDTMSCPPWKNGQDPCTLEPQAWGPPSRCLQGHLLWKTFPWI

SEQ ID NO: 3417 - protein, 116 aa, Artificial Sequence
  Synthetic polypeptide
FWANDLNYLRLRLLVAKPTTTPAPRPPTPAPTIASQPLSLRPEACRPAAGGAVHTRGLDFACDIYIWAPLAGTCGVLLLSLVITLYCNHRNRRRVCKCPRPVVKSGDKPSLSARYV

SEQ ID NO: 3418 - protein, 116 aa, Artificial Sequence; identical to SEQ ID NO: 3417
  Synthetic polypeptide

SEQ ID NO: 3419 - protein, 116 aa, Artificial Sequence; identical to SEQ ID NO: 3417
  Synthetic polypeptide

SEQ ID NO: 3420 - protein, 116 aa, Artificial Sequence
  Synthetic polypeptide
ELGRKGSEYFIKGPRPASARSQLTRRWWLDSGPCSPVCCSTTLELCNGPRTGWPWAWARASKPGHGTGLWAPQTLGSTTWRSQMLSSLTTPLTSARPRRPPCALGGPNSPCSTLLQ

SEQ ID NO: 3421 - protein, 116 aa, Artificial Sequence
  Synthetic polypeptide
KPLLNEIKEDTNKWKNIPCSWIGRINIVKMAILPKALAANAGTGFAVAEPQIAMFCGKLNMHVNIQTGKWEPDPTGTKSCFETKEEVLQYCQEMYPELQITNSGWRCVRITSTGTR

SEQ ID NO: 3422 - protein, 116 aa, Artificial Sequence
  Synthetic polypeptide
THGGSGPSPSHIWGLRILPWVDIASGLRVPVWRSLRLDDVRLHGGHDLQYHLPHHRALRAHVHAAEAPGRQVQSLLRLPAGQAGQEDPLGGCEPGGGRAHPLPLLAALLFHHAHGL

SEQ ID NO: 3423 - protein, 116 aa, Artificial Sequence
  Synthetic polypeptide
IIIYKMKILARTPRPIIFLQPPWTTVFQGERVTLTCKGFRFYSPQKTKWYHRYLGKEILRETPDNILEVQESGEYRCQAQGSPLSSPVHLDFSSEMGFPHAAQANVELLGSSDLLT

SEQ ID NO: 3424 - protein, 116 aa, Artificial Sequence
  Synthetic polypeptide
NIVPTKNTDNYLGVVLYLQARMKGDWARLLRPTLQFGLVAVSIYVGLSRVSDYKHHWSDVLTGLIQGALVAILVAVYVSDFFKERTSFKERKEEDSHTTLHETPTTGNHYPSNHQP

SEQ ID NO: 3425 - protein, 116 aa, Artificial Sequence; identical to SEQ ID NO: 3424
  Synthetic polypeptide

SEQ ID NO: 3426 - protein, 115 aa, Artificial Sequence
  Synthetic polypeptide
EHSRRDNDQDINPGIRASNGNPLWVPSLCTGALFSLCFTLLNLATALFWSMFVTARAELSLAVHHCPPLSFAAIADLLLTSIPLDPARYETIHEEQYYQYTAVFCNHAQCDCTRY

SEQ ID NO: 3427 - protein, 115 aa, Artificial Sequence
  Synthetic polypeptide
VPVLPVAHKLYEARANPCQPQLSSLQDGGCSPSLWSMLCRSTESACQAHMCTGTDMKLRLPASPETHLDMLRHLYQGCQVVQGNLELTYLPTNASLSFLQVRPVGNPARPCLQLG

SEQ ID NO: 3428 - protein, 114 aa, Artificial Sequence
  Synthetic polypeptide
DVTCSSLPSARIVRHPQPCGTQSSNGPVKKSMREKAVERRSVNKEHNSNFKAGYIPIDEDRLHKTGLRGRKGNLAICVIILLFILAVINLILPGSQARDRRAFSGIPDAYRKKI

SEQ ID NO: 3429 - protein, 114 aa, Artificial Sequence; identical to SEQ ID NO: 3428
  Synthetic polypeptide

SEQ ID NO: 3430 - protein, 114 aa, Artificial Sequence
  Synthetic polypeptide
GSFPCSCLLSLACCHVRHASSPFAMSLSFLRPPQPCRTVLTSVARLSSKSVNAQVTDINSKGLELRKTVTTVETQNLEGLHHDGQFCHKPCPPDVNMESSRNAHSPATPSAKRK

SEQ ID NO: 3431 - protein, 114 aa, Artificial Sequence
  Synthetic polypeptide
DVTCSSLPPTMIVRPPSPCGTQSSNGPVKKSMREKAVERRSVNKEHNSNFKAGYIPIDEDRLHKTGLRGRKGNLAICVIILLFILAVINLILPGSQARDRRAFSGIPDAYRKKI

SEQ ID NO: 3432 - protein, 114 aa, Artificial Sequence; identical to SEQ ID NO: 3431
  Synthetic polypeptide

SEQ ID NO: 3433 - protein, 114 aa, Artificial Sequence
  Synthetic polypeptide
ICIGSSIVTKLECQDALETAARAEGLSLDASMHSQLRILDEEHPKGKYHHGLSALKPIRTTSKHQHPVDNAGLFSCMTFSWLSSLARVAHKKGELSMEDVWSLSKHESSDVNCR

SEQ ID NO: 3434 - protein, 114 aa, Artificial Sequence
  Synthetic polypeptide
FIHTILLSGGAGAAPCYDADGPRGRHAQWREPDGEGRAACDALGRKCPGRGSPWSPVHPGGGQGLGDQEPGAPAERRGRPGDSTPPTSRAQTCTPRGSTTSERSPCPCTDLSPR

SEQ ID NO: 3435 - protein, 114 aa, Artificial Sequence; identical to SEQ ID NO: 3434
  Synthetic polypeptide

SEQ ID NO: 3436 - protein, 114 aa, Artificial Sequence; identical to SEQ ID NO: 3434
  Synthetic polypeptide

SEQ ID NO: 3437 - protein, 114 aa, Artificial Sequence
  Synthetic polypeptide
PGMVAHVCNPSTLGGRECVCENYKLAVNCFVNNNRQCQCTSVGAQNTVICSKLAAKCLVMKAEMNGSKLGRRAKPEGALQNNDGLYDPDCDESGLFKAKQCNGTSMCWCVNTAG

SEQ ID NO: 3438 - protein, 113 aa, Artificial Sequence
  Synthetic polypeptide
VLVLPVSGMCEMSLKMYIQTTTLTVSMSLSASVSLGMLYMPKVYIIIFHPEQNVQKRKRSFKAVVTAATMQSKLIQKGNDRPNGEVKSELCESLETNTSSTKTTYISYSNHSI

SEQ ID NO: 3439 - protein, 113 aa, Artificial Sequence; identical to SEQ ID NO: 3438
  Synthetic polypeptide

SEQ ID NO: 3440 - protein, 113 aa, Artificial Sequence
  Synthetic polypeptide
VLVLPVSGMCEMSLKMYIQTTTLTVSMSLSASVSLGMLYMPKVYIIIFHPEQNVQKRKRSFKAVVTAATMQSKLIQKGNDRPNGEVKSELCESLETNSKSSVEFPMVKSGSTS

SEQ ID NO: 3441 - protein, 113 aa, Artificial Sequence; identical to SEQ ID NO: 3440
  Synthetic polypeptide

SEQ ID NO: 3442 - protein, 113 aa, Artificial Sequence
  Synthetic polypeptide
QDPISVDNSISQRGPETAPVSGTCPSPEDPDPHPGRGYCCRGPWHGAADAGHARELVCTVHCAAHCPPPALRDGLCPGSGHGQGAGGRERQPGPAAGPEGPVLQTGPGVRPGL

SEQ ID NO: 3443 - protein, 113 aa, Artificial Sequence
  Synthetic polypeptide
LSVVCEKRGHTAGGPGLKPSVTRPHHSLPEARVLCPGVAVRCPVCLEAPLVSGCLLQTPGALDPGTAGPPHPTGCCSGPHLPAPTVRPGPSAASAPPARGGLGGAAAPGGSAG

SEQ ID NO: 3444 - protein, 113 aa, Artificial Sequence; identical to SEQ ID NO: 3443
  Synthetic polypeptide

SEQ ID NO: 3445 - protein, 113 aa, Artificial Sequence; identical to SEQ ID NO: 3443
  Synthetic polypeptide

SEQ ID NO: 3446 - protein, 113 aa, Artificial Sequence
  Synthetic polypeptide
DQPGRHGVFLGLGLSGVVPTMHFTIAEGFVKATTVGQMGWFFLMAVMYITGAGLYAARIPERFFPGKFDIWFQSHQIFHVLVVAAAFVHFYGVSNLQEFRYGLEGGCTDDTLL

SEQ ID NO: 3447 - protein, 113 aa, Artificial Sequence; identical to SEQ ID NO: 3446
  Synthetic polypeptide

SEQ ID NO: 3448 - protein, 113 aa, Artificial Sequence
  Synthetic polypeptide
ALPPVRSPVALDSHRSANPAVNRVREGSRLCASFENAMPDDLSLSPITAEMGPSSCRKTNSGLPPILHNGLECHVEYQQPRLHQVLSEHGPRVGALFLPLGLFPLLLPLSLPT

SEQ ID NO: 3449 - protein, 113 aa, Artificial Sequence; identical to SEQ ID NO: 3448
  Synthetic polypeptide

SEQ ID NO: 3450 - protein, 113 aa, Artificial Sequence; identical to SEQ ID NO: 3448
  Synthetic polypeptide

SEQ ID NO: 3451 - protein, 113 aa, Artificial Sequence; identical to SEQ ID NO: 3448
  Synthetic polypeptide

SEQ ID NO: 3452 - protein, 113 aa, Artificial Sequence; identical to SEQ ID NO: 3448
  Synthetic polypeptide

SEQ ID NO: 3453 - protein, 113 aa, Artificial Sequence; identical to SEQ ID NO: 3448
  Synthetic polypeptide

SEQ ID NO: 3454 - protein, 113 aa, Artificial Sequence
  Synthetic polypeptide
QVQWLTPVIPALGEANAGGSFAASLLRATTTMIHLSCGLFQLSPRDSSGSTPREPLMADWGSEWSCWAVKWKPLQLDRPLPTGTWWMNVMTTRPTATVEQVAPLCWPQKSPRS

SEQ ID NO: 3455 - protein, 112 aa, Artificial Sequence
  Synthetic polypeptide
RDIRDEDEGGRALEPKRISSNIASAPSRQCDSGQVACLLWAATSFHHCKRRQRERERWPLPSAACPEPGPSSHPGIQALCAVAVVYLSPSSRLDWSLAPLFVPSLAAGGDPT

SEQ ID NO: 3456 - protein, 112 aa, Artificial Sequence
  Synthetic polypeptide
SQLLGRLKQENCLTPGGGGGGPDRVPPLLPRALRVLLQQHHHPRRHPPGVLPAQPHEDGLLGSAVALHLWHDVLAIRPAFRRVLQLPRQPQHQPQLGQARLPRSDHLHPQSL

SEQ ID NO: 3457 - protein, 112 aa, Artificial Sequence
  Synthetic polypeptide
SQHFERPRQDDHLRTPAGQPLRGPRGAGVGEPAGNVVGGGLRGGSRGVRLQRGRVCACQRRLLWACVSSGPRVQGVCPRATIVVAPAAWALAEPTLGLPEGPGVSEVPVRSL

SEQ ID NO: 3458 - protein, 112 aa, Artificial Sequence
  Synthetic polypeptide
EVRRPSAWQLPRLRSEKPLRPAATPSEKTRQWAGVCDFREPTCVLPQHHLCHHRQLRHFCAGGGPAGTGLAPPAEAEQPHDAARAPAAAPCAAVPPGGPGPPPPLQRHLQRQ

SEQ ID NO: 3459 - protein, 112 aa, Artificial Sequence; identical to SEQ ID NO: 3458
  Synthetic polypeptide

SEQ ID NO: 3460 - protein, 112 aa, Artificial Sequence; identical to SEQ ID NO: 3458
  Synthetic polypeptide

SEQ ID NO: 3461 - protein, 112 aa, Artificial Sequence
  Synthetic polypeptide
SHHFGRMNQTDHLSSGVQDQPGQHALYGVLFEKSKEAAFANYRLWEALGFVIAFGYSMFLCVHVKLYILLGVLSLTMVAYGLVECVESKNPIRPHAPGQVNQAEDEEIQTKM

SEQ ID NO: 3462 - protein, 112 aa, Artificial Sequence; identical to SEQ ID NO: 3461
  Synthetic polypeptide

SEQ ID NO: 3463 - protein, 112 aa, Artificial Sequence
  Synthetic polypeptide
IVLPDHLHTFITFSGSNSPSQSPPLPLSLGPLRPLLLDPCSLCSSLGWSLIPLVIKFPPKCLSPHQTVVPGGRGYLVHLQSLPHRRHCRPLCCLCPLQPQNRRCPLAPEQPQ

SEQ ID NO: 3464 - protein, 112 aa, Artificial Sequence; identical to SEQ ID NO: 3463
  Synthetic polypeptide

SEQ ID NO: 3465 - protein, 112 aa, Artificial Sequence; identical to SEQ ID NO: 3463
  Synthetic polypeptide

SEQ ID NO: 3466 - protein, 112 aa, Artificial Sequence; identical to SEQ ID NO: 3463
  Synthetic polypeptide

SEQ ID NO: 3467 - protein, 112 aa, Artificial Sequence; identical to SEQ ID NO: 3463
  Synthetic polypeptide

SEQ ID NO: 3468 - protein, 112 aa, Artificial Sequence; identical to SEQ ID NO: 3463
  Synthetic polypeptide

SEQ ID NO: 3469 - protein, 112 aa, Artificial Sequence; identical to SEQ ID NO: 3463
  Synthetic polypeptide

SEQ ID NO: 3470 - protein, 111 aa, Artificial Sequence
  Synthetic polypeptide
TYQALSNQLQGCSLYLLCSFPRGQHDHLSVPSLCSARYGIALVLHFCNFTTIAQNVIMNITMVAMVNSTSPQSQLNDSSEVLPVDSFGGLSKAPKSLPAKECYWDALLPSS

SEQ ID NO: 3471 - protein, 111 aa, Artificial Sequence; identical to SEQ ID NO: 3470
  Synthetic polypeptide

SEQ ID NO: 3472 - protein, 111 aa, Artificial Sequence
  Synthetic polypeptide
QHQEVTLYGLKWRVCPSTCGKRACTENNECCHPECLGSCSAPDNDTACVACRHYYYAGVCVPACPPNTYRFEGWRCVDRDFCANILSAESSDSEGFVIHDGECMQECPSGF

SEQ ID NO: 3473 - protein, 111 aa, Artificial Sequence
  Synthetic polypeptide
PPRASAVNAVFFATYLTLACCSGPRRHFPWNLILLTVFTLSMAYLTGMLSSYYNTTSVLLCLGITALVCLSVTVFSFQTKFDFTSCQGVLFVLLMTLFFSGLILAILLPFQ

SEQ ID NO: 3474 - protein, 111 aa, Artificial Sequence
  Synthetic polypeptide
GRAGWFMPVIPALWDAKDYLHSLGKARTAQVQKDARIGEAEAKRDAGIREAKAKQEKVSAQYLSEIEMAKAQRDYELKKAAYDIEVNTRRAQADLAYQLQVAKTKQQIEEQ

SEQ ID NO: 3475 - protein, 111 aa, Artificial Sequence
  Synthetic polypeptide
MGAVAHACHPSILGGRGNAFYSNVLYRPRGAPKKSEDCSGEGKDQRGQSIYSTSFPQPAPRQPHLASRPCPSPRPCPSPRPGHPVSMVRVSPRPSPTQQPRPKGFPKVGEE

SEQ ID NO: 3476 - protein, 111 aa, Artificial Sequence
  Synthetic polypeptide
WARWLMPVIPAFWEAEEMHSTATSYTGPGGPQRRVRTALERGRTRGARAFIQPPSRNRPPASRTWRQDPAPARDPAPAPGPATPSLWSGSLLDQAPPSSRGQKGSPKWERS

SEQ ID NO: 3477 - protein, 111 aa, Artificial Sequence; identical to SEQ ID NO: 3475
  Synthetic polypeptide

SEQ ID NO: 3478 - protein, 111 aa, Artificial Sequence; identical to SEQ ID NO: 3476
  Synthetic polypeptide

SEQ ID NO: 3479 - protein, 111 aa, Artificial Sequence; identical to SEQ ID NO: 3475
  Synthetic polypeptide

SEQ ID NO: 3480 - protein, 111 aa, Artificial Sequence; identical to SEQ ID NO: 3476
  Synthetic polypeptide

SEQ ID NO: 3481 - protein, 111 aa, Artificial Sequence; identical to SEQ ID NO: 3475
  Synthetic polypeptide

SEQ ID NO: 3482 - protein, 111 aa, Artificial Sequence; identical to SEQ ID NO: 3476
  Synthetic polypeptide

SEQ ID NO: 3483 - protein, 111 aa, Artificial Sequence
  Synthetic polypeptide
VSVSTPDSGSWRKGLSGSSPKPASQAPLPSSLLSLSATTTKPTLPSGTGATTVTRTMNFTFATQGPSSCGSSGLASMLHSQRWGLGSIGRPSTHTTPWLPAPLAPLPCQPL

SEQ ID NO: 3484 - protein, 110 aa, Artificial Sequence
  Synthetic polypeptide
IICASVCSWRSPPRRQRRDHQHRRPPSRRSPCPCAQRRAGQRRGAQCTRGGWTSPVISTSGRPWPGLVGSFSCHWLSPFTATTGTEDVFANVPGLWSNRETSPAFRRDTS

SEQ ID NO: 3485 - protein, 110 aa, Artificial Sequence; identical to SEQ ID NO: 3484
  Synthetic polypeptide

SEQ ID NO: 3486 - protein, 110 aa, Artificial Sequence; identical to SEQ ID NO: 3484
  Synthetic polypeptide

SEQ ID NO: 3487 - protein, 110 aa, Artificial Sequence
  Synthetic polypeptide
FLQERMHGDQVIAKGRKICLNLSDISTTHDGKLTIKGRHRGADGSWEVVPDPGLISDQRVCRRRDHHRWHQHRQDRPARPPLQDHHHPPGPCFVFGFPPNEPGPIQPVLG

SEQ ID NO: 3488 - protein, 110 aa, Artificial Sequence; identical to SEQ ID NO: 3487
  Synthetic polypeptide

SEQ ID NO: 3489 - protein, 110 aa, Artificial Sequence; identical to SEQ ID NO: 3487
  Synthetic polypeptide

SEQ ID NO: 3490 - protein, 110 aa, Artificial Sequence; identical to SEQ ID NO: 3487
  Synthetic polypeptide

SEQ ID NO: 3491 - protein, 110 aa, Artificial Sequence; identical to SEQ ID NO: 3487
  Synthetic polypeptide

SEQ ID NO: 3492 - protein, 110 aa, Artificial Sequence; identical to SEQ ID NO: 3487
  Synthetic polypeptide

SEQ ID NO: 3493 - protein, 110 aa, Artificial Sequence; identical to SEQ ID NO: 3487
  Synthetic polypeptide

SEQ ID NO: 3494 - protein, 110 aa, Artificial Sequence
  Synthetic polypeptide
PPRPGGRWGGQPPARPAAPSGREVGGSAPNPASRPVREETSWCYGQLAAQPCSNLSPTGSLKTWPARGFVPAWSVCPSTSSSAPVLTVAGGSTPCSSARSSNFCTKYSAL

SEQ ID NO: 3495 - protein, 110 aa, Artificial Sequence; identical to SEQ ID NO: 3494
  Synthetic polypeptide

SEQ ID NO: 3496 - protein, 110 aa, Artificial Sequence
  Synthetic polypeptide
DTGNKARNRCSLNRTQCTFRNFTSATQALTEWYILQATNIFAQVPQQELVEMSYPGEQMILACLFGAEPCNYRPEVDPGHRPGRLRPLPCVHGRGQADASRAEVIPLHQR

SEQ ID NO: 3497 - protein, 110 aa, Artificial Sequence
  Synthetic polypeptide
AQEFETSLGNMEEASEGGGNDRVRNLQSEVEGVKNIMTQNVERILARGENLEHLRNKTEDLEATSEHFKTTSQKVARKFWWKNVKMIVLICVIVFIIILFIVLFATGAFS

SEQ ID NO: 3498 - protein, 110 aa, Artificial Sequence
  Synthetic polypeptide
NQYRVLDENMTFGIIQSQVFGTNVMVTVAKSFEAPIKLVFPQDLLEKGLEANNFAMLGLGDVVIPGIFIALLLRFDISLKKNTHTYFYTSFAAYIFGLGLTIFIMHIFKH

SEQ ID NO: 3499 - protein, 110 aa, Artificial Sequence
  Synthetic polypeptide
EQEFETSLGNMEEASEGGGNDRVRNLQSEVEGVKNIMTQNVERILARGENLEHLRNKTEDLEATSEHFKTTSQKVARKFWWKNVKMIVLICVIVFIIILFIVLFATGAFS

SEQ ID NO: 3500 - protein, 109 aa, Artificial Sequence
  Synthetic polypeptide
KECTFSRNCTWNLEWRSSIGLVICSMILFGDACTAPSQPRKHKIMMLKMIFNQTSVEHCKTHTEKQKECNFFLIAVRLASLNQILDPWVYLLLRKILLRKFCQEEFWGN

SEQ ID NO: 3501 - protein, 109 aa, Artificial Sequence
  Synthetic polypeptide
RAWWLTPVIPALWEAEFSVDIDSELVEELPAEIELWLVLVAVGAGLLLLGLIILLLWKCDFFKRTRYYQIMPKYHAVRIREEERYPPPGSTLPTKKHWVTSWQTRDQYY

SEQ ID NO: 3502 - protein, 109 aa, Artificial Sequence
  Synthetic polypeptide
AQEFETSLGNMEEASEGGGNDRVRNLQSEVEGVKNIMTQNVERILARGENLEHLRNKTEDLEATPGAEASCFREEVTPKLSKVWSLKFCVQRGGWLWLSESCVNSWLLV

SEQ ID NO: 3503 - protein, 109 aa, Artificial Sequence
  Synthetic polypeptide
SQLLRRLRPCCSWGPPPWPASPWTSSSCSSTPSGCAAGGARARSTWTPTAAARPGVSSSPRWCAAPASQWDSTATGRPVMASIGPPTRSATPTARWPGSRTACGTRRWG

SEQ ID NO: 3504 - protein, 109 aa, Artificial Sequence; identical to SEQ ID NO: 3503
  Synthetic polypeptide

SEQ ID NO: 3505 - protein, 109 aa, Artificial Sequence
  Synthetic polypeptide
DLVVFISVSIVPLLLPSLSCCLLKKVLASSSPSATIVSFLRPPQPCRTHALLALKFILAFAIPDKPRHIQMKLARLEFESLEALKQQQMKLVTENLKEEPMESGKEKAT

SEQ ID NO: 3506 - protein, 109 aa, Artificial Sequence; identical to SEQ ID NO: 3505
  Synthetic polypeptide

SEQ ID NO: 3507 - protein, 109 aa, Artificial Sequence; identical to SEQ ID NO: 3505
  Synthetic polypeptide

SEQ ID NO: 3508 - protein, 109 aa, Artificial Sequence; identical to SEQ ID NO: 3505
  Synthetic polypeptide

SEQ ID NO: 3509 - protein, 109 aa, Artificial Sequence; identical to SEQ ID NO: 3505
  Synthetic polypeptide

SEQ ID NO: 3510 - protein, 109 aa, Artificial Sequence
  Synthetic polypeptide
LTPVILELWEAEAGLLEPRSLRPAWTTCAVPGIGPSLQKPFQEYLEAQRQKLHHKSEMGTPQGENWLSWMFEKLVVVMVCYFILSIINSMAQSYAKRIQQRLNSEEKTK

SEQ ID NO: 3511 - protein, 109 aa, Artificial Sequence; identical to SEQ ID NO: 3510
  Synthetic polypeptide

SEQ ID NO: 3512 - protein, 109 aa, Artificial Sequence; identical to SEQ ID NO: 3510
  Synthetic polypeptide

SEQ ID NO: 3513 - protein, 109 aa, Artificial Sequence; identical to SEQ ID NO: 3510
  Synthetic polypeptide

SEQ ID NO: 3514 - protein, 109 aa, Artificial Sequence; identical to SEQ ID NO: 3510
  Synthetic polypeptide

SEQ ID NO: 3515 - protein, 109 aa, Artificial Sequence; identical to SEQ ID NO: 3510
  Synthetic polypeptide

SEQ ID NO: 3516 - protein, 109 aa, Artificial Sequence
  Synthetic polypeptide
EQEFETSLGNMEEASEGGGNDRVRNLQSEVEGVKNIMTQNVERILARGENLEHLRNKTEDLEATPGAEASCFREEVTPKLSKVWSLKFCVQRGGWLWLSESCVNSWLLV

SEQ ID NO: 3517 - protein, 109 aa, Artificial Sequence
  Synthetic polypeptide
VSQEAVERTGWLSPLPVGGLGPQQWETCNFRHHWKNLSPEKETALPLPSAPPQMVHQNLEGCRTISRAAGRHLNRGDQDALLSSVYLQPGLGHGSSGAVHSTSASGDPG

SEQ ID NO: 3518 - protein, 109 aa, Artificial Sequence; identical to SEQ ID NO: 3517
  Synthetic polypeptide

SEQ ID NO: 3519 - protein, 109 aa, Artificial Sequence; identical to SEQ ID NO: 3517
  Synthetic polypeptide

SEQ ID NO: 3520 - protein, 108 aa, Artificial Sequence
  Synthetic polypeptide
GASLPGRPSSEMWGAPLPHRPVWDVRSASARPRPRLGGEERLCPAAPSEKGGDPPPGNRPVSEEPVDPLKEEALLVRLMAHPTSLEKELQLKQSFLWMSFLHLSSLEN

SEQ ID NO: 3521 - protein, 108 aa, Artificial Sequence
  Synthetic polypeptide
SQHFRRPRQADHLGSGVRDQPGQHGETLSLLKTEKLAGRGGYIQACRALMITAILLGFLGLLLGIAGLRCTNIGGLELSRKAKLAATAGALHILADLLAANQPIGSVS

SEQ ID NO: 3522 - protein, 108 aa, Artificial Sequence
  Synthetic polypeptide
LRVAKPTASKKMETSVRQSPRDESCQQPEEGWKQVLLQSGLEATRAAITQHCTDLGNLLGKENDVALIIDGHTLKYALSFEVRRSFLDLALSCKAVICCRSLFLSKWR

SEQ ID NO: 3523 - protein, 108 aa, Artificial Sequence
  Synthetic polypeptide
GSPENVRIDPSSLSFNMWKEIPIPFYLSVYFFDVMNPSEILKGEKPQVRERGPYVYREFRHKSNITFNNNDTVSFLEYRTFQFQPSKSHGSESDYIVMPNILVLVRLP

SEQ ID NO: 3524 - protein, 108 aa, Artificial Sequence
  Synthetic polypeptide
DQAQWLTPVIPALWEAKVGGHKHFGRPQARRPSAGEWLWDSGPASPSSSWQSVGSSSSDEMQSPQRCRDLPRTAMTRSLIQHCTSAKWATMRTSFQIFQKMRGFITQS

SEQ ID NO: 3525 - protein, 108 aa, Artificial Sequence
  Synthetic polypeptide
RAYGNSLYLCNSFASLNLFPVLCLAQTIHTQEEDLPRPSISAEPGTVIPLGSHVTFVCRGPVGVQTFRLERESRSTYNDTEDVSQASPSESEARFRIDSVSEGNAGPY

SEQ ID NO: 3526 - protein, 108 aa, Artificial Sequence
  Synthetic polypeptide
AQEFEAALYLQARMKGDWARLLRPTLQFGLVAVSIYVGLSRVSDYKHHWSDVLTGLIQGALVAILVAVYVSDFFKERTSFKERKEEDSHTTLHETPTTGNHYPSNHQP

SEQ ID NO: 3527 - protein, 108 aa, Artificial Sequence; identical to SEQ ID NO: 3526
  Synthetic polypeptide

SEQ ID NO: 3528 - protein, 108 aa, Artificial Sequence
  Synthetic polypeptide
QDQPHLFSFLFPLLSLLNVKMMRMKTFVMIHFHLMNVCTGTDMKLRLPASPETHLDMLRHLYQGCQVVQGNLELTYLPTNASLSFLQTTTFLRTWDPAPSSAPCTTKR

SEQ ID NO: 3529 - protein, 107 aa, Artificial Sequence
  Synthetic polypeptide
LSISHPTYFSSNHLSLPDPARQIVFADWHSLQVGGLICAGVLCAMGIIIVMSEWRSSGEQAGRGWGSPPLTTQLSPTGAKCKCKFGQKSGHHPGETPPLITPGSAQS

SEQ ID NO: 3530 - protein, 107 aa, Artificial Sequence; identical to SEQ ID NO: 3529
  Synthetic polypeptide

SEQ ID NO: 3531 - protein, 107 aa, Artificial Sequence
  Synthetic polypeptide
DLEEVAFLGALVSFSVNRDLATPSGCEADGSPHAGRGRSSAWLPAVWLQHWSHQCPPEGDRGVLQPDMGPPLWGEHPAHHAHHALVPLSGHLFCWGHDWLLLCGPFR

SEQ ID NO: 3532 - protein, 107 aa, Artificial Sequence; identical to SEQ ID NO: 3531
  Synthetic polypeptide

SEQ ID NO: 3533 - protein, 107 aa, Artificial Sequence; identical to SEQ ID NO: 3531
  Synthetic polypeptide

SEQ ID NO: 3534 - protein, 107 aa, Artificial Sequence
  Synthetic polypeptide
GLNEVVQDPQSSWCPPRTAQSMPPRMFHWPAMLRHTLLTSPTAGSRTTSMSSTLAACSPGCGSWWTGACGCWPPSLMMPAATPVCPAMASCIHPQPLPTSLCSACRG

SEQ ID NO: 3535 - protein, 107 aa, Artificial Sequence
  Synthetic polypeptide
GLNEVVQDPQSSWCPPRTAQSMPPRMFHWPAMLRHTLLTSPTAGSRTTSMSSTLAACSPGCGSWWTGACGCWPPSLMMPAATPVCPAMASCIHPQPLPTSLCSTQPR

SEQ ID NO: 3536 - protein, 107 aa, Artificial Sequence
  Synthetic polypeptide
VCAPPRRAHRALVLRRASTFDAVRGPPRRCPPDADPRAPGLALPGRLLVSHSRRTPSRESSRSGFCLPRRRRLLPQLRKVRRGLEQSCGAGLGWGAAAPGPRPPKRA

SEQ ID NO: 3537 - protein, 107 aa, Artificial Sequence
  Synthetic polypeptide
KGRLLTARELKQEAAHRLAGPQLGACMLGDSSFSPLCMSANGHKNAAGSCQSLASLQYFFPSHSGRSGVHCPKLSLDQSSKNDRPQHQRMSKISGLCTRLVCQTRIY

SEQ ID NO: 3538 - protein, 106 aa, Artificial Sequence
  Synthetic polypeptide
GVEGGGSGEGSRTCCVTVELVKALLNELASVKVNEAEARAGQWGSGHPSCPAACPGGAVRGGLRGMRCDRGPLPAAGAHCRALLLLLPLPPALRGTSEDRAQGAGL

SEQ ID NO: 3539 - protein, 106 aa, Artificial Sequence
  Synthetic polypeptide
PLPASVVFFARWRLQPQSLEHVMQIHRECLPGTHVHRHRHEAAAPCQSRDPPGHAPPPLPGLPGGAGKPGTHLPAHQCQPVLPADNYLSTDVGSCTLVCPLHNQEV

SEQ ID NO: 3540 - protein, 106 aa, Artificial Sequence
  Synthetic polypeptide
YIKNCYKSKKVKVNNPKQIFHRKIQKSLEQMKTSATSLTVKKKCKIKLQYTIFTSNNGKAQSLQMYGTGKNVGRQALSRIDAKGTSCCFFPCRDHLQPSSCHCLQL

SEQ ID NO: 3541 - protein, 106 aa, Artificial Sequence; identical to SEQ ID NO: 3540
  Synthetic polypeptide

SEQ ID NO: 3542 - protein, 106 aa, Artificial Sequence; identical to SEQ ID NO: 3540
  Synthetic polypeptide

SEQ ID NO: 3543 - protein, 106 aa, Artificial Sequence
  Synthetic polypeptide
KWLKWCWAVQRRHPADDRAAAQPVLAAVLEAGQPLLSPVRGRGQHCDLQTPPLRSLHLPRLGQRAGLGHRHILHGHGAHLCGLQVLQPAWVLSRETGLRHCTREGP

SEQ ID NO: 3544 - protein, 106 aa, Artificial Sequence; identical to SEQ ID NO: 3543
  Synthetic polypeptide

SEQ ID NO: 3545 - protein, 106 aa, Artificial Sequence
  Synthetic polypeptide
ERREGEESAREGGLFPRGADQEYSAFRVGMVQFSTSEFRLTPHIDNLEVANSFAVTNAFCSQFSRGVYAIFGFYDKKSVNTITSFCGTLHVSFITPSFPTDGTHPF

SEQ ID NO: 3546 - protein, 106 aa, Artificial Sequence
  Synthetic polypeptide
TGHVIIDRFPCDPHYLKHRPGELPADRGGAAGGGPDQGCRRDTPLPAVRRLLPLPAAAHHPGCGLLPATAAVHRKPGHHPDLCRGGHAVERLLPGRPHVRRVPGGR

SEQ ID NO: 3547 - protein, 106 aa, Artificial Sequence; identical to SEQ ID NO: 3546
  Synthetic polypeptide

SEQ ID NO: 3548 - protein, 106 aa, Artificial Sequence
  Synthetic polypeptide
HLTQCLHTFIFPITLAEVVLRPHSYPSKKTGLTLLAAASIAYISRILWLYFETGTWVYPVFAKLSLLGLAAFFSLSYVFIASIYLLGEKLNHWKWGDMRQPRKKRK

SEQ ID NO: 3549 - protein, 106 aa, Artificial Sequence; identical to SEQ ID NO: 3548
  Synthetic polypeptide

SEQ ID NO: 3550 - protein, 106 aa, Artificial Sequence; identical to SEQ ID NO: 3548
  Synthetic polypeptide

SEQ ID NO: 3551 - protein, 105 aa, Artificial Sequence
  Synthetic polypeptide
LAFSGLQLLSTIARGGSVRGTMVQPCGACAKTPWKACSSCYSSPCCLQERWPLPSAACPEPGPSSHPGIQALCAVAVVYLSPSSRLDWSLAPLFVPSLAAGGDPT

SEQ ID NO: 3552 - protein, 105 aa, Artificial Sequence
  Synthetic polypeptide
IKRQRESYALAGETHLDYQGEAIDYFYSTRKGSPPAIGPYYENHGYQPENPYPAQPTVVPTVYEVHPAQYYPSPVPQYAPRVLTQASNPVVCTQPKSPSGTVCTS

SEQ ID NO: 3553 - protein, 105 aa, Artificial Sequence
  Synthetic polypeptide
SQDGQIGTAPVYSSQHERRRRWVISAFPSEYAVWLVLWVTWNVFVICFYLEAGDLSKLAGFIYACYVVKCITEEEDSFDFIGGFDSYGYQGPQKTSHLQLQPMYM

SEQ ID NO: 3554 - protein, 105 aa, Artificial Sequence
  Synthetic polypeptide
PGAVAHTCNPSTLGGRDGRITSVHRHRHEAAAPCQSRDPPGHAPPPLPGLPGGAGKPGTHLPAHQCQPVLPAGYPGGAGLRAHRSQPSEAGPTAEAADCARHPAL

SEQ ID NO: 3555 - protein, 105 aa, Artificial Sequence; identical to SEQ ID NO: 3554
  Synthetic polypeptide

SEQ ID NO: 3556 - protein, 105 aa, Artificial Sequence; identical to SEQ ID NO: 3554
  Synthetic polypeptide

SEQ ID NO: 3557 - protein, 105 aa, Artificial Sequence
  Synthetic polypeptide
GQEFKTSLGNMEKPCLYKNTKISQRCSEPHRSSQHWGRHLREGGRQHRCQPDCVPGCAGLYQCCPLLAGRHGGHPRAQLPAHLLLHPAACSLLDGCGVGGLPSGS

SEQ ID NO: 3558 - protein, 105 aa, Artificial Sequence; identical to SEQ ID NO: 3557
  Synthetic polypeptide

SEQ ID NO: 3559 - protein, 105 aa, Artificial Sequence; identical to SEQ ID NO: 3557
  Synthetic polypeptide

SEQ ID NO: 3560 - protein, 105 aa, Artificial Sequence; identical to SEQ ID NO: 3557
  Synthetic polypeptide

SEQ ID NO: 3561 - protein, 104 aa, Artificial Sequence
  Synthetic polypeptide
EASSSVPGQPSELTRSSSTRKVPRLPQPKMYCGVLVGSWDRKRKYWWKLNKAWHLENTKVLMLASSSWSSLSAPHSVTGTRAYSSAQTKAPPFRSSPFPSSWKL

SEQ ID NO: 3562 - protein, 104 aa, Artificial Sequence; identical to SEQ ID NO: 3561
  Synthetic polypeptide

SEQ ID NO: 3563 - protein, 104 aa, Artificial Sequence
  Synthetic polypeptide
ADPGQPPASRTHNLGYVQACRALMIAASVLGLPAILLLLTVLPCIRMGQEPGVAKYRRAQLAGVLLILLGCQLLWAKTESSLHSQHLVQFKQKYLEDFSYLQGD

SEQ ID NO: 3564 - protein, 104 aa, Artificial Sequence; identical to SEQ ID NO: 3563
  Synthetic polypeptide

SEQ ID NO: 3565 - protein, 104 aa, Artificial Sequence
  Synthetic polypeptide
ENIRKALRTGRGLHRTQTRPWLQQWCPILMTAQIPTLSSASMEPAGFWCRRTSQHVSAILGTLVHAVSMRTSWPWWLPARRSRPSPPWWWSPSWPWLSLSSHVC

SEQ ID NO: 3566 - protein, 104 aa, Artificial Sequence; identical to SEQ ID NO: 3565
  Synthetic polypeptide

SEQ ID NO: 3567 - protein, 104 aa, Artificial Sequence; identical to SEQ ID NO: 3565
  Synthetic polypeptide

SEQ ID NO: 3568 - protein, 104 aa, Artificial Sequence; identical to SEQ ID NO: 3565
  Synthetic polypeptide

SEQ ID NO: 3569 - protein, 104 aa, Artificial Sequence; identical to SEQ ID NO: 3565
  Synthetic polypeptide

SEQ ID NO: 3570 - protein, 104 aa, Artificial Sequence; identical to SEQ ID NO: 3565
  Synthetic polypeptide

SEQ ID NO: 3571 - protein, 104 aa, Artificial Sequence; identical to SEQ ID NO: 3565
  Synthetic polypeptide

SEQ ID NO: 3572 - protein, 104 aa, Artificial Sequence
  Synthetic polypeptide
SNFLLSVCLHTRQWFLEEGAIWFISKACLTGATAVLFAVFVRYNHKTDAALWHRSNHSNADNEFYFRYPNGVSLLLPRLECNGTISAHHNLCLPGSSDSPASVS

SEQ ID NO: 3573 - protein, 104 aa, Artificial Sequence; identical to SEQ ID NO: 3572
  Synthetic polypeptide

SEQ ID NO: 3574 - protein, 104 aa, Artificial Sequence; identical to SEQ ID NO: 3572
  Synthetic polypeptide

SEQ ID NO: 3575 - protein, 103 aa, Artificial Sequence
  Synthetic polypeptide
RDIRDEDEGGRALEPKRISSNIASAPSRQCDSGQVACLLWAATSFHHCKRRQRERDYGAALRGLCEDALEGLLFLLLFSLLSAGALATALCSLPRAWALFPPS

SEQ ID NO: 3576 - protein, 103 aa, Artificial Sequence
  Synthetic polypeptide
MGTVAHTCNPSTFGGQGSSSSYDNGFPTGDHELFTTFSWDDQKVRRVFVRKVYTILLIQLLVTLAVVALFTFCDPVKDYVQANPGWYWASYAVFFATYLTLAC

SEQ ID NO: 3577 - protein, 103 aa, Artificial Sequence
  Synthetic polypeptide
RDIRDEDEGGRALEPKRISSNIASAPSRQCDSGQVACLLWAATSFHHCKRRQRERERWPLPSAACPEPGPSSHPVTTTMTQTMTTLSTLSRNPSALCSGSRLS

SEQ ID NO: 3578 - protein, 103 aa, Artificial Sequence
  Synthetic polypeptide
AVKRKAITIMDEYVLYYYSNLSVPIGRFQNRVHLMGDILCNDGSLLLQDVQEADQGTYICEIRLKGESQVFKKAVVLHVLPEEPKELMVHVGGLIQMGCVFQS

SEQ ID NO: 3579 - protein, 103 aa, Artificial Sequence
  Synthetic polypeptide
RCPAVDGAALLSKIREEERRILEKAGYFQSITVGVAPIVVVIASVVTFSVHMTLGFDLTAAQAFTVVTVFNSMTFALKVTPFSVKSLSEASVAVDRFKLPSTV

SEQ ID NO: 3580 - protein, 103 aa, Artificial Sequence
  Synthetic polypeptide
SSIPGPRTNNRPVRNRATQQEVSSGRWLCCHPDRPVRWLLLQRHHRLVTLLPLLLLHPQPALDRLWPHLEQPQLYRPQAPQWLRAWQPHQVLQVQVHAGSRVL

SEQ ID NO: 3581 - protein, 103 aa, Artificial Sequence; identical to SEQ ID NO: 3580
  Synthetic polypeptide

SEQ ID NO: 3582 - protein, 103 aa, Artificial Sequence; identical to SEQ ID NO: 3580
  Synthetic polypeptide

SEQ ID NO: 3583 - protein, 103 aa, Artificial Sequence; identical to SEQ ID NO: 3580
  Synthetic polypeptide

SEQ ID NO: 3584 - protein, 103 aa, Artificial Sequence; identical to SEQ ID NO: 3580
  Synthetic polypeptide

SEQ ID NO: 3585 - protein, 103 aa, Artificial Sequence; identical to SEQ ID NO: 3580
  Synthetic polypeptide

SEQ ID NO: 3586 - protein, 103 aa, Artificial Sequence; identical to SEQ ID NO: 3580
  Synthetic polypeptide

SEQ ID NO: 3587 - protein, 103 aa, Artificial Sequence; identical to SEQ ID NO: 3580
  Synthetic polypeptide

SEQ ID NO: 3588 - protein, 103 aa, Artificial Sequence
  Synthetic polypeptide
LHHFTPAWVEEPGMGAEEAVDCRQWTQHHLVAADIRVAPAMALTPPQGDADADGMDVNVRGPDSHPKPLYRLGCPHGRWLNGTDPGGPPGSRGHGGRAHRQPC

SEQ ID NO: 3589 - protein, 102 aa, Artificial Sequence
  Synthetic polypeptide
SQLLRRLRQENRLNLGGGACSEPRFHHCTPAWATHRRQCARPPPSPWSASSSCSRPSSSATSATSARRGPFWLLSLASSSYYRASPWWWAWFFTSPASTTRS

SEQ ID NO: 3590 - protein, 102 aa, Artificial Sequence; identical to SEQ ID NO: 3589
  Synthetic polypeptide

SEQ ID NO: 3591 - protein, 102 aa, Artificial Sequence; identical to SEQ ID NO: 3589
  Synthetic polypeptide

SEQ ID NO: 3592 - protein, 102 aa, Artificial Sequence
  Synthetic polypeptide
RDIRDEDEGGRALEPKRISSNIASAPSRQCDSGQVACLLWAATSFHHCKRRQRERERWPLPSAACPEPGPSSHPVTTTMTQTMTTLSTLRNPSALCSGSRLS

SEQ ID NO: 3593 - protein, 102 aa, Artificial Sequence
  Synthetic polypeptide
RPKIDIAVGAPFEGLGKVYIYHSSSKGLLRQPQQVIHGEKLGLPGLATFGYSLSGQMDVDENFYPDLLVGSLSDHIVLLRARPVINIVHKTLVPRPAVLDPA

SEQ ID NO: 3594 - protein, 102 aa, Artificial Sequence
  Synthetic polypeptide
SMRVKSLVNEISVFIKETLERPSHLRETLTPFCHVRTQQEDSWLSRIQESLSRPKSAGTLILDFPASRTIMMVAGPLFNGGIASLLAMKEKVISTNPGNSYL

SEQ ID NO: 3595 - protein, 102 aa, Artificial Sequence
  Synthetic polypeptide
GLAQWLMPVIPALQEAEASRSFGVRSSRPAWTTWVYSGLPGTHDHRHPPGLPRPLARHSGPALHQHWGPGALQESQAGGHRRGPPHSGRSPGCKSAHRQCFL

SEQ ID NO: 3596 - protein, 102 aa, Artificial Sequence
  Synthetic polypeptide
KMKKMYIQTTTLTVSMSLSASVSLGMLYMPKVYIIIFHPEQNVQKRKRSFKAVVTAATMQSKLIQKGNDRPNGEVKSELCESLETNTSSTKTTYISYSNHSI

SEQ ID NO: 3597 - protein, 102 aa, Artificial Sequence; identical to SEQ ID NO: 3596
  Synthetic polypeptide

SEQ ID NO: 3598 - protein, 102 aa, Artificial Sequence
  Synthetic polypeptide
KMKKMYIQTTTLTVSMSLSASVSLGMLYMPKVYIIIFHPEQNVQKRKRSFKAVVTAATMQSKLIQKGNDRPNGEVKSELCESLETNSKSSVEFPMVKSGSTS

SEQ ID NO: 3599 - protein, 102 aa, Artificial Sequence; identical to SEQ ID NO: 3598
  Synthetic polypeptide

SEQ ID NO: 3600 - protein, 102 aa, Artificial Sequence
  Synthetic polypeptide
QDQPHLFSFLFPLLSLLNVKMMRMKTFVMIHFHLMNVCTGTDMKLRLPASPETHLDMLRHLYQGCQVVQGNLELTYLPTNASLSFLQVRPVGNPARPCLQLG

SEQ ID NO: 3601 - protein, 101 aa, Artificial Sequence
  Synthetic polypeptide
NLCCPVHHSTSSTEFGLCVHRHRHEAAAPCQSRDPPGHAPPPLPGLPGGAGKPGTHLPAHQCQPVLPAGYPGGAGLRAHRSQPSEAGPTAEAADCARHPAL

SEQ ID NO: 3602 - protein, 101 aa, Artificial Sequence; identical to SEQ ID NO: 3601
  Synthetic polypeptide

SEQ ID NO: 3603 - protein, 101 aa, Artificial Sequence; identical to SEQ ID NO: 3601
  Synthetic polypeptide

SEQ ID NO: 3604 - protein, 101 aa, Artificial Sequence
  Synthetic polypeptide
GRGRERLREELKGRGDRREDPERQTDKEKLRAGARRLKKVPSWATQGISQVPGDSRAPFGVSSRFRESPPRYIGFGMDRSWSSRTAPRPRCPWVRMNRMTG

SEQ ID NO: 3605 - protein, 101 aa, Artificial Sequence; identical to SEQ ID NO: 3604
  Synthetic polypeptide

SEQ ID NO: 3606 - protein, 101 aa, Artificial Sequence
  Synthetic polypeptide
TWETEVVDIQEVQGYVLIAHNQVRQVPLQRLRIVRGTQLFEDNYALAVLDNGDPLNNTTPVTGASPGGLRELQLRSLTEILKGGVLIQRNPQLCYQDTILW

SEQ ID NO: 3607 - protein, 101 aa, Artificial Sequence
  Synthetic polypeptide
QCGAVVMSRDSGARVPGFSSCFCSVVAGWPWTSRLTSPCLSSKCCVLCNLPDPGLLFWTQEAFPLEPDSPDRLYPVHGLPHWDAVQFDFTSCQGVLFVLLM

SEQ ID NO: 3608 - protein, 101 aa, Artificial Sequence
  Synthetic polypeptide
LVSLVFLCILWSAFKIISWSRGLSVGFTRLPRSGSKQPVPRAPSSPCQEKGPASHAQPIATLTPLDQPSASAASGTSGHAQTPGVHPAPPLLRLRGAWFPA

SEQ ID NO: 3609 - protein, 101 aa, Artificial Sequence; identical to SEQ ID NO: 3608
  Synthetic polypeptide

SEQ ID NO: 3610 - protein, 101 aa, Artificial Sequence
  Synthetic polypeptide
WFYKRLAFSLLALTPSCHAVKKVPVSPLPSAMTDGGYRVCLHQLLCLFLFRQTLYHRPPSGLALHKTLMQTLPPHPTALTTTRCSQLQHQPQHLCFLRTFP

SEQ ID NO: 3611 - protein, 101 aa, Artificial Sequence
  Synthetic polypeptide
GQEFETSLANLEIYKDRQKFSEQVFKVASSDLVNMGISVVSYTLKDIHDDQDYLHSLGKARTAQVQKDARIGEAEAKRDAGIREAKAKQEKVSAQYLSEIE

SEQ ID NO: 3612 - protein, 101 aa, Artificial Sequence
  Synthetic polypeptide
QSCRIHMVHLSHRPGLLRDMETKRGMMCGSSLASLTRIWQQKCSVVHTRRTCMVVNISGSFRAGTSLLGGSRCTRKPTHPAASGRICLLPWRATLAWISSP

SEQ ID NO: 3613 - protein, 101 aa, Artificial Sequence
  Synthetic polypeptide
LVSVSLLAHRKSCPLTVRSARPGTTSVHLLILSTSHNACTLSYSPSHWLKSSSGLTPIHQRRQDSPCWLLPALLTSAASYGSTLRRVPGCILCLPNSASWV

SEQ ID NO: 3614 - protein, 101 aa, Artificial Sequence; identical to SEQ ID NO: 3613
  Synthetic polypeptide

SEQ ID NO: 3615 - protein, 101 aa, Artificial Sequence; identical to SEQ ID NO: 3613
  Synthetic polypeptide

SEQ ID NO: 3616 - protein, 101 aa, Artificial Sequence; identical to SEQ ID NO: 3613
  Synthetic polypeptide

SEQ ID NO: 3617 - protein, 100 aa, Artificial Sequence
  Synthetic polypeptide
YQELTHVDQASFQVDAFGTSFILDVVLNHDLLSSEYIERHIEHGGKTVEVKGGEHCYYQGHIRGNPDSFVALSTCHGLHGMFYDGNHTYLIEPEENDTTQ

SEQ ID NO: 3618 - protein, 100 aa, Artificial Sequence
  Synthetic polypeptide
ELERARKWILPQTLGEECRPANPHFRLPISRSVRCGWRSVRCPACCRHTCGRTTRAPSAASWADWAASLKSPRGVSCRGMTCCCAQPSGGWHSAATPWPP

SEQ ID NO: 3619 - protein, 100 aa, Artificial Sequence; identical to SEQ ID NO: 3618
  Synthetic polypeptide

SEQ ID NO: 3620 - protein, 100 aa, Artificial Sequence
  Synthetic polypeptide
PGVVFKCCGAANYTDWEKIPSMSKNRVPDSCCINVTVGCGINFNEKAIHKEGCVEKIGGWLRKNVLVVAAAALGIAFVEVLGIVFACCLVKSIRSGYEVM

SEQ ID NO: 3621 - protein, 100 aa, Artificial Sequence; identical to SEQ ID NO: 3620
  Synthetic polypeptide

SEQ ID NO: 3622 - protein, 100 aa, Artificial Sequence; identical to SEQ ID NO: 3620
  Synthetic polypeptide

SEQ ID NO: 3623 - protein, 100 aa, Artificial Sequence; identical to SEQ ID NO: 3620
  Synthetic polypeptide

SEQ ID NO: 3624 - protein, 100 aa, Artificial Sequence; identical to SEQ ID NO: 3620
  Synthetic polypeptide

SEQ ID NO: 3625 - protein, 100 aa, Artificial Sequence; identical to SEQ ID NO: 3620
  Synthetic polypeptide

SEQ ID NO: 3626 - protein, 100 aa, Artificial Sequence; identical to SEQ ID NO: 3620
  Synthetic polypeptide

SEQ ID NO: 3627 - protein, 100 aa, Artificial Sequence; identical to SEQ ID NO: 3620
  Synthetic polypeptide

SEQ ID NO: 3628 - protein, 100 aa, Artificial Sequence; identical to SEQ ID NO: 3620
  Synthetic polypeptide

SEQ ID NO: 3629 - protein, 100 aa, Artificial Sequence
  Synthetic polypeptide
TWEAELVFSVDIDSELVEELPAEIELWLVLVAVGAGLLLLGLIILLLWKCDFFKRTRYYQIMPKYHAVRIREEERYPPPGSTLPTKKHWVTSWQTRDQYY

SEQ ID NO: 3630 - protein, 100 aa, Artificial Sequence
  Synthetic polypeptide
PLPASVVFFARWRLQPQSLEHVMQIHRECLPGTHVHRHRHEAAAPCQSRDPPGHAPPPLPGLPGGAGKPGTHLPAHQCQPVLPAGEARGQPSQALPPAGL

SEQ ID NO: 3631 - protein, 100 aa, Artificial Sequence
  Synthetic polypeptide
SQHFGGQGGWMDSLSPGVQDQPGQHGEPPSLQKFSQRSPPRRQRRDHQHRRPPSRRSPCPCAQRRAGQRRGAQGTEDVFANVPGLWSNRETSPAFRRDTS

SEQ ID NO: 3632 - protein, 100 aa, Artificial Sequence; identical to SEQ ID NO: 3631
  Synthetic polypeptide

SEQ ID NO: 3633 - protein, 100 aa, Artificial Sequence
  Synthetic polypeptide
GTQHFPGEQEENIRRYMGLSHSFTFSILCALEWTYCIHSIVEGTATISSRLTSPQTTWAVSPSAGSHAGMGLPDAIATEQLHRQQQEKWSGQSQHLLQGA

SEQ ID NO: 3634 - protein, 99 aa, Artificial Sequence
  Synthetic polypeptide
PQEAEEAALIEFHRSYRELFEFFCNNTTIHGAIRLVCSQHNRMKTAFWAVLWLCTFGMMYWQFGLLFGEYFSYPVSLNINLNSDKLVFPAVTICTLNPY

SEQ ID NO: 3635 - protein, 99 aa, Artificial Sequence
  Synthetic polypeptide
VCLSPLNCQLHEGCFECCIKCLGGVPYASLVATILCFSGVALFCGCGHVALAGTVAILEQHFSTNASDHALLSEVIQLMQYVIYGIASFFFLYGIILLA

SEQ ID NO: 3636 - protein, 99 aa, Artificial Sequence
  Synthetic polypeptide
AVKRKAITIMDEYVLYYYSNLSVPIGRFQNRVHLMGDILCNDGSLLLQDVQEADQGTYICEIRLKGESQVFKKAVVLHVLPEEPKELMVHVGGLIQMGC

SEQ ID NO: 3637 - protein, 99 aa, Artificial Sequence
  Synthetic polypeptide
GRAGWFMPVIPALWDAKDYLHSLGKARTAQVQKDARIGEAEAKRDAGIREAKAKQEKVSAQYLSEIEMAKAQRDYELKKAAYDIEVNTRRAQADLAYQL

SEQ ID NO: 3638 - protein, 99 aa, Artificial Sequence
  Synthetic polypeptide
PGTVAHACNPSTLGGQSGWPQALWEATSPETIGRRVAVGLGSCLAILILAICGLKLQRRWKRTQSQQGLQENSSGQSFFVRNKKRCRVLRDAETSPGLR

SEQ ID NO: 3639 - protein, 99 aa, Artificial Sequence
  Synthetic polypeptide
SQLLRRLRKENRLNPGGRGCGPLCSPITLGLLVAGVLVLLVSLGVAIHLCCRRRRARLRFMKQPQGEGISGTFVPQCLHGYYSNTTTSQKLLNPWILKT

SEQ ID NO: 3640 - protein, 99 aa, Artificial Sequence
  Synthetic polypeptide
PPQQEASWRASKHRVQQETIRDGAFRAPQCLCLRPVRSRDRVPGYREWWLYLWAHGAPGLCHPAMPPRRSVCAPGSRSHRLPLLLRAGFPGPTLRAGHR

SEQ ID NO: 3641 - protein, 99 aa, Artificial Sequence; identical to SEQ ID NO: 3640
  Synthetic polypeptide

SEQ ID NO: 3642 - protein, 99 aa, Artificial Sequence
  Synthetic polypeptide
KINILFRSIREVRSHGNPLPPKLERQTTKIQRITAYWSRNPQTEASAGISAKPPSTYAVKDHVATIVYTVLSSMLNPFIYSLRNKDLKQGLRKLMSKRS

SEQ ID NO: 3643 - protein, 99 aa, Artificial Sequence
  Synthetic polypeptide
VSVSTPDSGSWRKGLSGSSPKPASQAPLPSSLLSLSATTTKPTLPSGTGATTVTRTMNFTFATQMEFRSCCPGWSAMAQSRLTTTSASRVQAILLPQSP

SEQ ID NO: 3644 - protein, 99 aa, Artificial Sequence; identical to SEQ ID NO: 3643
  Synthetic polypeptide

SEQ ID NO: 3645 - protein, 99 aa, Artificial Sequence; identical to SEQ ID NO: 3643
  Synthetic polypeptide

SEQ ID NO: 3646 - protein, 99 aa, Artificial Sequence
  Synthetic polypeptide
QKKGLDIQEVQGYVLIAHNQVRQVPLQRLRIVRGTQLFEDNYALAVLDNGDPLNNTTPVTGASPGGLRELQLRSLTEILKGGVLIQRNPQLCYQDTILW

SEQ ID NO: 3647 - protein, 98 aa, Artificial Sequence
  Synthetic polypeptide
GSQMPRHLISDAHEWMNEIPTVPTYYPAKPQPRERAWRNQRGKKTLLSLTLGEFHEETGLQKGIQCAAQTYPGPFPEAISSSADPGLEESPAALEPPS

SEQ ID NO: 3648 - protein, 98 aa, Artificial Sequence; identical to SEQ ID NO: 3647
  Synthetic polypeptide

SEQ ID NO: 3649 - protein, 98 aa, Artificial Sequence
  Synthetic polypeptide
LMSVIPALWEAEVGGSLEVSHIPAVHPGSFRPKCDENGNYLPLQCYGSIGYCWCVFPNGTEVPNTRSRGHHNCSESLELEDPSSGLGVTKQDLGPVPM

SEQ ID NO: 3650 - protein, 98 aa, Artificial Sequence
  Synthetic polypeptide
PGVVFKCCGAANYTDWEKIPSMSKNRVPDSCCINVTVGCGINFNEKAIHKEGCVEKIGGWLRKNVLVVAAAALGIAFVLGIVFACCLVKSIRSGYEVM

SEQ ID NO: 3651 - protein, 98 aa, Artificial Sequence
  Synthetic polypeptide
AGHDGSHLQSQHFRRPRQEDRLRPGIQGNTSQRTSPRTHPSQACPASRQCMDMCTWELETPTHLASLPSIKPSSLQLHHQAFPASQPSPSVQTLPPAC

SEQ ID NO: 3652 - protein, 98 aa, Artificial Sequence; identical to SEQ ID NO: 3651
  Synthetic polypeptide

SEQ ID NO: 3653 - protein, 98 aa, Artificial Sequence; identical to SEQ ID NO: 3651
  Synthetic polypeptide

SEQ ID NO: 3654 - protein, 97 aa, Artificial Sequence
  Synthetic polypeptide
SQLLGRLRQENRLNPGGEPGIPTHHPRVYNIHSRTVTRYPANSIVVVGGCPVCRVGVLEDCFTFLGIFLAIILFPFGFICCFALRKRRCPNCGATFA

SEQ ID NO: 3655 - protein, 97 aa, Artificial Sequence
  Synthetic polypeptide
NTLKTEPPLPRQDYGAALRGLCEDALEGLLFLLLFSLLSAGALATALCSLPRAWALFPPRNPSALCSGSRLSEPLLPAGLEPGSPLRSFPGCRRRPH

SEQ ID NO: 3656 - protein, 97 aa, Artificial Sequence
  Synthetic polypeptide
ILSKQSLHCPDRTMVQPCGACAKTPWKACSSCYSSPCCLQERWPLPSAACPEPGPSSHPGIQALCAVAVVYLSPSSRLDWSLAPLFVPSLAAGGDPT

SEQ ID NO: 3657 - protein, 97 aa, Artificial Sequence
  Synthetic polypeptide
SQHFGRLRQVDYLRKYFGEKIGLYFAWLGVYTQMLIPASIVGIIVFLYGCATMDENIPSMEMCDQRHNITMCPLCDKTCSYWKMSSACATARASHLF

SEQ ID NO: 3658 - protein, 97 aa, Artificial Sequence
  Synthetic polypeptide
VCAPPRRAHRALVLRRASTFDAVRGPPRRCPPDADPRAPGLALPGRLLVSSRSGFCLPRRRRLLPQLRKVRRGLEQSCGAGLGWGAAAPGPRPPKRA

SEQ ID NO: 3659 - protein, 97 aa, Artificial Sequence
  Synthetic polypeptide
GFPIHVKLTFQDLSKQVEMSYGTVRDSAVYEYFRAKGTNPLEQDSTFAELWRTISKNGGADNCVSSPSEGIRKDPGAAGHRGPGCAEAEVVAAHGPL

SEQ ID NO: 3660 - protein, 97 aa, Artificial Sequence
  Synthetic polypeptide
PGVMFSVDIDSELVEELPAEIELWLVLVAVGAGLLLLGLIILLLWKCDFFKRTRYYQIMPKYHAVRIREEERYPPPGSTLPTKKHWVTSWQTRDQYY

SEQ ID NO: 3661 - protein, 97 aa, Artificial Sequence
  Synthetic polypeptide
SEDCSSAHPFKLLRLPESGCVPLSPGPGDHGESTSKLASVTRSVDKDPGIPRALSLSGSSSSPQAQVMVHMANPRQPLPASGLATGMPQQPAAYALG

SEQ ID NO: 3662 - protein, 97 aa, Artificial Sequence; identical to SEQ ID NO: 3661
  Synthetic polypeptide

SEQ ID NO: 3663 - protein, 97 aa, Artificial Sequence; identical to SEQ ID NO: 3661
  Synthetic polypeptide

SEQ ID NO: 3664 - protein, 97 aa, Artificial Sequence
  Synthetic polypeptide
DQPGQHSETLRLKKKKKKKVLLHSKNIRKLGNSQHPITYFPSLQALFIVSLLITLFCIQDKDLQSSLNLQKSMSKNATATPHAILSQLTSLQATPKL

SEQ ID NO: 3665 - protein, 97 aa, Artificial Sequence
  Synthetic polypeptide
DLVVFISVSIVPLLLPSLSCCLLKKVLASSSPSATIHALLALKFILAFAIPDKPRHIQMKLARLEFESLEALKQQQMKLVTENLKEEPMESGKEKAT

SEQ ID NO: 3666 - protein, 97 aa, Artificial Sequence; identical to SEQ ID NO: 3665
  Synthetic polypeptide

SEQ ID NO: 3667 - protein, 97 aa, Artificial Sequence; identical to SEQ ID NO: 3665
  Synthetic polypeptide

SEQ ID NO: 3668 - protein, 97 aa, Artificial Sequence; identical to SEQ ID NO: 3665
  Synthetic polypeptide

SEQ ID NO: 3669 - protein, 97 aa, Artificial Sequence; identical to SEQ ID NO: 3665
  Synthetic polypeptide

SEQ ID NO: 3670 - protein, 97 aa, Artificial Sequence
  Synthetic polypeptide
PGTVAHACNPSTSGGRGKQIIWGQEFETSLDNMACRALMITAILLGFLGLLLGIAGLRCTNIGGLELSRKAKLAATAGALHILADLLAANQPIGSVS

SEQ ID NO: 3671 - protein, 96 aa, Artificial Sequence
  Synthetic polypeptide
LAFSGLQLLSTIARGGSVRGTMVQPCGACAKTPWKACSSCYSSPCCLQERWPLPSAACPEPGPSSHPVTTTMTQTMTTLSTLSRNPSALCSGSRLS

SEQ ID NO: 3672 - protein, 96 aa, Artificial Sequence
  Synthetic polypeptide
SQHYGRLRVDDVVKSMYPPLDPKLLDARTTALLLSVSHLVLVTRNACHLTGGLDWIDQSLSAAEEHLEVLREAALASEPDKGLPGPEGFLQEQSAI

SEQ ID NO: 3673 - protein, 96 aa, Artificial Sequence; identical to SEQ ID NO: 3672
  Synthetic polypeptide

SEQ ID NO: 3674 - protein, 96 aa, Artificial Sequence
  Synthetic polypeptide
RQWKEPWTNDFEIYYCLHLVKTPKFCPSFNLEIIPRMTGNHTSLEDYTLFGYAEISSPSVGLQIYSVCCITSFGKRTDLTMSTSSCTSVKQMGYRR

SEQ ID NO: 3675 - protein, 96 aa, Artificial Sequence; identical to SEQ ID NO: 3674
  Synthetic polypeptide

SEQ ID NO: 3676 - protein, 96 aa, Artificial Sequence; identical to SEQ ID NO: 3674
  Synthetic polypeptide

SEQ ID NO: 3677 - protein, 96 aa, Artificial Sequence
  Synthetic polypeptide
GQEFKATRASGLLPGPTQAKPVQPAGSVWTCAPGNWRPLHTWLPFLQSNPVPSSCIIRPSQHPSPAHQCRHCLPPAEAGVQWCNLGSLQPPPPGFK

SEQ ID NO: 3678 - protein, 96 aa, Artificial Sequence
  Synthetic polypeptide
LCSSFTFSQDCEASPAMWNSMVTLAGISVYIAYSAAAFREALCLLEEKALLDQVDISFGWSLALGWISFIAELLTGAAFLAAARELSLRRRQDQAI

SEQ ID NO: 3679 - protein, 96 aa, Artificial Sequence
  Synthetic polypeptide
VDGVGAGGGVCTGREQQPDLPAAVLPDGGGRGEPVHLLLTPRQRHAEVLAHPRPPRAAHALHPGLGGLHAAAGRGGGRCTQRLHQLEPVLQRVPLG

SEQ ID NO: 3680 - protein, 96 aa, Artificial Sequence; identical to SEQ ID NO: 3679
  Synthetic polypeptide

SEQ ID NO: 3681 - protein, 96 aa, Artificial Sequence; identical to SEQ ID NO: 3679
  Synthetic polypeptide

SEQ ID NO: 3682 - protein, 95 aa, Artificial Sequence
  Synthetic polypeptide
LAFSGLQLLSTIARGGSVRGTMVQPCGACAKTPWKACSSCYSSPCCLQERWPLPSAACPEPGPSSHPVTTTMTQTMTTLSTLRNPSALCSGSRLS

SEQ ID NO: 3683 - protein, 95 aa, Artificial Sequence
  Synthetic polypeptide
GAPLPSQLPRPGGRWGGQPPARPAAPSGREVGGSAPRPASRPVREVRGASARPPLLGSEELLCPASRPVREGGGGVSPPPGQLPRPGESWRSGMA

SEQ ID NO: 3684 - protein, 95 aa, Artificial Sequence
  Synthetic polypeptide
TWEVELAVSQDFTTALQPGQLTEDSAHGHPLPHGQPLPRVHGLRHQQHRPHPPAEDHSGFCLWHLLHTIGPLLGGGLGSLHLQHQRRGHEQAQQL

SEQ ID NO: 3685 - protein, 95 aa, Artificial Sequence; identical to SEQ ID NO: 3684
  Synthetic polypeptide

SEQ ID NO: 3686 - protein, 95 aa, Artificial Sequence; identical to SEQ ID NO: 3684
  Synthetic polypeptide

SEQ ID NO: 3687 - protein, 95 aa, Artificial Sequence
  Synthetic polypeptide
CLPGRVMSELETACGKPMRHKTSSSSLRMGAYVFIGVGAVTMLMGFLGCIGAVNEVRCLLGLYFAFLLLILIAQVTAGALFYFNMGKLKQEMGGI

SEQ ID NO: 3688 - protein, 95 aa, Artificial Sequence
  Synthetic polypeptide
GRAGWFMPVIPALWDAKVFKVASSDLVNMGISVVSYTLKDIHDDQDYLHSLGKARTAQVQKDARIGEAEAKRDAGIREAKAKQEKVSAQYLSEIE

SEQ ID NO: 3689 - protein, 95 aa, Artificial Sequence
  Synthetic polypeptide
PGAVAHTCNPSTWRGQCRRIICSQSFEGNNNYDTPELRTFPALSTRFIRIYPERATHGGLGLRMELLGCEVEGGTTVLATEKPTVIDSTIQSGIK

SEQ ID NO: 3690 - protein, 95 aa, Artificial Sequence
  Synthetic polypeptide
LELTQISFNRYSITRSKVFNINDNGTITTSNSLDREISAWYNLSITATEKYNIEQISSIPLYVQVLNINDHAPEFSQYYETYVCENAGSGQGLFF

SEQ ID NO: 3691 - protein, 95 aa, Artificial Sequence
  Synthetic polypeptide
NGRESLAPSTLGRGVQPEQIGLLLPDILIRGGCGEGVVPLPLHQHPVEAARDSAIPGGGHAGQLHLRLPLQPGLLQPGELLSLPPPDVWKLLYFQ

SEQ ID NO: 3692 - protein, 95 aa, Artificial Sequence; identical to SEQ ID NO: 3691
  Synthetic polypeptide

SEQ ID NO: 3693 - protein, 95 aa, Artificial Sequence; identical to SEQ ID NO: 3691
  Synthetic polypeptide

SEQ ID NO: 3694 - protein, 95 aa, Artificial Sequence; identical to SEQ ID NO: 3691
  Synthetic polypeptide

SEQ ID NO: 3695 - protein, 95 aa, Artificial Sequence; identical to SEQ ID NO: 3691
  Synthetic polypeptide

SEQ ID NO: 3696 - protein, 94 aa, Artificial Sequence
  Synthetic polypeptide
PMRGRTFAVLFTTLPPAQNLAYVCTGTDMKLRLPASPETHLDMLRHLYQGCQVVQGNLELTYLPTNASLSFLQTTTFLRTWDPAPSSAPCTTKR

SEQ ID NO: 3697 - protein, 94 aa, Artificial Sequence
  Synthetic polypeptide
RAWWLTPVIPALWEAEFSVDIDSELVEELPAEIELWLVLVAVGAGLLLLGLIILLLWKCGFFKRARTRALYEAKRQKAEMKSQPSETERLTDDY

SEQ ID NO: 3698 - protein, 94 aa, Artificial Sequence
  Synthetic polypeptide
DQVPWLTPVIPALWEAETGGSQVCTGTDMKLRLPASPETHLDMLRHLYQGCQVVQGNLELTYLPTNASLSFLQTTTFLRTWDPAPSSAPCTTKR

SEQ ID NO: 3699 - protein, 94 aa, Artificial Sequence
  Synthetic polypeptide
PGAVAHTCNPSTLGGRDGRITSVHRHRHEAAAPCQSRDPPGHAPPPLPGLPGGAGKPGTHLPAHQCQPVLPADNYLSTDVGSCTLVCPLHNQEV

SEQ ID NO: 3700 - protein, 94 aa, Artificial Sequence
  Synthetic polypeptide
TSVSLSMEQKLAPHPSVSDCSDVCHRPRRHHLQNLHGRRLGHELLPLRAVQHPGHSHSHRSHHQPSGHHPPGRGVWLHSPMAHQDRGPKDGEKL

SEQ ID NO: 3701 - protein, 94 aa, Artificial Sequence; identical to SEQ ID NO: 3700
  Synthetic polypeptide

SEQ ID NO: 3702 - protein, 94 aa, Artificial Sequence; identical to SEQ ID NO: 3700
  Synthetic polypeptide

SEQ ID NO: 3703 - protein, 94 aa, Artificial Sequence; identical to SEQ ID NO: 3700
  Synthetic polypeptide

SEQ ID NO: 3704 - protein, 94 aa, Artificial Sequence; identical to SEQ ID NO: 3700
  Synthetic polypeptide

SEQ ID NO: 3705 - protein, 94 aa, Artificial Sequence; identical to SEQ ID NO: 3700
  Synthetic polypeptide

SEQ ID NO: 3706 - protein, 94 aa, Artificial Sequence
  Synthetic polypeptide
GRAGWFMPVIPALWDAKDYLHSLGKARTAQVQKDARIGEAEAKRDAGIREAKAKQEKVSAQYLSEIEMAKAQRDYELKKAAYDIEVNTRRAQAD

SEQ ID NO: 3707 - protein, 94 aa, Artificial Sequence
  Synthetic polypeptide
EVPSSGRGCLVKQNPRGGASDIGKSWVLPEHHCGCGSHCGGDCQRGDLLCSYDPGLRSDSSTGFHSGDSLQFHDFCFESNTVFSKVPLRSLSGC

SEQ ID NO: 3708 - protein, 94 aa, Artificial Sequence; identical to SEQ ID NO: 3707
  Synthetic polypeptide

SEQ ID NO: 3709 - protein, 94 aa, Artificial Sequence; identical to SEQ ID NO: 3707
  Synthetic polypeptide

SEQ ID NO: 3710 - protein, 93 aa, Artificial Sequence
  Synthetic polypeptide
PGREIYKDRQKFSEQVFKVASSDLVNMGISVVSYTLKDIHDDQDYLHSLGKARTAQVQKDARIGEAEAKRDAGIREAKAKQEKVSAQYLSEIE

SEQ ID NO: 3711 - protein, 93 aa, Artificial Sequence
  Synthetic polypeptide
HALAVLHLVRHRQHGAATHGLTHRLAAQPGRPDRQTLQQQRPGRPLHQGQVCDGALLHLQQPHQCGLRQRLSQHQLREDLLHLRHAHWLPHVC

SEQ ID NO: 3712 - protein, 93 aa, Artificial Sequence; identical to SEQ ID NO: 3711
  Synthetic polypeptide

SEQ ID NO: 3713 - protein, 93 aa, Artificial Sequence; identical to SEQ ID NO: 3711
  Synthetic polypeptide

SEQ ID NO: 3714 - protein, 93 aa, Artificial Sequence; identical to SEQ ID NO: 3711
  Synthetic polypeptide

SEQ ID NO: 3715 - protein, 92 aa, Artificial Sequence
  Synthetic polypeptide
SQHYGRLRVDDVVKSMYPPLDPKLLDARTTALLLSVSHLVLVTRNACHLTGGLDWIDQSLSAAEEHLEVLREAALASEPDKGLPGPEGFLQE

SEQ ID NO: 3716 - protein, 92 aa, Artificial Sequence
  Synthetic polypeptide
PCAAAHACNPSTLEGREKKDTVLRQVRLDPCDLQPIFDDMLHFLNPEELRVIEEIPQAEDKLDRLFEIIGVKSQEASQTLLDSVYSHLPDLL

SEQ ID NO: 3717 - protein, 92 aa, Artificial Sequence
  Synthetic polypeptide
SQHFGRLRWLDHLRSGVQDQPGQHEFVSNGRGSHDKEQTSQSSHQDRDEKCHLGMGLLPLQYPELAQADPQNEKRQEGFQGQEREGEAAAAH

SEQ ID NO: 3718 - protein, 92 aa, Artificial Sequence; identical to SEQ ID NO: 3717
  Synthetic polypeptide

SEQ ID NO: 3719 - protein, 92 aa, Artificial Sequence
  Synthetic polypeptide
AEIAPLHSSLVESIDDYVNVPESGESAEASLDGSREYVNVSQELHPGAAKTEPVEAESVLEPGLPGTAELGSWKWLWGPHMASCPCSSLTTA

SEQ ID NO: 3720 - protein, 92 aa, Artificial Sequence
  Synthetic polypeptide
TSVSLSMEQKLAPHPSVSDCSDVCHRPRRHHLQNLHGRRLGHELLPLRAVQHPGHSHSHRSHHQPSGHHPPGRGVWLHSPMAHQDRGPKDGE

SEQ ID NO: 3721 - protein, 92 aa, Artificial Sequence
  Synthetic polypeptide
DVICFSLLSTMIVRLPQPRGTERLLLSLLPAHIAMEMKAEIIQRLQGPKAGQMENTNNFHNLYVKRHTNVSILYADIVGFTRLASDCSPGEL

SEQ ID NO: 3722 - protein, 92 aa, Artificial Sequence
  Synthetic polypeptide
SQHFRRPRQADHLGSGVRDQPGQHGYIQACRALMITAILLGFLGLLLGIAGLRCTNIGGLELSRKAKLAATAGALHILADLLAANQPIGSVS

SEQ ID NO: 3723 - protein, 92 aa, Artificial Sequence
  Synthetic polypeptide
MGRSTGQESQERGIQALTLTLTFWQVQPRSPVHRLFHPGDSAPRWPGHHRLLPVPAAGPAGQTDSHLPEPAAGEPAHEASQAPCRMPPSMAT

SEQ ID NO: 3724 - protein, 92 aa, Artificial Sequence
  Synthetic polypeptide
TQEAAVAMSQDCATALQPGRQLADDLISDIFTTIGSVTVALLLILLLAIVASVVTSNKRATQGTYSPSRQEKEGSRVEMWNLMPPPAMERLI

SEQ ID NO: 3725 - protein, 92 aa, Artificial Sequence; identical to SEQ ID NO: 3724
  Synthetic polypeptide

SEQ ID NO: 3726 - protein, 92 aa, Artificial Sequence; identical to SEQ ID NO: 3724
  Synthetic polypeptide

SEQ ID NO: 3727 - protein, 92 aa, Artificial Sequence; identical to SEQ ID NO: 3724
  Synthetic polypeptide

SEQ ID NO: 3728 - protein, 92 aa, Artificial Sequence; identical to SEQ ID NO: 3724
  Synthetic polypeptide

SEQ ID NO: 3729 - protein, 92 aa, Artificial Sequence
  Synthetic polypeptide
YKNLFSAFFGRSEHLATSGRHRGADGSWEVVPDPGLISDQRVCRRRDHHRWHQHRQDRPARPPLQDHHHPPGPCFVFGFPPNEPGPIQPVLG

SEQ ID NO: 3730 - protein, 92 aa, Artificial Sequence; identical to SEQ ID NO: 3729
  Synthetic polypeptide

SEQ ID NO: 3731 - protein, 92 aa, Artificial Sequence; identical to SEQ ID NO: 3729
  Synthetic polypeptide

SEQ ID NO: 3732 - protein, 92 aa, Artificial Sequence; identical to SEQ ID NO: 3729
  Synthetic polypeptide

SEQ ID NO: 3733 - protein, 92 aa, Artificial Sequence; identical to SEQ ID NO: 3729
  Synthetic polypeptide

SEQ ID NO: 3734 - protein, 92 aa, Artificial Sequence; identical to SEQ ID NO: 3729
  Synthetic polypeptide

SEQ ID NO: 3735 - protein, 92 aa, Artificial Sequence; identical to SEQ ID NO: 3729
  Synthetic polypeptide

SEQ ID NO: 3736 - protein, 91 aa, Artificial Sequence
  Synthetic polypeptide
GQEIETILANKVVTLTANDKTSVSFSSLPGQGVIYNVIVWDPFLNTSAAYIPAHTYACSFEAGEGSCASLAVLYLLLCLSTSSPSFITGLF

SEQ ID NO: 3737 - protein, 91 aa, Artificial Sequence
  Synthetic polypeptide
WKYRPKQLGVAVASSPTSISPLCQVQHPAKMKRKANRWRLSLRNGLLPSTPRATQQIPMEFLNSRVADIPIKPCISVYPMTPSQTHCSISW

SEQ ID NO: 3738 - protein, 91 aa, Artificial Sequence; identical to SEQ ID NO: 3737
  Synthetic polypeptide

SEQ ID NO: 3739 - protein, 91 aa, Artificial Sequence; identical to SEQ ID NO: 3737
  Synthetic polypeptide

SEQ ID NO: 3740 - protein, 91 aa, Artificial Sequence; identical to SEQ ID NO: 3737
  Synthetic polypeptide

SEQ ID NO: 3741 - protein, 91 aa, Artificial Sequence; identical to SEQ ID NO: 3737
  Synthetic polypeptide

SEQ ID NO: 3742 - protein, 91 aa, Artificial Sequence; identical to SEQ ID NO: 3737
  Synthetic polypeptide

SEQ ID NO: 3743 - protein, 90 aa, Artificial Sequence
  Synthetic polypeptide
LSISHPTYFSSNHLSLPDPARQIVFADWHSLQVGGLICAGVLCAMGIIIVMSEWRSSGEQAGRGWGSPPLTTQLSPTGAKCKCKFGQKSG

SEQ ID NO: 3744 - protein, 90 aa, Artificial Sequence; identical to SEQ ID NO: 3743
  Synthetic polypeptide

SEQ ID NO: 3745 - protein, 90 aa, Artificial Sequence
  Synthetic polypeptide
NLCCPVHHSTSSTEFGLCVHRHRHEAAAPCQSRDPPGHAPPPLPGLPGGAGKPGTHLPAHQCQPVLPADNYLSTDVGSCTLVCPLHNQEV

SEQ ID NO: 3746 - protein, 90 aa, Artificial Sequence
  Synthetic polypeptide
QTERNSINISKKDIYTKTPTVGHQHQRPKVERNQSRKAENSKNQNASSPPKDCSSLPATEQSWMENDFDELTEAGFRRYSCPTVYQAHRV

SEQ ID NO: 3747 - protein, 90 aa, Artificial Sequence; identical to SEQ ID NO: 3746
  Synthetic polypeptide

SEQ ID NO: 3748 - protein, 90 aa, Artificial Sequence; identical to SEQ ID NO: 3746
  Synthetic polypeptide

SEQ ID NO: 3749 - protein, 90 aa, Artificial Sequence
  Synthetic polypeptide
MPSSTVISWRCSEPHRSSQHWGRHLREGGRQHRCQPDCVPGCAGLYQCCPLLAGRHGGHPRAQLPAHLLLHPAACSLLDGCGVGGLPSGS

SEQ ID NO: 3750 - protein, 90 aa, Artificial Sequence; identical to SEQ ID NO: 3749
  Synthetic polypeptide

SEQ ID NO: 3751 - protein, 90 aa, Artificial Sequence; identical to SEQ ID NO: 3749
  Synthetic polypeptide

SEQ ID NO: 3752 - protein, 90 aa, Artificial Sequence; identical to SEQ ID NO: 3749
  Synthetic polypeptide

SEQ ID NO: 3753 - protein, 90 aa, Artificial Sequence
  Synthetic polypeptide
YIYRGAASTSPGSRTTSQPSTHSTTPTTPPRRLLPPSTLPHLLRPTALPRPPAPLPLPSRPHLPPFPLLPRLHLPTGHLLPPALLQGLLS

SEQ ID NO: 3754 - protein, 90 aa, Artificial Sequence
  Synthetic polypeptide
IYTGALHQLHQGQEQPASQVPTQQRLPHLLAASCPHLHSPTSCAPLPSPAPQRPYPSHPVPTFHPSPSSPGSTSQQGTSSLPPSSKAFCL

SEQ ID NO: 3755 - protein, 90 aa, Artificial Sequence
  Synthetic polypeptide
SPLTIPLPLPIFLNDEFGHSINDYSISPDGQFILLEYNYVKQWRHSYTASYDIYDLNKRQLITEERIPNNTQWVTWSPVGHKLVSICLEQ

SEQ ID NO: 3756 - protein, 90 aa, Artificial Sequence
  Synthetic polypeptide
CLPGRVMSELETACGKPMRHKTSSSSLRMGAYVFIGVGAVTMLMGFLGCIGAVNEVRCLLGLYFAFLLLILIAQVTAGALFYFNMGKVSP

SEQ ID NO: 3757 - protein, 90 aa, Artificial Sequence
  Synthetic polypeptide
SNNENQLPRAAIDGEESQEYSGSKKGVLLSPRLEGSGTITAPCSLNLPNSSHPPASASRVAETTDVSHCTWPVSFSSLPPKCLSRNHPFC

SEQ ID NO: 3758 - protein, 90 aa, Artificial Sequence
  Synthetic polypeptide
LCHSLPFQILSKLSYIPFWSLRVLTAECEITAALNAASSVWEESPTPPWWPPSSASPGWPYSAAVGMWLSQAPWRFLSNTSPPTPVTMPC

SEQ ID NO: 3759 - protein, 90 aa, Artificial Sequence; identical to SEQ ID NO: 3758
  Synthetic polypeptide

SEQ ID NO: 3760 - protein, 90 aa, Artificial Sequence; identical to SEQ ID NO: 3758
  Synthetic polypeptide

SEQ ID NO: 3761 - protein, 90 aa, Artificial Sequence; identical to SEQ ID NO: 3758
  Synthetic polypeptide

SEQ ID NO: 3762 - protein, 90 aa, Artificial Sequence; identical to SEQ ID NO: 3758
  Synthetic polypeptide

SEQ ID NO: 3763 - protein, 90 aa, Artificial Sequence; identical to SEQ ID NO: 3758
  Synthetic polypeptide

SEQ ID NO: 3764 - protein, 90 aa, Artificial Sequence
  Synthetic polypeptide
EPCAEGRVKRPPHGPLCPPSLLQKSLPWKYRHQKPYPQGTQRCLPLCPGLEVPTRPVRPNRGSGRSGGGHSGGRDSGNSAICGSAWRRVT

SEQ ID NO: 3765 - protein, 90 aa, Artificial Sequence; identical to SEQ ID NO: 3764
  Synthetic polypeptide

SEQ ID NO: 3766 - protein, 90 aa, Artificial Sequence
  Synthetic polypeptide
SLRGCFECCIKCLGGVPYASLVATILCFSGVALFCGCGHVALAGTVAILEQHFSTNASDHALLSEVIQLMQYVIYGIASFFFLYGIILLA

SEQ ID NO: 3767 - protein, 90 aa, Artificial Sequence
  Synthetic polypeptide
QGSTQCSPQDKSGVLPFLCERGLDHAIPHYVTMYLPLLLVLVANPILFQKTVTAVASLLKGRQGIYTENERRMGAVIKIRFFKIMLVLII

SEQ ID NO: 3768 - protein, 90 aa, Artificial Sequence
  Synthetic polypeptide
IIASPGAFAKMQPALLYLVPACIGFPVLVALAKGEVTEMFSYESSAEILPHTPRLTHFPTVSGSPASLADSMQQKLAGPRRRRPQNPSAM

SEQ ID NO: 3769 - protein, 89 aa, Artificial Sequence
  Synthetic polypeptide
MIPESSLLLCGRHVGTGRSGPCDQLHWFRGRKLQDWRDGLSLYQSHQILSLPLQLDLLYPGRSDPGLRGVDPGRQEQFHLCPANLLQLA

SEQ ID NO: 3770 - protein, 89 aa, Artificial Sequence; identical to SEQ ID NO: 3769
  Synthetic polypeptide

SEQ ID NO: 3771 - protein, 89 aa, Artificial Sequence
  Synthetic polypeptide
YIQGRCINFTRVKNNQPAKYPLNNAYHTSSPPPAPIYTPPPPAPHCPPPPPSAPTPPIPSPPSTLPPPPQAPPPNRAPPPSRPPPRPSV

SEQ ID NO: 3772 - protein, 89 aa, Artificial Sequence
  Synthetic polypeptide
RQWKDLPLSVADIGELIDARTLPSTCVGHMAGHDHSAPGRPVGCEEKARDEALHQRRDPHTVPGPPSDRHRRHLWPLRSPPLEGQAQPV

SEQ ID NO: 3773 - protein, 89 aa, Artificial Sequence; identical to SEQ ID NO: 3772
  Synthetic polypeptide

SEQ ID NO: 3774 - protein, 89 aa, Artificial Sequence
  Synthetic polypeptide
FLGACLGFLQSDPSDGGPVQQHQGHLPHRTFWTTRTSGSRRVARTQRIGWTAWSSGPKRRKRSKWKKRKNGDTWSCRKSRGKGRKGRPW

SEQ ID NO: 3775 - protein, 89 aa, Artificial Sequence; identical to SEQ ID NO: 3774
  Synthetic polypeptide

SEQ ID NO: 3776 - protein, 89 aa, Artificial Sequence
  Synthetic polypeptide
QLTLEQHGFSNCVGPLIWGFFSASATPRRQDQPLPCLLLSLLNMKTMRMKTFMMIQFHLIVGVQWCDLSSLQPLPPGLKQSSHLSLQSS

SEQ ID NO: 3777 - protein, 89 aa, Artificial Sequence; identical to SEQ ID NO: 3776
  Synthetic polypeptide

SEQ ID NO: 3778 - protein, 89 aa, Artificial Sequence; identical to SEQ ID NO: 3776
  Synthetic polypeptide

SEQ ID NO: 3779 - protein, 89 aa, Artificial Sequence
  Synthetic polypeptide
GASLPGRPSSEMWGAPLPCRPVWDVRSTSARPRPCLGGSLKTWPARGFVPAWSVCPSTSSSAPVLTVAGGSTPCSSARSSNFCTKYSAL

SEQ ID NO: 3780 - protein, 89 aa, Artificial Sequence; identical to SEQ ID NO: 3779
  Synthetic polypeptide

SEQ ID NO: 3781 - protein, 89 aa, Artificial Sequence; identical to SEQ ID NO: 3779
  Synthetic polypeptide

SEQ ID NO: 3782 - protein, 89 aa, Artificial Sequence
  Synthetic polypeptide
QIRKLAGGVILGVALWLRHDPQTTNLLYLELGDKPAPNTFYVGIYILIAVGAVMMFVGFLGCYGAIQESQCLLGTFFTCLVILFACEVA

SEQ ID NO: 3783 - protein, 89 aa, Artificial Sequence
  Synthetic polypeptide
SSIPGPRTNNRPVRNRATQQEVSSGRWLCCHPDRPVRWLLLQRHHRLVTLLPLLLLHPQPALDRLWPHLEQPQLYRPQAPQWLRAWQPH

SEQ ID NO: 3784 - protein, 89 aa, Artificial Sequence
  Synthetic polypeptide
VCAPPRRAHRALVLRRASTFDAVRGPPRRCPPDADPRAPGLALPGRLLVSHSRRTPSRESSRSGFCLPRRRRLLPQLRKNVSVKTTSWP

SEQ ID NO: 3785 - protein, 89 aa, Artificial Sequence
  Synthetic polypeptide
SQHFRRPRQADHLGSGVRDQPGQHGLPGTHDHRHPPGLPRPLARHSGPALHQHWGPGALQESQAGGHRRGPPHSGRSPGCKSAHRQCFL

SEQ ID NO: 3786 - protein, 88 aa, Artificial Sequence
  Synthetic polypeptide
PMRGRTFAVLFTTLPPAQNLAYVCTGTDMKLRLPASPETHLDMLRHLYQGCQVVQGNLELTYLPTNASLSFLQVRPVGNPARPCLQLG

SEQ ID NO: 3787 - protein, 88 aa, Artificial Sequence
  Synthetic polypeptide
NTLKTEPPLPRQDYGAALRGLCEDALEGLLFLLLFSLLSAGALATALCSLPRAWALFPPSDDYDDTDDDDPFNPQQESKRFVQWQSSI

SEQ ID NO: 3788 - protein, 88 aa, Artificial Sequence
  Synthetic polypeptide
ILSKQSLHCPDRTMVQPCGACAKTPWKACSSCYSSPCCLQERWPLPSAACPEPGPSSHPVTTTMTQTMTTLSTLSRNPSALCSGSRLS

SEQ ID NO: 3789 - protein, 88 aa, Artificial Sequence
  Synthetic polypeptide
QARWLTPVVPALSEAKARRIPSSCTRCSMTSTRAYSTTRRTPSSRRSSSTTARWCSRPSWVSAWASSRRRRRRRRSPRPSPRCSRRRP

SEQ ID NO: 3790 - protein, 88 aa, Artificial Sequence
  Synthetic polypeptide
GAPLPSRDPVWEVRSVSARPPRLRSEETLRPAAAPSEKLGASPPGSRPVWESHGGLAWLSDRGGVPLPAGLLPHRHQLPAQQAHGPQE

SEQ ID NO: 3791 - protein, 88 aa, Artificial Sequence
  Synthetic polypeptide
ISYQKTLPPCRRMDTSRIQATTSVTQMTPSKPERRSWGMRPSTLPTPPSCLARVSVFLSMSTLRCRPPTLRMKRLPVAVCSCTPPEST

SEQ ID NO: 3792 - protein, 88 aa, Artificial Sequence; identical to SEQ ID NO: 3791
  Synthetic polypeptide

SEQ ID NO: 3793 - protein, 88 aa, Artificial Sequence; identical to SEQ ID NO: 3791
  Synthetic polypeptide

SEQ ID NO: 3794 - protein, 88 aa, Artificial Sequence
  Synthetic polypeptide
DQVPWLTPVIPALWEAETGGSQVCTGTDMKLRLPASPETHLDMLRHLYQGCQVVQGNLELTYLPTNASLSFLQVRPVGNPARPCLQLG

SEQ ID NO: 3795 - protein, 88 aa, Artificial Sequence
  Synthetic polypeptide
PGAVAHTCNPSTLGGRDGRITSVHRHRHEAAAPCQSRDPPGHAPPPLPGLPGGAGKPGTHLPAHQCQPVLPAGEARGQPSQALPPAGL

SEQ ID NO: 3796 - protein, 88 aa, Artificial Sequence
  Synthetic polypeptide
TAGRVGQEADGSPHAGRGRSSAWLPAVWLQHWSHQCPPEGDRGVLQPDMGPPLWGEHPAHHAHHALVPLSGHLFCWGHDWLLLCGPFR

SEQ ID NO: 3797 - protein, 88 aa, Artificial Sequence; identical to SEQ ID NO: 3796
  Synthetic polypeptide

SEQ ID NO: 3798 - protein, 88 aa, Artificial Sequence; identical to SEQ ID NO: 3796
  Synthetic polypeptide

SEQ ID NO: 3799 - protein, 88 aa, Artificial Sequence
  Synthetic polypeptide
SVALPRSCTHSFLPPCEEVACFPFHHDCKFSEASPAMWELLWARCTWHRCGQGLLHVLRRAGHPADTGHVPEPGRAHEHLRALPAEAH

SEQ ID NO: 3800 - protein, 88 aa, Artificial Sequence; identical to SEQ ID NO: 3799
  Synthetic polypeptide

SEQ ID NO: 3801 - protein, 88 aa, Artificial Sequence; identical to SEQ ID NO: 3799
  Synthetic polypeptide

SEQ ID NO: 3802 - protein, 87 aa, Artificial Sequence
  Synthetic polypeptide
NTLKTEPPLPRQDYGAALRGLCEDALEGLLFLLLFSLLSAGALATALCSLPRAWALFPPSDDYDDTDDDDPFNPQESKRFVQWQSSI

SEQ ID NO: 3803 - protein, 87 aa, Artificial Sequence
  Synthetic polypeptide
ILSKQSLHCPDRTMVQPCGACAKTPWKACSSCYSSPCCLQERWPLPSAACPEPGPSSHPVTTTMTQTMTTLSTLRNPSALCSGSRLS

SEQ ID NO: 3804 - protein, 87 aa, Artificial Sequence
  Synthetic polypeptide
LNFLAFIFLPCCMLPALEHQTPSSSAFGLLDLHEWFARGSWAFSHRLKAALSASLLLRFWDSDWLPCSTACRRPIVGLHLVIVCHTT

SEQ ID NO: 3805 - protein, 87 aa, Artificial Sequence; identical to SEQ ID NO: 3804
  Synthetic polypeptide

SEQ ID NO: 3806 - protein, 87 aa, Artificial Sequence; identical to SEQ ID NO: 3804
  Synthetic polypeptide

SEQ ID NO: 3807 - protein, 87 aa, Artificial Sequence
  Synthetic polypeptide
KCRISPYPTTELHLHNQCPSSESCCSAPRRATTQRERCGRCQLCSSFWEARRSGSWQKEPAQASQKMTLRLQVWKAALPCQVPKMMW

SEQ ID NO: 3808 - protein, 87 aa, Artificial Sequence; identical to SEQ ID NO: 3807
  Synthetic polypeptide

SEQ ID NO: 3809 - protein, 87 aa, Artificial Sequence; identical to SEQ ID NO: 3807
  Synthetic polypeptide

SEQ ID NO: 3810 - protein, 87 aa, Artificial Sequence
  Synthetic polypeptide
LIRDTLSPLGKGPRSSPMRRCVTLSRCVGLRGKGIRTSPSMTNKPTLSATWVERILTYLPRQPGHQTPNGLATGASDNGFFCWDPLD

SEQ ID NO: 3811 - protein, 87 aa, Artificial Sequence
  Synthetic polypeptide
GRARWLTPVIPALWEADAGGSRGQEIKTILANMTLLSNSSETGTASGLVFILRPEQSTCTWYLGTSGIQPVQNMAILLSYSERDPVP

SEQ ID NO: 3812 - protein, 87 aa, Artificial Sequence
  Synthetic polypeptide
KPPGFIPAPSYSSCGTWRLTLVLALATLIAAFGSSFQYGYNVAAVNSPALLMQQFYNETYYGRTGEFMEDFPLTLLWSVTVSMFPFG

SEQ ID NO: 3813 - protein, 87 aa, Artificial Sequence
  Synthetic polypeptide
ISLMRSDGFKKGSFPAQALFFCLPSCEMCLLPTTTTVRPPQPHGTVSPLNLFCKVPSFGLLPSPIVNSCWHLAGTMSFQAGGEDTGQ

SEQ ID NO: 3814 - protein, 87 aa, Artificial Sequence; identical to SEQ ID NO: 3813
  Synthetic polypeptide

SEQ ID NO: 3815 - protein, 87 aa, Artificial Sequence; identical to SEQ ID NO: 3813
  Synthetic polypeptide

SEQ ID NO: 3816 - protein, 87 aa, Artificial Sequence; identical to SEQ ID NO: 3813
  Synthetic polypeptide

SEQ ID NO: 3817 - protein, 87 aa, Artificial Sequence; identical to SEQ ID NO: 3813
  Synthetic polypeptide

SEQ ID NO: 3818 - protein, 87 aa, Artificial Sequence; identical to SEQ ID NO: 3813
  Synthetic polypeptide

SEQ ID NO: 3819 - protein, 87 aa, Artificial Sequence; identical to SEQ ID NO: 3813
  Synthetic polypeptide

SEQ ID NO: 3820 - protein, 87 aa, Artificial Sequence; identical to SEQ ID NO: 3813
  Synthetic polypeptide

SEQ ID NO: 3821 - protein, 87 aa, Artificial Sequence; identical to SEQ ID NO: 3813
  Synthetic polypeptide

SEQ ID NO: 3822 - protein, 86 aa, Artificial Sequence
  Synthetic polypeptide
PGAVAHACNPSTLGGRGRQITRSRDRDHPGQHGETPSLLKLQKLAGRGDVCLYSQLLRRLRQENRLNPGGGGCSEPRSRHCTPAWV

SEQ ID NO: 3823 - protein, 86 aa, Artificial Sequence; identical to SEQ ID NO: 3822
  Synthetic polypeptide

SEQ ID NO: 3824 - protein, 86 aa, Artificial Sequence; identical to SEQ ID NO: 3822
  Synthetic polypeptide

SEQ ID NO: 3825 - protein, 86 aa, Artificial Sequence
  Synthetic polypeptide
GSPTPVPQTGTGPWPVRNWAAQQEFHRASVPYLWNHICLRLLLCIPAFIGHFGTLFQEAPWTGEWHCHCWQQCLHNPAAFALKGSD

SEQ ID NO: 3826 - protein, 86 aa, Artificial Sequence; identical to SEQ ID NO: 3825
  Synthetic polypeptide

SEQ ID NO: 3827 - protein, 86 aa, Artificial Sequence; identical to SEQ ID NO: 3825
  Synthetic polypeptide

SEQ ID NO: 3828 - protein, 86 aa, Artificial Sequence
  Synthetic polypeptide
LSVVCEKRGHTAGGPGLKPSVTRPHHSLPEARVLCPAPCFTQLPGRRRCLAHRGGGLCALRCGGQMSSLPGSTSCVRMSLTDTWGS

SEQ ID NO: 3829 - protein, 86 aa, Artificial Sequence
  Synthetic polypeptide
VLIPSTVPAALGEPGGVPAFREGPAAESQPGASPGPTPHLRVLLVPGLRRGGRPDPAVGGRLLSAAHTAFLALGVPLSQAGAPGHL

SEQ ID NO: 3830 - protein, 86 aa, Artificial Sequence; identical to SEQ ID NO: 3829
  Synthetic polypeptide

SEQ ID NO: 3831 - protein, 86 aa, Artificial Sequence; identical to SEQ ID NO: 3829
  Synthetic polypeptide

SEQ ID NO: 3832 - protein, 86 aa, Artificial Sequence
  Synthetic polypeptide
NGNNNACFSALCALVATIWFPVCAHRETTIVSFGYSLYAGWIGAVLCLVGGCVILCCAGDAQAFGENRFYYTAGSSSPTHAKSAHV

SEQ ID NO: 3833 - protein, 86 aa, Artificial Sequence
  Synthetic polypeptide
RGAFHHDVKFLEASPAMWNWTLCFHGLFHFTQPNVLPYEGQLHCGNEWASWTQHSLFHAREWNASCWRGNQQVHPESHRCYGGGAT

SEQ ID NO: 3834 - protein, 86 aa, Artificial Sequence; identical to SEQ ID NO: 3833
  Synthetic polypeptide

SEQ ID NO: 3835 - protein, 86 aa, Artificial Sequence
  Synthetic polypeptide
VQEFKTSLGNMVNPHLYKNLASEAHHDASAATTNTGAHHRVAAPVPAPRGVPASGGGRREPKTCLQMSPACGQIGRQAQPFGEIRL

SEQ ID NO: 3836 - protein, 86 aa, Artificial Sequence; identical to SEQ ID NO: 3835
  Synthetic polypeptide

SEQ ID NO: 3837 - protein, 86 aa, Artificial Sequence
  Synthetic polypeptide
KIHGSVSFLHIFHLMCFRMDILYPFNSRGYCYYKLQVDFSSDHLGCFTKCRKPCRNGSSRCYRDRTITPSTTREMEWPKSTSSSRS

SEQ ID NO: 3838 - protein, 85 aa, Artificial Sequence
  Synthetic polypeptide
MDERDSHCPYLLSSETTAKGTGLAESAGKEDPVELDSRRIPRRDWPAKRDPVRSTDLPGALPRSNKFLCGPGAGREPRCLGAALL

SEQ ID NO: 3839 - protein, 85 aa, Artificial Sequence; identical to SEQ ID NO: 3838
  Synthetic polypeptide

SEQ ID NO: 3840 - protein, 85 aa, Artificial Sequence
  Synthetic polypeptide
FRSLLKCHLPEPAAGEPAHEASQASQACEQDAHGHPAADAGAAHGSPAPGAHAECHQVWQHDRGPCDAPAPESLELEDPSSGLGV

SEQ ID NO: 3841 - protein, 85 aa, Artificial Sequence
  Synthetic polypeptide
PSPGLQTCTSPWPARNHAASQEVSGRTPSIIPPLIMGTMMTRIPWTSTPLWIKLLTRCVFQTSWPWSSLQSSSWWECWAMPWWSG

SEQ ID NO: 3842 - protein, 85 aa, Artificial Sequence
  Synthetic polypeptide
QQMLEAPQGSTQYESDEATVYSYVDDQTMKINYLELQSMGKNLRNTLGQRKGSCCHPGWRAVAPSQLPAALTSRTLAILLPQPPE

SEQ ID NO: 3843 - protein, 85 aa, Artificial Sequence
  Synthetic polypeptide
TWEAELVFSVDIDSELVEELPAEIELWLVLVAVGAGLLLLGLIILLLWKCGFFKRARTRALYEAKRQKAEMKSQPSETERLTDDY

SEQ ID NO: 3844 - protein, 85 aa, Artificial Sequence
  Synthetic polypeptide
GASLPGRPSSEMWGAPLPCRPVWDVRSTSARPRPCLGGEEHLCLPPPLRSEETLCPATAPSEKKLHGVMVNLPHNRVQICHQQVH

SEQ ID NO: 3845 - protein, 85 aa, Artificial Sequence; identical to SEQ ID NO: 3844
  Synthetic polypeptide

SEQ ID NO: 3846 - protein, 85 aa, Artificial Sequence
  Synthetic polypeptide
EIAQVTDDASPERRPGENRDTVFKYLKSYHGMQRLSLMEPTQWRGKRVNRPRKEKKSIYLKDLMKPSVFLKVRRHLHATKVIHVF

SEQ ID NO: 3847 - protein, 85 aa, Artificial Sequence; identical to SEQ ID NO: 3846
  Synthetic polypeptide

SEQ ID NO: 3848 - protein, 85 aa, Artificial Sequence; identical to SEQ ID NO: 3846
  Synthetic polypeptide

SEQ ID NO: 3849 - protein, 85 aa, Artificial Sequence; identical to SEQ ID NO: 3846
  Synthetic polypeptide

SEQ ID NO: 3850 - protein, 85 aa, Artificial Sequence; identical to SEQ ID NO: 3846
  Synthetic polypeptide

SEQ ID NO: 3851 - protein, 85 aa, Artificial Sequence; identical to SEQ ID NO: 3846
  Synthetic polypeptide

SEQ ID NO: 3852 - protein, 85 aa, Artificial Sequence
  Synthetic polypeptide
QVQWLTPVIPALGEANAGGSFAASLLRATTTMIHLSCGLFQLSPRDSSGSTPREPLMADWGSEWSCWAVKWKVAPLCWPQKSPRS

SEQ ID NO: 3853 - protein, 85 aa, Artificial Sequence
  Synthetic polypeptide
NPSTLGGQASPSPSPKVLWWPWWARWAAESRPCSQPSWLRWTKWRGTWLSRAPWPMCHSRPGFRMILSEKTSFLDVSWRNHITGP

SEQ ID NO: 3854 - protein, 85 aa, Artificial Sequence; identical to SEQ ID NO: 3853
  Synthetic polypeptide

SEQ ID NO: 3855 - protein, 85 aa, Artificial Sequence; identical to SEQ ID NO: 3853
  Synthetic polypeptide

SEQ ID NO: 3856 - protein, 85 aa, Artificial Sequence; identical to SEQ ID NO: 3853
  Synthetic polypeptide

SEQ ID NO: 3857 - protein, 85 aa, Artificial Sequence; identical to SEQ ID NO: 3853
  Synthetic polypeptide

SEQ ID NO: 3858 - protein, 85 aa, Artificial Sequence
  Synthetic polypeptide
GLPSHVELHGDPRWDQRLHSVFSRRLPGGAVSLGGEGPPGPGGHQLRLVPGPGLDQLHRRAAHRGSLPGSSPRAQPETEAGPGHM

SEQ ID NO: 3859 - protein, 85 aa, Artificial Sequence
  Synthetic polypeptide
NGENRGLHPTSRLLEGPNETAPPCLQWTRLVCAVLHASRHPGVFQCLRDSPEHVGLADGTGRLRRTQEVNICDVRRPDHCCADLP

SEQ ID NO: 3860 - protein, 84 aa, Artificial Sequence
  Synthetic polypeptide
NLCCPVHHSTSSTEFGLCVHRHRHEAAAPCQSRDPPGHAPPPLPGLPGGAGKPGTHLPAHQCQPVLPAGEARGQPSQALPPAGL

SEQ ID NO: 3861 - protein, 84 aa, Artificial Sequence
  Synthetic polypeptide
GAPLPGRDPVWEETSWCYGQLAAQPCSNLSPTGSLKTWPARGFVPAWSVCPSTSSSAPVLTVAGGSTPCSSARSSNFCTKYSAL

SEQ ID NO: 3862 - protein, 84 aa, Artificial Sequence; identical to SEQ ID NO: 3861
  Synthetic polypeptide

SEQ ID NO: 3863 - protein, 84 aa, Artificial Sequence
  Synthetic polypeptide
GWAQWLTPVIPALWEAEAGGSRSQEMKTSLANMGSWCSRSSSSWEPRPWPSWCSCLCSMAGTSCSSVPWSPREHGSPLGLPGDS

SEQ ID NO: 3864 - protein, 84 aa, Artificial Sequence
  Synthetic polypeptide
EWHLSILTPWACPTRCTCAMPVMTTIWSLDSSASSSWRVLDGPPAPACHWLARLGWRVSEEPVLSSLTSLRIELLLSSCSSRWG

SEQ ID NO: 3865 - protein, 84 aa, Artificial Sequence; identical to SEQ ID NO: 3864
  Synthetic polypeptide

SEQ ID NO: 3866 - protein, 84 aa, Artificial Sequence; identical to SEQ ID NO: 3864
  Synthetic polypeptide

SEQ ID NO: 3867 - protein, 84 aa, Artificial Sequence
  Synthetic polypeptide
CGPLEEHWSEKWEACILVLILPLICHMTLKKLLIFSVPRFMHLYRGNNICPSRMAVRVKGDDVCESALESTEHCIKEHRASGPQ

SEQ ID NO: 3868 - protein, 84 aa, Artificial Sequence; identical to SEQ ID NO: 3867
  Synthetic polypeptide

SEQ ID NO: 3869 - protein, 84 aa, Artificial Sequence; identical to SEQ ID NO: 3867
  Synthetic polypeptide

SEQ ID NO: 3870 - protein, 84 aa, Artificial Sequence; identical to SEQ ID NO: 3867
  Synthetic polypeptide

SEQ ID NO: 3871 - protein, 84 aa, Artificial Sequence; identical to SEQ ID NO: 3867
  Synthetic polypeptide

SEQ ID NO: 3872 - protein, 83 aa, Artificial Sequence
  Synthetic polypeptide
QRPREGGQRSERGGDRNPEMGEQRCRERGTETETQRRGNRDPEGTERAPWISLRGDDTGVLLPTPGEAQDADLKDVNVIPATA

SEQ ID NO: 3873 - protein, 83 aa, Artificial Sequence; identical to SEQ ID NO: 3872
  Synthetic polypeptide

SEQ ID NO: 3874 - protein, 83 aa, Artificial Sequence; identical to SEQ ID NO: 3872
  Synthetic polypeptide

SEQ ID NO: 3875 - protein, 83 aa, Artificial Sequence; identical to SEQ ID NO: 3872
  Synthetic polypeptide

SEQ ID NO: 3876 - protein, 83 aa, Artificial Sequence; identical to SEQ ID NO: 3872
  Synthetic polypeptide

SEQ ID NO: 3877 - protein, 83 aa, Artificial Sequence
  Synthetic polypeptide
FKTAVKSVAPGVRQAWVQIPGPSRSDEPRLLLCLLVSSACKRRARRLAGAVNGVYTRCSCGPLSTWMGRTCASCRRTRRATSI

SEQ ID NO: 3878 - protein, 83 aa, Artificial Sequence; identical to SEQ ID NO: 3877
  Synthetic polypeptide

SEQ ID NO: 3879 - protein, 83 aa, Artificial Sequence; identical to SEQ ID NO: 3877
  Synthetic polypeptide

SEQ ID NO: 3880 - protein, 83 aa, Artificial Sequence; identical to SEQ ID NO: 3877
  Synthetic polypeptide

SEQ ID NO: 3881 - protein, 83 aa, Artificial Sequence; identical to SEQ ID NO: 3877
  Synthetic polypeptide

SEQ ID NO: 3882 - protein, 83 aa, Artificial Sequence
  Synthetic polypeptide
SQHFGRLRWADHLRSATSLLSTRVHSGPSATRTATICHSSAMGASATAGVSSPTARRSPTPEAAGTITAVSHWNWRTRLLGWV

SEQ ID NO: 3883 - protein, 83 aa, Artificial Sequence; identical to SEQ ID NO: 3882
  Synthetic polypeptide

SEQ ID NO: 3884 - protein, 83 aa, Artificial Sequence
  Synthetic polypeptide
VREGSYCRQPWPCDFTSLNQSLQLEGGDTCLAWLLSGFSKETAMRESLVMAPRRMRPTRVAAERTWAGSSSVSATTSRSPRSP

SEQ ID NO: 3885 - protein, 83 aa, Artificial Sequence; identical to SEQ ID NO: 3884
  Synthetic polypeptide

SEQ ID NO: 3886 - protein, 83 aa, Artificial Sequence; identical to SEQ ID NO: 3884
  Synthetic polypeptide

SEQ ID NO: 3887 - protein, 83 aa, Artificial Sequence; identical to SEQ ID NO: 3884
  Synthetic polypeptide

SEQ ID NO: 3888 - protein, 83 aa, Artificial Sequence; identical to SEQ ID NO: 3884
  Synthetic polypeptide

SEQ ID NO: 3889 - protein, 83 aa, Artificial Sequence; identical to SEQ ID NO: 3884
  Synthetic polypeptide

SEQ ID NO: 3890 - protein, 83 aa, Artificial Sequence; identical to SEQ ID NO: 3884
  Synthetic polypeptide

SEQ ID NO: 3891 - protein, 83 aa, Artificial Sequence
  Synthetic polypeptide
NPVSTKNRKISRAWWVYSGLPGTHDHRHPPGLPRPLARHSGPALHQHWGPGALQESQAGGHRRGPPHSGRSPGCKSAHRQCFL

SEQ ID NO: 3892 - protein, 83 aa, Artificial Sequence
  Synthetic polypeptide
CLPGRVMSELETACGKPMRHKTSSSSLRMGAYVFIGVGAVTMLMGFLGCIGAVNEVRCLLGLYFAFLLLILIAQVTAGALFYF

SEQ ID NO: 3893 - protein, 83 aa, Artificial Sequence
  Synthetic polypeptide
RDTVAHTCNPSTLGSRGTICNPGPRKSMSKLLYIRLALFFPEMVWASLGAAWVADGVQCDRTVVNGIIATVVVSCRSRTTDYD

SEQ ID NO: 3894 - protein, 83 aa, Artificial Sequence
  Synthetic polypeptide
FLQQCLLLLVSLEVFRHSVRALLQRVSPEPPPAPRLTYEYSWSLGCGVGAGLILLLGAGCFLLLTLPSWPWGSLCPKRGHRAT

SEQ ID NO: 3895 - protein, 83 aa, Artificial Sequence; identical to SEQ ID NO: 3894
  Synthetic polypeptide

SEQ ID NO: 3896 - protein, 83 aa, Artificial Sequence; identical to SEQ ID NO: 3894
  Synthetic polypeptide

SEQ ID NO: 3897 - protein, 83 aa, Artificial Sequence
  Synthetic polypeptide
SGPSPQHSCSTKTWPGYFLNWVPDPFPPVWVRPPSGVSSHLLQVCSGWQHVYNSLGRRSYSKKQAAFFTVSQPSPMIPPAEKP

SEQ ID NO: 3898 - protein, 83 aa, Artificial Sequence; identical to SEQ ID NO: 3897
  Synthetic polypeptide

SEQ ID NO: 3899 - protein, 83 aa, Artificial Sequence; identical to SEQ ID NO: 3897
  Synthetic polypeptide

SEQ ID NO: 3900 - protein, 83 aa, Artificial Sequence; identical to SEQ ID NO: 3897
  Synthetic polypeptide

SEQ ID NO: 3901 - protein, 83 aa, Artificial Sequence; identical to SEQ ID NO: 3897
  Synthetic polypeptide

SEQ ID NO: 3902 - protein, 82 aa, Artificial Sequence
  Synthetic polypeptide
ERALDWKLSHAAGSASPDDRRHRPGCHWPPGIHLCPEMHPHWQHGGLCQSQHDTDLRDHVHCLRYTFGAALFVGWVAGGLTL

SEQ ID NO: 3903 - protein, 82 aa, Artificial Sequence
  Synthetic polypeptide
IKRQRESYALAGETHLDYQGEAIDYFYSTRKFASTDQTSSFRCTHLRGSPGTLCAKTTGTRTTGGRPAGTWAIRIIFTLAKE

SEQ ID NO: 3904 - protein, 82 aa, Artificial Sequence; identical to SEQ ID NO: 3903
  Synthetic polypeptide

SEQ ID NO: 3905 - protein, 82 aa, Artificial Sequence; identical to SEQ ID NO: 3903
  Synthetic polypeptide

SEQ ID NO: 3906 - protein, 82 aa, Artificial Sequence; identical to SEQ ID NO: 3903
  Synthetic polypeptide

SEQ ID NO: 3907 - protein, 82 aa, Artificial Sequence; identical to SEQ ID NO: 3903
  Synthetic polypeptide

SEQ ID NO: 3908 - protein, 82 aa, Artificial Sequence
  Synthetic polypeptide
NGENRGLHPTSRLLEGPNETAAWPSSPLSASRPRGGSTWRPWSTSSPCSSWRSTMPAMDPACLCCASCVTTSWSISVSTGQP

SEQ ID NO: 3909 - protein, 82 aa, Artificial Sequence
  Synthetic polypeptide
LNLTFIYKTWSDVEGQRPALLICTAAAGPTQGVKGYGKPFEPRSVKNIHSTPAYPDATMHRQLLAPVEGRMAETLNQKLHVA

SEQ ID NO: 3910 - protein, 82 aa, Artificial Sequence
  Synthetic polypeptide
PGVMFSVDIDSELVEELPAEIELWLVLVAVGAGLLLLGLIILLLWKCGFFKRARTRALYEAKRQKAEMKSQPSETERLTDDY

SEQ ID NO: 3911 - protein, 82 aa, Artificial Sequence
  Synthetic polypeptide
GQVWWLMPINPSTLGGREKRENVMFVLPLHGGHLGFFEGSVLFPEPLTWMDKLVVEYANAICQWERNKLQCSDTEQVEADLE

SEQ ID NO: 3912 - protein, 82 aa, Artificial Sequence; identical to SEQ ID NO: 3911
  Synthetic polypeptide

SEQ ID NO: 3913 - protein, 82 aa, Artificial Sequence; identical to SEQ ID NO: 3911
  Synthetic polypeptide

SEQ ID NO: 3914 - protein, 82 aa, Artificial Sequence
  Synthetic polypeptide
PRLASRPVREETSWCYGQLAAQPCSNLSPTGSLKTWPARGFVPAWSVCPSTSSSAPVLTVAGGSTPCSSARSSNFCTKYSAL

SEQ ID NO: 3915 - protein, 82 aa, Artificial Sequence; identical to SEQ ID NO: 3914
  Synthetic polypeptide

SEQ ID NO: 3916 - protein, 82 aa, Artificial Sequence
  Synthetic polypeptide
VHYKRTSLAPFSLFLALFWPFCLLPWDDTAQKPSPDADPLILDFPASRTIMMVAGPLFNGGIASLLAMKEKVISTNPGNSYL

SEQ ID NO: 3917 - protein, 82 aa, Artificial Sequence
  Synthetic polypeptide
GAPLPSQLPRPGGRWGGQPPARPAAPSGREVGGSAPRPASRPVRESHGGLAWLSDRGGVPLPAGLLPHRHQLPAQQAHGPQE

SEQ ID NO: 3918 - protein, 82 aa, Artificial Sequence
  Synthetic polypeptide
EAKTGGSLEARNSRQHGAPGNWRPLHTWLPFLQSNPVPSSCIIRPSQHPSPAHQCRHCLPPAEAGVQWCNLGSLQPPPPGFK

SEQ ID NO: 3919 - protein, 82 aa, Artificial Sequence
  Synthetic polypeptide
IVSLSRTEGRYIYLGLPAALRGSSFVPALIILILLRKCHLPGENASSGTELIETKVKGKENECKDIYQKSTVLKDDELKTKL

SEQ ID NO: 3920 - protein, 82 aa, Artificial Sequence; identical to SEQ ID NO: 3919
  Synthetic polypeptide

SEQ ID NO: 3921 - protein, 82 aa, Artificial Sequence; identical to SEQ ID NO: 3919
  Synthetic polypeptide

SEQ ID NO: 3922 - protein, 82 aa, Artificial Sequence; identical to SEQ ID NO: 3919
  Synthetic polypeptide

SEQ ID NO: 3923 - protein, 82 aa, Artificial Sequence
  Synthetic polypeptide
STAVETAQKTHAGPALGHARQLCDGEQASYLPELHFLTSPWRESLIRGWPLPPPQCILPPLQSLIQGCLDGRMAEWRPPPPP

SEQ ID NO: 3924 - protein, 81 aa, Artificial Sequence
  Synthetic polypeptide
LSISHPTYFSSNHLSLPDPARQIVFADWHSLQVGGLICAGVLCAMGIIIVMSAKCKCKFGQKSGHHPGETPPLITPGSAQS

SEQ ID NO: 3925 - protein, 81 aa, Artificial Sequence; identical to SEQ ID NO: 3924
  Synthetic polypeptide

SEQ ID NO: 3926 - protein, 81 aa, Artificial Sequence; identical to SEQ ID NO: 3924
  Synthetic polypeptide

SEQ ID NO: 3927 - protein, 81 aa, Artificial Sequence; identical to SEQ ID NO: 3924
  Synthetic polypeptide

SEQ ID NO: 3928 - protein, 81 aa, Artificial Sequence; identical to SEQ ID NO: 3924
  Synthetic polypeptide

SEQ ID NO: 3929 - protein, 81 aa, Artificial Sequence; identical to SEQ ID NO: 3924
  Synthetic polypeptide

SEQ ID NO: 3930 - protein, 81 aa, Artificial Sequence; identical to SEQ ID NO: 3924
  Synthetic polypeptide

SEQ ID NO: 3931 - protein, 81 aa, Artificial Sequence; identical to SEQ ID NO: 3924
  Synthetic polypeptide

SEQ ID NO: 3932 - protein, 81 aa, Artificial Sequence; identical to SEQ ID NO: 3924
  Synthetic polypeptide

SEQ ID NO: 3933 - protein, 81 aa, Artificial Sequence
  Synthetic polypeptide
PLIHLSLIAVTFAIVLGVIIYRISMAAALAMNSSPSVRSNIRVTVTATAVIINLVVIILLDEVYGCIARWLTKIEVPKTEK

SEQ ID NO: 3934 - protein, 81 aa, Artificial Sequence
  Synthetic polypeptide
TREAEVAVSRDRATALKPRQQNSLGAQHRGLCPSGDGSGGCGYCAGQALGRLGRAQHSWHFPGPGHPDKHPEKSAGAYFYQ

SEQ ID NO: 3935 - protein, 81 aa, Artificial Sequence; identical to SEQ ID NO: 3934
  Synthetic polypeptide

SEQ ID NO: 3936 - protein, 81 aa, Artificial Sequence; identical to SEQ ID NO: 3934
  Synthetic polypeptide

SEQ ID NO: 3937 - protein, 80 aa, Artificial Sequence
  Synthetic polypeptide
SIPLQLCHLWQGAVCPEPNPAAAGECAGREPAGLLHHGGPHQALQLRRPQRSHLQPRHIPAAQLYQHHPPATRAGDGPGD

SEQ ID NO: 3938 - protein, 80 aa, Artificial Sequence
  Synthetic polypeptide
ERALDWKLSHAAGSASPDDRRHRPGCHWPPGIHLCPEMHPHWQHGGLCQSQHDTDLRDHVHCLRSLCNCWSVCVCQHAGD

SEQ ID NO: 3939 - protein, 80 aa, Artificial Sequence; identical to SEQ ID NO: 3938
  Synthetic polypeptide

SEQ ID NO: 3940 - protein, 80 aa, Artificial Sequence
  Synthetic polypeptide
AGHSGSYLQSQHFGRAKRVDHLSPGVKDQPGQHRNTMTVSYMSGLTLGSAVAYCTYSLTRDAHGSCLHASTANGSILAGL

SEQ ID NO: 3941 - protein, 80 aa, Artificial Sequence; identical to SEQ ID NO: 3940
  Synthetic polypeptide

SEQ ID NO: 3942 - protein, 80 aa, Artificial Sequence; identical to SEQ ID NO: 3940
  Synthetic polypeptide

SEQ ID NO: 3943 - protein, 80 aa, Artificial Sequence
  Synthetic polypeptide
SQHFGRLKLADHLRQLFPVPVRSSTWVLSVKNTMLARGNLAKTTRAVLMQMKSKMGAISPVFAFLVILESFASPRLITAS

SEQ ID NO: 3944 - protein, 80 aa, Artificial Sequence
  Synthetic polypeptide
RPKIDIAVGAPFEGLGKVYIYHSSSKGLLRQPQQVIHGEKLGLPGLATFGYSLSGQMDVDENFYPDLLVGSLSDHIVLLR

SEQ ID NO: 3945 - protein, 80 aa, Artificial Sequence
  Synthetic polypeptide
WLELRSLRPAWATCTSLQTLMPSTSGSRLTSATLFKAFPSHFGQLISSYTVRPPTFSWALTGPTPTSSCGSQMTLARPGS

SEQ ID NO: 3946 - protein, 80 aa, Artificial Sequence
  Synthetic polypeptide
PWLNHSLPWTSVFPAVKWLYVQARLCWKWARLLRPTVQFFLVAFALYVGYTRVSDYKHHWSDVLVGLLQGALVAALTVSF

SEQ ID NO: 3947 - protein, 80 aa, Artificial Sequence
  Synthetic polypeptide
KDEFPNSPLLFCNRHALLTFCLLPWDDSARRPLLNVCPSALDLACRTIMMVAGPLFNGGIASLLAMKEKVISTNPGNSYL

SEQ ID NO: 3948 - protein, 80 aa, Artificial Sequence
  Synthetic polypeptide
KYLGQIGRGSKTMGPAWDIENQTSPTDGYLTNRCLIEQSTWVPVSCIKVINHHQTSLSASLLRIGQSGSSPNWLVTRTLW

SEQ ID NO: 3949 - protein, 80 aa, Artificial Sequence; identical to SEQ ID NO: 3948
  Synthetic polypeptide

SEQ ID NO: 3950 - protein, 80 aa, Artificial Sequence; identical to SEQ ID NO: 3948
  Synthetic polypeptide

SEQ ID NO: 3951 - protein, 80 aa, Artificial Sequence; identical to SEQ ID NO: 3948
  Synthetic polypeptide

SEQ ID NO: 3952 - protein, 80 aa, Artificial Sequence; identical to SEQ ID NO: 3948
  Synthetic polypeptide

SEQ ID NO: 3953 - protein, 80 aa, Artificial Sequence
  Synthetic polypeptide
DQAQWLTPVIPALWEAKVGGHKHFGRPQARRPSAGEWLWDSGPASPSSSWQSVGSSSSDVGRGHRASRGFRRIPAARASL

SEQ ID NO: 3954 - protein, 80 aa, Artificial Sequence; identical to SEQ ID NO: 3953
  Synthetic polypeptide

SEQ ID NO: 3955 - protein, 80 aa, Artificial Sequence; identical to SEQ ID NO: 3953
  Synthetic polypeptide

SEQ ID NO: 3956 - protein, 80 aa, Artificial Sequence; identical to SEQ ID NO: 3953
  Synthetic polypeptide

SEQ ID NO: 3957 - protein, 80 aa, Artificial Sequence; identical to SEQ ID NO: 3953
  Synthetic polypeptide

SEQ ID NO: 3958 - protein, 80 aa, Artificial Sequence; identical to SEQ ID NO: 3953
  Synthetic polypeptide

SEQ ID NO: 3959 - protein, 79 aa, Artificial Sequence
  Synthetic polypeptide
GQAQWLTPVIPALREAEAFRTTCPPRQRALLCTWAPSWASCWQSSSWRPSSWLEFTSMATPHPMLRSSSSSVDLTTGQP

SEQ ID NO: 3960 - protein, 79 aa, Artificial Sequence; identical to SEQ ID NO: 3959
  Synthetic polypeptide

SEQ ID NO: 3961 - protein, 79 aa, Artificial Sequence
  Synthetic polypeptide
NVTSLNLQLENLRMKLPKPPKPVSKMRMATPLLMQALPMGALPQGPMQNATKYGNMTEDHVMHLLQSHWNWRTRLLGWV

SEQ ID NO: 3962 - protein, 79 aa, Artificial Sequence
  Synthetic polypeptide
VCAPPRRAHRALVLRRASTFDAVRGPPRRCPPDADPRAPGLALPGRLLVSSRSGFCLPRRRRLLPQLRKNVSVKTTSWP

SEQ ID NO: 3963 - protein, 79 aa, Artificial Sequence
  Synthetic polypeptide
FWANDLNYLRLRLLVAKPTTTPAPRPPTPAPTIASQPLSLRPEACRPAAGGAGNRRRVCKCPRPVVKSGDKPSLSARYV

SEQ ID NO: 3964 - protein, 79 aa, Artificial Sequence; identical to SEQ ID NO: 3963
  Synthetic polypeptide

SEQ ID NO: 3965 - protein, 79 aa, Artificial Sequence
  Synthetic polypeptide
CLPGRVMSELETACGKPMRHKTSSSSLRMGAYVFIGVGAVTMLMGFLGCIGAVNEVRCLLGLYFAFLLLILIAQVTAGA

SEQ ID NO: 3966 - protein, 79 aa, Artificial Sequence
  Synthetic polypeptide
KYKKIAGCGGGRLSSQLLGRLRQENRMNPGGRGCSEPRSHHCTPAWAKRRPRKKASQRLKWPQRRKEKTGTSPPRLPSP

SEQ ID NO: 3967 - protein, 79 aa, Artificial Sequence; identical to SEQ ID NO: 3966
  Synthetic polypeptide

SEQ ID NO: 3968 - protein, 79 aa, Artificial Sequence; identical to SEQ ID NO: 3966
  Synthetic polypeptide

SEQ ID NO: 3969 - protein, 79 aa, Artificial Sequence
  Synthetic polypeptide
PGVVFKCCGAANYTDWEKIPSMSKNRVPDSCCINVTVGCGINFNEKAIHKEGCVEKIGGWLRKNVLVVAAAALGIAFVE

SEQ ID NO: 3970 - protein, 79 aa, Artificial Sequence
  Synthetic polypeptide
AEIAPLHSSLVESIDDYVNVPESGESAEASLDGSREYVNVSQELHPGAAKTEPAALSSQEAEEVEEEGAPDYENLQELN

SEQ ID NO: 3971 - protein, 79 aa, Artificial Sequence; identical to SEQ ID NO: 3970
  Synthetic polypeptide

SEQ ID NO: 3972 - protein, 79 aa, Artificial Sequence; identical to SEQ ID NO: 3970
  Synthetic polypeptide

SEQ ID NO: 3973 - protein, 79 aa, Artificial Sequence; identical to SEQ ID NO: 3970
  Synthetic polypeptide

SEQ ID NO: 3974 - protein, 79 aa, Artificial Sequence; identical to SEQ ID NO: 3970
  Synthetic polypeptide

SEQ ID NO: 3975 - protein, 79 aa, Artificial Sequence; identical to SEQ ID NO: 3970
  Synthetic polypeptide

SEQ ID NO: 3976 - protein, 79 aa, Artificial Sequence; identical to SEQ ID NO: 3970
  Synthetic polypeptide

SEQ ID NO: 3977 - protein, 79 aa, Artificial Sequence
  Synthetic polypeptide
TPIHNCFKENKIPRNPTYKGCEGPLQGELQTAAQGNKRGYKQMEEHSILMDRKNQYRENGHTAQVNIGLCPSVCSLLEF

SEQ ID NO: 3978 - protein, 79 aa, Artificial Sequence; identical to SEQ ID NO: 3977
  Synthetic polypeptide

SEQ ID NO: 3979 - protein, 79 aa, Artificial Sequence; identical to SEQ ID NO: 3977
  Synthetic polypeptide

SEQ ID NO: 3980 - protein, 79 aa, Artificial Sequence
  Synthetic polypeptide
SQHFGRLRRVERGQEIETTLANTALVAGISQAQRALWTPLQTSAPPLMLAWTASSTSLSTLAMAWKSRSRISASGKGRQ

SEQ ID NO: 3981 - protein, 79 aa, Artificial Sequence; identical to SEQ ID NO: 3980
  Synthetic polypeptide

SEQ ID NO: 3982 - protein, 79 aa, Artificial Sequence; identical to SEQ ID NO: 3980
  Synthetic polypeptide

SEQ ID NO: 3983 - protein, 79 aa, Artificial Sequence; identical to SEQ ID NO: 3980
  Synthetic polypeptide

SEQ ID NO: 3984 - protein, 79 aa, Artificial Sequence; identical to SEQ ID NO: 3980
  Synthetic polypeptide

SEQ ID NO: 3985 - protein, 79 aa, Artificial Sequence; identical to SEQ ID NO: 3980
  Synthetic polypeptide

SEQ ID NO: 3986 - protein, 79 aa, Artificial Sequence
  Synthetic polypeptide
LSPPPTGLHPLHPVHFSDLSSSISSSVWCFLIPHSNPSLSVLCTGWFIKSSNEATNITPKHNMKAFLDELKAENIKKFL

SEQ ID NO: 3987 - protein, 78 aa, Artificial Sequence
  Synthetic polypeptide
GAPLPGRPYWEVRSSSARPAAPSGREVGGSAPHPASCPVRESHGGLAWLSDRGGVPLPAGLLPHRHQLPAQQAHGPQE

SEQ ID NO: 3988 - protein, 78 aa, Artificial Sequence
  Synthetic polypeptide
QKQASEGTHARLSTRHTEFEEREYVVLIRINDGGRPPLEGIVSLPGIILAVVFIRIKKDKGKDNVESAQASEVKPLRS

SEQ ID NO: 3989 - protein, 78 aa, Artificial Sequence
  Synthetic polypeptide
QYIIYLNIAKRYFKCSHHTQRDSISRTPRWRLCGIVSWGTGCALAQKPGVYTKVSDFREWIFQAIKTHSEASGMVTQL

SEQ ID NO: 3990 - protein, 78 aa, Artificial Sequence; identical to SEQ ID NO: 3989
  Synthetic polypeptide

SEQ ID NO: 3991 - protein, 78 aa, Artificial Sequence; identical to SEQ ID NO: 3989
  Synthetic polypeptide

SEQ ID NO: 3992 - protein, 78 aa, Artificial Sequence
  Synthetic polypeptide
GVRSAPPRAQSASPSASEHLRRGPGTPSSLSSRSGFCLPRRRRLLPQLRKVRRGLEQSCGAGLGWGAAAPGPRPPKRA

SEQ ID NO: 3993 - protein, 78 aa, Artificial Sequence
  Synthetic polypeptide
HFLLPSLSLLPPWEDVLASPSPFCHDYKLPEASPPTPAVQPVEFKQKRKKTKTVKMIGVLTLFRYSDWQDKLFMSLGT

SEQ ID NO: 3994 - protein, 78 aa, Artificial Sequence
  Synthetic polypeptide
GRLGSLREGDTTENLYYYSFSQASPKGSVTQGNCALGKGSNQRFHGLLDTGSVLTLIPGGPKCYCGPLVRGEAHRGVP

SEQ ID NO: 3995 - protein, 78 aa, Artificial Sequence; identical to SEQ ID NO: 3994
  Synthetic polypeptide

SEQ ID NO: 3996 - protein, 78 aa, Artificial Sequence; identical to SEQ ID NO: 3994
  Synthetic polypeptide

SEQ ID NO: 3997 - protein, 78 aa, Artificial Sequence
  Synthetic polypeptide
KYKKIAGCGGGRLSSQLLGRLRQENRMNPGGRGCSEPRSHHCTPAWARRPRKKASQRLKWPQRRKEKTGTSPPRLPSP

SEQ ID NO: 3998 - protein, 78 aa, Artificial Sequence; identical to SEQ ID NO: 3997
  Synthetic polypeptide

SEQ ID NO: 3999 - protein, 78 aa, Artificial Sequence; identical to SEQ ID NO: 3997
  Synthetic polypeptide

SEQ ID NO: 4000 - protein, 78 aa, Artificial Sequence; identical to SEQ ID NO: 3997
  Synthetic polypeptide

SEQ ID NO: 4001 - protein, 78 aa, Artificial Sequence; identical to SEQ ID NO: 3997
  Synthetic polypeptide

SEQ ID NO: 4002 - protein, 78 aa, Artificial Sequence
  Synthetic polypeptide
ISLTRSDGIIRGFCFCVFLIFLLPPRCMKCLLPPAMILRAPQPCGTALKEPYLGTLWRRRTSEQSHPKISGLNHPPDP

SEQ ID NO: 4003 - protein, 78 aa, Artificial Sequence; identical to SEQ ID NO: 4002
  Synthetic polypeptide

SEQ ID NO: 4004 - protein, 78 aa, Artificial Sequence
  Synthetic polypeptide
EPGLWRLSELGLVLAQEFGYVISWVSKLLNLADLSFLSCEEEGNYNNGRICAILLLQSQCAYWALPEPRTLDGGHLMQ

SEQ ID NO: 4005 - protein, 78 aa, Artificial Sequence; identical to SEQ ID NO: 4004
  Synthetic polypeptide

SEQ ID NO: 4006 - protein, 78 aa, Artificial Sequence; identical to SEQ ID NO: 4004
  Synthetic polypeptide

SEQ ID NO: 4007 - protein, 78 aa, Artificial Sequence; identical to SEQ ID NO: 4004
  Synthetic polypeptide

SEQ ID NO: 4008 - protein, 78 aa, Artificial Sequence; identical to SEQ ID NO: 4004
  Synthetic polypeptide

SEQ ID NO: 4009 - protein, 78 aa, Artificial Sequence; identical to SEQ ID NO: 4004
  Synthetic polypeptide

SEQ ID NO: 4010 - protein, 78 aa, Artificial Sequence; identical to SEQ ID NO: 4004
  Synthetic polypeptide

SEQ ID NO: 4011 - protein, 78 aa, Artificial Sequence; identical to SEQ ID NO: 4004
  Synthetic polypeptide

SEQ ID NO: 4012 - protein, 78 aa, Artificial Sequence
  Synthetic polypeptide
SIPVGDSDQPGQRRSKECSQGQRVRYPRYQTRKPKPQWAQKTHLEAKPAQTLRTCGQVCSITSSCSFCATACCSWRSS

SEQ ID NO: 4013 - protein, 78 aa, Artificial Sequence
  Synthetic polypeptide
GQEFETSLANLEIYKDRQKFSEQVFKVASSDLVNMGISVVSYTLKDIHDDQDYLHSLGKARTAQVQKDARIGEAEAKR

SEQ ID NO: 4014 - protein, 77 aa, Artificial Sequence
  Synthetic polypeptide
WLEWEVPETWCPLSSLSSRSAAGTRWPASLSSGVSWTAGSPRSPTAHRMAPRRATGTTSPWRVSCCSSLGRPGKSCR

SEQ ID NO: 4015 - protein, 77 aa, Artificial Sequence; identical to SEQ ID NO: 4014
  Synthetic polypeptide

SEQ ID NO: 4016 - protein, 77 aa, Artificial Sequence; identical to SEQ ID NO: 4014
  Synthetic polypeptide

SEQ ID NO: 4017 - protein, 77 aa, Artificial Sequence; identical to SEQ ID NO: 4014
  Synthetic polypeptide

SEQ ID NO: 4018 - protein, 77 aa, Artificial Sequence; identical to SEQ ID NO: 4014
  Synthetic polypeptide

SEQ ID NO: 4019 - protein, 77 aa, Artificial Sequence
  Synthetic polypeptide
FRSLLKCHLPEPAAGEPAHEASQASQACEQDAHGHPAADAGAAHGSPAPGAHAECHQVWQHDRGPCDAPAPGSGQKL

SEQ ID NO: 4020 - protein, 77 aa, Artificial Sequence
  Synthetic polypeptide
VREGSYCRQPWPCDFTSLNQSLQLEGGDTCLAWLLSGFSKETAMRESLVMESTLTVKIMKAQELPAKDFSGTSDPFV

SEQ ID NO: 4021 - protein, 77 aa, Artificial Sequence
  Synthetic polypeptide
NDDIKIKSLDEQCVVGKISKHWTGILREAFTDADNFGIQFPLDLDVKMKAVMIGACFLIDFMFFESTGSQEQKSGVW

SEQ ID NO: 4022 - protein, 77 aa, Artificial Sequence; identical to SEQ ID NO: 4021
  Synthetic polypeptide

SEQ ID NO: 4023 - protein, 77 aa, Artificial Sequence; identical to SEQ ID NO: 4021
  Synthetic polypeptide

SEQ ID NO: 4024 - protein, 77 aa, Artificial Sequence
  Synthetic polypeptide
PGVVFKCCGAANYTDWEKIPSMSKNRVPDSCCINVTVGCGINFNEKAIHKEGCVEKIGGWLRKNVLVVAAAALGIAF

SEQ ID NO: 4025 - protein, 77 aa, Artificial Sequence
  Synthetic polypeptide
RAAPPLPPPRAVGWSCLPWSRAVGMERKGCAVRPHQSDPDAWNRPCGAGPDGGRGDVHPGVRRLRGGSAGEYLLAQL

SEQ ID NO: 4026 - protein, 77 aa, Artificial Sequence
  Synthetic polypeptide
MKLNMEITYQNAWHLINNLMQMFPPSPLFFFLQLLKQSSRRLEHTFVFLRNFSLMLLRYIGKKRRATRFWDPRRGTP

SEQ ID NO: 4027 - protein, 77 aa, Artificial Sequence
  Synthetic polypeptide
MKLNMEITYQNAWHLINNLMQMFPPSPLFFFLRLLKQNSRRLEHTFVFLRNFSQILLRYIGKKRRATRFWDPRRGTP

SEQ ID NO: 4028 - protein, 77 aa, Artificial Sequence
  Synthetic polypeptide
ELGKNPKEKENVELKNNEDEKLELFNLKDKRLRYYQDSFAQHGSRKQGAVPSGDSSQGYGRPDGRIIWDHHREHHTD

SEQ ID NO: 4029 - protein, 77 aa, Artificial Sequence; identical to SEQ ID NO: 4028
  Synthetic polypeptide

SEQ ID NO: 4030 - protein, 77 aa, Artificial Sequence
  Synthetic polypeptide
WSPGPRSPPWRGRCLTSWATSGRPSWPTLSTSSSSSWDSSAPSSTGCAMSWCTRCGQPSGSPGTSSSSASTWKSVAS

SEQ ID NO: 4031 - protein, 77 aa, Artificial Sequence
  Synthetic polypeptide
GRVRWLMPVIPALWEAEEGGSRGLISASTINPECDCKCAQLRRGGHRQVKSRSQNGRSPESTVSDQLQRRQATIYCR

SEQ ID NO: 4032 - protein, 77 aa, Artificial Sequence; identical to SEQ ID NO: 4031
  Synthetic polypeptide

SEQ ID NO: 4033 - protein, 77 aa, Artificial Sequence; identical to SEQ ID NO: 4031
  Synthetic polypeptide

SEQ ID NO: 4034 - protein, 77 aa, Artificial Sequence
  Synthetic polypeptide
SQLLRRLRKENRLNPGGRGCGPLCSPITLGLLVAGVLVLLVSLGVAIHLCCRRRRARLRFMKQLRLHPLEKCSRMDY

SEQ ID NO: 4035 - protein, 77 aa, Artificial Sequence
  Synthetic polypeptide
AGRAKPTVQPSPSTTSKTVTTSGTTNNTVTPTSQPVRKSTFDAASFIGGIVLVLGVQAVIFFLYKFCKSKERNYHTL

SEQ ID NO: 4036 - protein, 77 aa, Artificial Sequence; identical to SEQ ID NO: 4035
  Synthetic polypeptide

SEQ ID NO: 4037 - protein, 77 aa, Artificial Sequence; identical to SEQ ID NO: 4035
  Synthetic polypeptide

SEQ ID NO: 4038 - protein, 77 aa, Artificial Sequence
  Synthetic polypeptide
AKECRKQPLKDEKDVHPDNNTYCLHEFKCFSISGHALYAQGLYYNFSSRTECSKTQEELQGCGDSCHHAKQTDPKRK

SEQ ID NO: 4039 - protein, 77 aa, Artificial Sequence; identical to SEQ ID NO: 4038
  Synthetic polypeptide

SEQ ID NO: 4040 - protein, 77 aa, Artificial Sequence; identical to SEQ ID NO: 4038
  Synthetic polypeptide

SEQ ID NO: 4041 - protein, 77 aa, Artificial Sequence; identical to SEQ ID NO: 4038
  Synthetic polypeptide

SEQ ID NO: 4042 - protein, 77 aa, Artificial Sequence
  Synthetic polypeptide
LVSVSLLAHRKSCPLTVRSARPGTTSVHLLILSTSHNACTLSYSPSHWLKSSSGLTPIHQRRQDSPCWLLPALLTSA

SEQ ID NO: 4043 - protein, 76 aa, Artificial Sequence
  Synthetic polypeptide
PKGVIVSLGLNFHICKLGIIISPTSCGALALASVSMATVRPVMGCPSSALRCCTPTTHSAPLTTWCWRRWRGWARR

SEQ ID NO: 4044 - protein, 76 aa, Artificial Sequence; identical to SEQ ID NO: 4043
  Synthetic polypeptide

SEQ ID NO: 4045 - protein, 76 aa, Artificial Sequence; identical to SEQ ID NO: 4043
  Synthetic polypeptide

SEQ ID NO: 4046 - protein, 76 aa, Artificial Sequence; identical to SEQ ID NO: 4043
  Synthetic polypeptide

SEQ ID NO: 4047 - protein, 76 aa, Artificial Sequence; identical to SEQ ID NO: 4043
  Synthetic polypeptide

SEQ ID NO: 4048 - protein, 76 aa, Artificial Sequence; identical to SEQ ID NO: 4043
  Synthetic polypeptide

SEQ ID NO: 4049 - protein, 76 aa, Artificial Sequence
  Synthetic polypeptide
LVLVETGFCCDGRAGLQPLTASDPPALASRGAGIADGLSFTQCSMQAVVDDDANNAKAVVKTFHETLDCCGSSTLT

SEQ ID NO: 4050 - protein, 76 aa, Artificial Sequence
  Synthetic polypeptide
KLVSTKKTNKIRQALLHLLADLRPCHHHAAGDLHVWHRTRGLCPARHHPAGAAEQRCVREREVHPAGELLGWPQLD

SEQ ID NO: 4051 - protein, 76 aa, Artificial Sequence; identical to SEQ ID NO: 4050
  Synthetic polypeptide

SEQ ID NO: 4052 - protein, 76 aa, Artificial Sequence; identical to SEQ ID NO: 4050
  Synthetic polypeptide

SEQ ID NO: 4053 - protein, 76 aa, Artificial Sequence
  Synthetic polypeptide
GWAQWLTPVIPALWEAEAGGSRSQEMKTSLANMGSWCSRSSSSWEPRPWPSWCSCLCSMAGTSCSSVPWSPRGPSG

SEQ ID NO: 4054 - protein, 76 aa, Artificial Sequence; identical to SEQ ID NO: 4053
  Synthetic polypeptide

SEQ ID NO: 4055 - protein, 76 aa, Artificial Sequence; identical to SEQ ID NO: 4053
  Synthetic polypeptide

SEQ ID NO: 4056 - protein, 76 aa, Artificial Sequence; identical to SEQ ID NO: 4053
  Synthetic polypeptide

SEQ ID NO: 4057 - protein, 76 aa, Artificial Sequence; identical to SEQ ID NO: 4053
  Synthetic polypeptide

SEQ ID NO: 4058 - protein, 76 aa, Artificial Sequence; identical to SEQ ID NO: 4053
  Synthetic polypeptide

SEQ ID NO: 4059 - protein, 76 aa, Artificial Sequence; identical to SEQ ID NO: 4053
  Synthetic polypeptide

SEQ ID NO: 4060 - protein, 76 aa, Artificial Sequence; identical to SEQ ID NO: 4053
  Synthetic polypeptide

SEQ ID NO: 4061 - protein, 76 aa, Artificial Sequence
  Synthetic polypeptide
SQLLRRLRPCCSWGPPPWPASPWTSSSCSSTPSGCAAGGARARSTWTPTAAARPGVSSSPRWCAAPASQWDSTATG

SEQ ID NO: 4062 - protein, 76 aa, Artificial Sequence
  Synthetic polypeptide
WLETINKQGLKAADNDPTAPPYDSLLVFDYEGSGSTAGSLSSLNSSSSGGEQDYDYLNDWGPRFKKLADMYGGGDD

SEQ ID NO: 4063 - protein, 76 aa, Artificial Sequence; identical to SEQ ID NO: 4062
  Synthetic polypeptide

SEQ ID NO: 4064 - protein, 76 aa, Artificial Sequence
  Synthetic polypeptide
LVSVSLLAHRKSCPLTVRSARPGTTSVHLLILSTSHNACTLSYSPSHWLKSSSGLTPIHQRRQDSPCWLLPALLTS

SEQ ID NO: 4065 - protein, 76 aa, Artificial Sequence
  Synthetic polypeptide
HFERPRRRITRSGDRDHSGSPGCASSSATRGARPARGHRGAAVPPAATCSWTVHLPGDLAAPRCTCEPPECGRLPP

SEQ ID NO: 4066 - protein, 76 aa, Artificial Sequence; identical to SEQ ID NO: 4065
  Synthetic polypeptide

SEQ ID NO: 4067 - protein, 75 aa, Artificial Sequence
  Synthetic polypeptide
SQHLGRPRWEDCLRPGVGDKPGKHTKRRTVHSHPARGHAAGHRLGHAVPCRDELRPPRPGCSQHPSQQQPRLQSV

SEQ ID NO: 4068 - protein, 75 aa, Artificial Sequence; identical to SEQ ID NO: 4067
  Synthetic polypeptide

SEQ ID NO: 4069 - protein, 75 aa, Artificial Sequence
  Synthetic polypeptide
GAPLPGCPVWKVRSVSAPRPAPAAFLSWTAVAGNCPHRAGGRCRACCPPTPLSWISVIIGCLTGTSAWNHKHYRK

SEQ ID NO: 4070 - protein, 75 aa, Artificial Sequence
  Synthetic polypeptide
RDIRDEDEGGRALEPKRISSNIASAPSRQCDSGQVACLLWAATSFHHCKRRQRERERWPLPSAACPEPGPSSHPV

SEQ ID NO: 4071 - protein, 75 aa, Artificial Sequence
  Synthetic polypeptide
LKLSAPPFARGEAHHDASAATTNTGAHHRVAAPVPAPRGVPASGGGRREPKTCLQMSPACGQIGRQAQPFGEIRL

SEQ ID NO: 4072 - protein, 75 aa, Artificial Sequence; identical to SEQ ID NO: 4071
  Synthetic polypeptide

SEQ ID NO: 4073 - protein, 75 aa, Artificial Sequence
  Synthetic polypeptide
STSLAIKFAGMESGYACFCGNNPDYWKYGEAASTECNSVCFGDHTQPCGGDGRIILFDRTRRTWWSFWMATPTVS

SEQ ID NO: 4074 - protein, 75 aa, Artificial Sequence
  Synthetic polypeptide
AVKEELTPILHRLFPRIQQVAGSPSPTPAGQQVLDIDSCLDSSVLDSSFLTFSGLHAEQAFVGQMKSDLFLDDSK

SEQ ID NO: 4075 - protein, 75 aa, Artificial Sequence
  Synthetic polypeptide
GHHSEGYGIIQLPGHHSEGNGIIQLPGHHSEGNGIIQLPGHHSEVASPPTMRCSRRSTRWLCWGRPTTLLPRRPP

SEQ ID NO: 4076 - protein, 75 aa, Artificial Sequence
  Synthetic polypeptide
RSRVPGAAQIKLKQEMGGIVTELIRDYNSSREDSLQDAWDYVQAQVKCCGWVSFYNWTDNAELMNRPEVTYPCSC

SEQ ID NO: 4077 - protein, 75 aa, Artificial Sequence
  Synthetic polypeptide
GASLPGRPSSEMWGAPLPRRPVWDVRSASAGPQPCLGGEQRSDYNRGSTPTFYYSKCRFDCDPKGWNAGGERSTC

SEQ ID NO: 4078 - protein, 75 aa, Artificial Sequence; identical to SEQ ID NO: 4077
  Synthetic polypeptide

SEQ ID NO: 4079 - protein, 75 aa, Artificial Sequence
  Synthetic polypeptide
PGTAAHPYHPSTVRDPGGRNTRSPKGRRRRRSSSTAWVASSSSSSSPSSGSHCSSCRWCAPWLGLSTSPSMSPSP

SEQ ID NO: 4080 - protein, 75 aa, Artificial Sequence; identical to SEQ ID NO: 4079
  Synthetic polypeptide

SEQ ID NO: 4081 - protein, 74 aa, Artificial Sequence
  Synthetic polypeptide
VWWYKPVIPATLMLRYCVRGLQPFGQGARAAVVLGAVETAAGCCARSSPRRSGCLVPSTASRCLELGSEMDPDA

SEQ ID NO: 4082 - protein, 74 aa, Artificial Sequence
  Synthetic polypeptide
WKYRPKQLGVAVASSPTSISPLCQVQHPAKMKRKANRWRLSLRNGLLPSTPRATQQIPMEFLNSRVADIPIKPW

SEQ ID NO: 4083 - protein, 74 aa, Artificial Sequence
  Synthetic polypeptide
WDSSGHLNHHLQNEDISKDTQAHYFPPASMDHSLPRRESDPHLQGISLLLTTENKMVPSVPWERNTKRNPRQYP

SEQ ID NO: 4084 - protein, 74 aa, Artificial Sequence; identical to SEQ ID NO: 4083
  Synthetic polypeptide

SEQ ID NO: 4085 - protein, 74 aa, Artificial Sequence; identical to SEQ ID NO: 4083
  Synthetic polypeptide

SEQ ID NO: 4086 - protein, 74 aa, Artificial Sequence; identical to SEQ ID NO: 4083
  Synthetic polypeptide

SEQ ID NO: 4087 - protein, 74 aa, Artificial Sequence; identical to SEQ ID NO: 4083
  Synthetic polypeptide

SEQ ID NO: 4088 - protein, 74 aa, Artificial Sequence
  Synthetic polypeptide
MPPLPFPSRESCSRCWYLDQPAGLSWALSVPKSTWMRSSLTQVTWTSLRTTPAGSEPGGVAFCSAVPYSSSLPS

SEQ ID NO: 4089 - protein, 74 aa, Artificial Sequence; identical to SEQ ID NO: 4088
  Synthetic polypeptide

SEQ ID NO: 4090 - protein, 74 aa, Artificial Sequence
  Synthetic polypeptide
APHLCHQISGRPTPSSPSSLVSPPSSTISTSARPTRGRSSLSAPHSVTGTRAYSSAQTKAPPFRSSPFPSSWKL

SEQ ID NO: 4091 - protein, 74 aa, Artificial Sequence; identical to SEQ ID NO: 4090
  Synthetic polypeptide

SEQ ID NO: 4092 - protein, 74 aa, Artificial Sequence
  Synthetic polypeptide
TLKRTLAYSTRVETRGSAPPCWTSAGSVHVGRLKLFTTLHVGKWTQKCCRLMPKSGISTILLSVPLREVRCPLP

SEQ ID NO: 4093 - protein, 73 aa, Artificial Sequence
  Synthetic polypeptide
DRDPERGDRDQREVETETQRWENRGAERGGRRQRPRDGGTETQRGQREPLGSPFVETTPGSSCPPQGRPRMLI

SEQ ID NO: 4094 - protein, 73 aa, Artificial Sequence; identical to SEQ ID NO: 4093
  Synthetic polypeptide

SEQ ID NO: 4095 - protein, 73 aa, Artificial Sequence; identical to SEQ ID NO: 4093
  Synthetic polypeptide

SEQ ID NO: 4096 - protein, 73 aa, Artificial Sequence; identical to SEQ ID NO: 4093
  Synthetic polypeptide

SEQ ID NO: 4097 - protein, 73 aa, Artificial Sequence; identical to SEQ ID NO: 4093
  Synthetic polypeptide

SEQ ID NO: 4098 - protein, 73 aa, Artificial Sequence
  Synthetic polypeptide
FRSLLKCHLPEPAAGEPAHEASQASQACEQDAHGHPAADAGAAHGSPAPGAHAECHQVWQHDRGPCDAPAPEC

SEQ ID NO: 4099 - protein, 73 aa, Artificial Sequence; identical to SEQ ID NO: 4098
  Synthetic polypeptide

SEQ ID NO: 4100 - protein, 73 aa, Artificial Sequence; identical to SEQ ID NO: 4098
  Synthetic polypeptide

SEQ ID NO: 4101 - protein, 73 aa, Artificial Sequence
  Synthetic polypeptide
FRSLLKCHLPEPAAGEPAHEASQASQACEQDAHGHPAADAGAAHGSPAPGAHAECHQVWQHDRGPCDAPAPVL

SEQ ID NO: 4102 - protein, 73 aa, Artificial Sequence
  Synthetic polypeptide
VTWEIFRNAESLPIPQQNCTCITSAPAQNLAARPPGEQQLNGNDVEGVSSALRFGKRVALGPGRRSQHRPARR

SEQ ID NO: 4103 - protein, 73 aa, Artificial Sequence; identical to SEQ ID NO: 4102
  Synthetic polypeptide

SEQ ID NO: 4104 - protein, 73 aa, Artificial Sequence; identical to SEQ ID NO: 4102
  Synthetic polypeptide

SEQ ID NO: 4105 - protein, 73 aa, Artificial Sequence
  Synthetic polypeptide
IICASVCSWRSPPRRQRRDHQHRRPPSRRSPCPCAQRRAGQRRGAQGTEDVFANVPGLWSNRETSPAFRRDTS

SEQ ID NO: 4106 - protein, 73 aa, Artificial Sequence; identical to SEQ ID NO: 4105
  Synthetic polypeptide

SEQ ID NO: 4107 - protein, 73 aa, Artificial Sequence
  Synthetic polypeptide
FWNQNLNPTCSHLQVVSKLMDMQGHTEWYNVHWRLRRLASRRELLLKGKAEVGKTFFKRSWRKQIRRLLGHQN

SEQ ID NO: 4108 - protein, 73 aa, Artificial Sequence
  Synthetic polypeptide
HFICTAPVDPPSSPAPRPSTPSTARRARSSASSGARRRRTASPGPGRRTFWSRAHRGAIRWRPSAPRRASSPP

SEQ ID NO: 4109 - protein, 73 aa, Artificial Sequence; identical to SEQ ID NO: 4108
  Synthetic polypeptide

SEQ ID NO: 4110 - protein, 73 aa, Artificial Sequence; identical to SEQ ID NO: 4108
  Synthetic polypeptide

SEQ ID NO: 4111 - protein, 73 aa, Artificial Sequence
  Synthetic polypeptide
KKAWREQRYCLQISEELPWDAKIELDGTNTMEREESEQTKKREKIHIPERSDEAQRVFKSSKTSSCDKSDTCF

SEQ ID NO: 4112 - protein, 73 aa, Artificial Sequence; identical to SEQ ID NO: 4111
  Synthetic polypeptide

SEQ ID NO: 4113 - protein, 73 aa, Artificial Sequence; identical to SEQ ID NO: 4111
  Synthetic polypeptide

SEQ ID NO: 4114 - protein, 73 aa, Artificial Sequence; identical to SEQ ID NO: 4111
  Synthetic polypeptide

SEQ ID NO: 4115 - protein, 73 aa, Artificial Sequence; identical to SEQ ID NO: 4111
  Synthetic polypeptide

SEQ ID NO: 4116 - protein, 73 aa, Artificial Sequence; identical to SEQ ID NO: 4111
  Synthetic polypeptide

SEQ ID NO: 4117 - protein, 73 aa, Artificial Sequence
  Synthetic polypeptide
SQHFGRPKWVATSTLGGHKPGDHRQASGCGTRVLPRHPHPGNLWAQAPATLEEDTEPAGASGEFQRPELLCEE

SEQ ID NO: 4118 - protein, 73 aa, Artificial Sequence; identical to SEQ ID NO: 4117
  Synthetic polypeptide

SEQ ID NO: 4119 - protein, 73 aa, Artificial Sequence; identical to SEQ ID NO: 4117
  Synthetic polypeptide

SEQ ID NO: 4120 - protein, 73 aa, Artificial Sequence; identical to SEQ ID NO: 4117
  Synthetic polypeptide

SEQ ID NO: 4121 - protein, 73 aa, Artificial Sequence; identical to SEQ ID NO: 4117
  Synthetic polypeptide

SEQ ID NO: 4122 - protein, 73 aa, Artificial Sequence; identical to SEQ ID NO: 4117
  Synthetic polypeptide

SEQ ID NO: 4123 - protein, 73 aa, Artificial Sequence
  Synthetic polypeptide
FNPLSVKCHLDSLWDLGIRGPETKMLLPYCLLTKLGRRVVLWATSSSMFLFGIAAAFAVDYYTFMAARFFLAM

SEQ ID NO: 4124 - protein, 73 aa, Artificial Sequence
  Synthetic polypeptide
ELGCTAGGELWFHRASVPYLWNHICLRLLLCIPAFIGHFGTLFQEAPWTGEWHCHCWQQCLHNPAAFALKGSD

SEQ ID NO: 4125 - protein, 73 aa, Artificial Sequence; identical to SEQ ID NO: 4124
  Synthetic polypeptide

SEQ ID NO: 4126 - protein, 73 aa, Artificial Sequence; identical to SEQ ID NO: 4124
  Synthetic polypeptide

SEQ ID NO: 4127 - protein, 73 aa, Artificial Sequence
  Synthetic polypeptide
IIASPGAFAKMQPALLYLVPACIGFPVLVALAKGEVTEMFSYEESNPKDPAAVTESKEGTEASASKGLEKKEK

SEQ ID NO: 4128 - protein, 73 aa, Artificial Sequence; identical to SEQ ID NO: 4127
  Synthetic polypeptide

SEQ ID NO: 4129 - protein, 73 aa, Artificial Sequence
  Synthetic polypeptide
AEIVPLHSSLGNRIPLGLSIGVCVRVGMALGAADTVQAKRSAVSGVLSIVGISLVLGTLISILKNQLGHIFTN

SEQ ID NO: 4130 - protein, 72 aa, Artificial Sequence
  Synthetic polypeptide
HFLAIKYFFKLWYIHCLFRYYAIAHLIVYSIMQIYLLYALGNLGIHVTCFIEMFALSHWSGTKPTLSPSFQR

SEQ ID NO: 4131 - protein, 72 aa, Artificial Sequence; identical to SEQ ID NO: 4130
  Synthetic polypeptide

SEQ ID NO: 4132 - protein, 72 aa, Artificial Sequence; identical to SEQ ID NO: 4130
  Synthetic polypeptide

SEQ ID NO: 4133 - protein, 72 aa, Artificial Sequence
  Synthetic polypeptide
EFSNIGMWRPQGKTILSYRQKPGICCEIHSQKIPCCRNPQQQSTACTTTERKIRDSEKSGIILLHICRCYGI

SEQ ID NO: 4134 - protein, 72 aa, Artificial Sequence; identical to SEQ ID NO: 4133
  Synthetic polypeptide

SEQ ID NO: 4135 - protein, 72 aa, Artificial Sequence
  Synthetic polypeptide
FLYFRCLNRWASLAGPGQGSPPWPVGCCGSRRQLRVGSGSTGSPLPTWGCTHCAPGSASSPRTPSCSLALCG

SEQ ID NO: 4136 - protein, 72 aa, Artificial Sequence
  Synthetic polypeptide
QLGLVEGMWDLKAGQPEFQSCLLLTSFMRRELTPASLSCLLCKMEVAAPVSGACYADPPRVPARHTCAPAQT

SEQ ID NO: 4137 - protein, 72 aa, Artificial Sequence; identical to SEQ ID NO: 4136
  Synthetic polypeptide

SEQ ID NO: 4138 - protein, 72 aa, Artificial Sequence; identical to SEQ ID NO: 4136
  Synthetic polypeptide

SEQ ID NO: 4139 - protein, 72 aa, Artificial Sequence; identical to SEQ ID NO: 4136
  Synthetic polypeptide

SEQ ID NO: 4140 - protein, 72 aa, Artificial Sequence; identical to SEQ ID NO: 4136
  Synthetic polypeptide

SEQ ID NO: 4141 - protein, 72 aa, Artificial Sequence
  Synthetic polypeptide
GRARWLTPVIAALGEAEAGGSPEMYPELQIARVEQATQAIPMERWCGGSRSGSCAHPHHQVVPFRCLPGEFV

SEQ ID NO: 4142 - protein, 72 aa, Artificial Sequence
  Synthetic polypeptide
GRAGWFMPVIPALWDAKVFKVASSDLVNMGISVVSYTLKDIHDDQDYLHSLGKARTAQVQKDARIGEAEAKR

SEQ ID NO: 4143 - protein, 71 aa, Artificial Sequence
  Synthetic polypeptide
YSQNRASIAPTGLWCSPAGPVRRRPGRPALPATLLPAVCRSAGHCPLQPAPSLGPLPTQESKRFVQWQSSI

SEQ ID NO: 4144 - protein, 71 aa, Artificial Sequence
  Synthetic polypeptide
TETQRGGTEIRERWRQKPRDGRTEVQREGDGDRDPETGEQRPRGDRESPLDLPSWRRHRGPPAHPRGGPGC

SEQ ID NO: 4145 - protein, 71 aa, Artificial Sequence; identical to SEQ ID NO: 4144
  Synthetic polypeptide

SEQ ID NO: 4146 - protein, 71 aa, Artificial Sequence; identical to SEQ ID NO: 4144
  Synthetic polypeptide

SEQ ID NO: 4147 - protein, 71 aa, Artificial Sequence; identical to SEQ ID NO: 4144
  Synthetic polypeptide

SEQ ID NO: 4148 - protein, 71 aa, Artificial Sequence; identical to SEQ ID NO: 4144
  Synthetic polypeptide

SEQ ID NO: 4149 - protein, 71 aa, Artificial Sequence
  Synthetic polypeptide
TGHYHLAHLLRGTGIGIGFYGNSETSDGVSQLSSALLHANHTLSTIDHLVLETVERLGEAVRTELTTLEEV

SEQ ID NO: 4150 - protein, 71 aa, Artificial Sequence
  Synthetic polypeptide
NVTSLNLQLENLRMKLPKPPKPVSKMRMATPLLMQALPMGALPQGPMQNATKYGNMTEDHVMHLLQEVAKS

SEQ ID NO: 4151 - protein, 71 aa, Artificial Sequence
  Synthetic polypeptide
PTLRTSFPSCVLPYPPCLPPSWLLPAQCASSSPNSEFLKSRDWVLCIFSPVTGTVSACSSFVVWKIFRQFK

SEQ ID NO: 4152 - protein, 71 aa, Artificial Sequence; identical to SEQ ID NO: 4151
  Synthetic polypeptide

SEQ ID NO: 4153 - protein, 71 aa, Artificial Sequence
  Synthetic polypeptide
NPVSTKNTKISQVWCLSAVGLLTTQIGRKSLPCRRTESPTPAALMLLWAVGLISTRRRSIRRAVWRRLGAG

SEQ ID NO: 4154 - protein, 71 aa, Artificial Sequence; identical to SEQ ID NO: 4153
  Synthetic polypeptide

SEQ ID NO: 4155 - protein, 71 aa, Artificial Sequence; identical to SEQ ID NO: 4153
  Synthetic polypeptide

SEQ ID NO: 4156 - protein, 71 aa, Artificial Sequence; identical to SEQ ID NO: 4153
  Synthetic polypeptide

SEQ ID NO: 4157 - protein, 71 aa, Artificial Sequence; identical to SEQ ID NO: 4153
  Synthetic polypeptide

SEQ ID NO: 4158 - protein, 71 aa, Artificial Sequence; identical to SEQ ID NO: 4153
  Synthetic polypeptide

SEQ ID NO: 4159 - protein, 71 aa, Artificial Sequence; identical to SEQ ID NO: 4153
  Synthetic polypeptide

SEQ ID NO: 4160 - protein, 71 aa, Artificial Sequence; identical to SEQ ID NO: 4153
  Synthetic polypeptide

SEQ ID NO: 4161 - protein, 71 aa, Artificial Sequence; identical to SEQ ID NO: 4153
  Synthetic polypeptide

SEQ ID NO: 4162 - protein, 71 aa, Artificial Sequence; identical to SEQ ID NO: 4153
  Synthetic polypeptide

SEQ ID NO: 4163 - protein, 71 aa, Artificial Sequence; identical to SEQ ID NO: 4153
  Synthetic polypeptide

SEQ ID NO: 4164 - protein, 71 aa, Artificial Sequence; identical to SEQ ID NO: 4153
  Synthetic polypeptide

SEQ ID NO: 4165 - protein, 71 aa, Artificial Sequence
  Synthetic polypeptide
SEDCSSAHPFKLLRLPESGCVPLSPGPGDHGESTSKLASVTRSVDKDPGIPRALSLSGSSSSPQAQVMVHM

SEQ ID NO: 4166 - protein, 71 aa, Artificial Sequence
  Synthetic polypeptide
DNIRSALRSVPGTRSPGCASSSATRGARPARGHRGAAVPPAATCSWTVHLPGDLAAPRCTCEPPECGRLPP

SEQ ID NO: 4167 - protein, 71 aa, Artificial Sequence; identical to SEQ ID NO: 4166
  Synthetic polypeptide

SEQ ID NO: 4168 - protein, 71 aa, Artificial Sequence
  Synthetic polypeptide
RPAWPTWAPGAADHLLPGNHGPGLPGAHACAPWQEPPALPFPGVLVALLADFGPGCDPAEHGSPLGLPGDS

SEQ ID NO: 4169 - protein, 71 aa, Artificial Sequence; identical to SEQ ID NO: 4168
  Synthetic polypeptide

SEQ ID NO: 4170 - protein, 71 aa, Artificial Sequence; identical to SEQ ID NO: 4168
  Synthetic polypeptide

SEQ ID NO: 4171 - protein, 71 aa, Artificial Sequence; identical to SEQ ID NO: 4168
  Synthetic polypeptide

SEQ ID NO: 4172 - protein, 71 aa, Artificial Sequence; identical to SEQ ID NO: 4168
  Synthetic polypeptide

SEQ ID NO: 4173 - protein, 71 aa, Artificial Sequence; identical to SEQ ID NO: 4168
  Synthetic polypeptide

SEQ ID NO: 4174 - protein, 71 aa, Artificial Sequence; identical to SEQ ID NO: 4168
  Synthetic polypeptide

SEQ ID NO: 4175 - protein, 71 aa, Artificial Sequence; identical to SEQ ID NO: 4168
  Synthetic polypeptide

SEQ ID NO: 4176 - protein, 71 aa, Artificial Sequence
  Synthetic polypeptide
GVCGLLVQILALHSRQAVIVGGVVGALFAAFLVTLLIYRMKKKDEGSYTLEEPKQASVTYQKPDKQEEFYA

SEQ ID NO: 4177 - protein, 71 aa, Artificial Sequence; identical to SEQ ID NO: 4176
  Synthetic polypeptide

SEQ ID NO: 4178 - protein, 71 aa, Artificial Sequence
  Synthetic polypeptide
VGERWPEARQSGFYFQTCPLTHHDCGCHYAREEVPAEGPASAAEGPRLHVQGAAGVVLRQHQHPRPQAHHL

SEQ ID NO: 4179 - protein, 71 aa, Artificial Sequence
  Synthetic polypeptide
SDMTSVLIGRGDKDTQENARDVFAQRKHCGRAREKAAIYEPRREASGEASPANPWSSDCQPPELVQAAQLP

SEQ ID NO: 4180 - protein, 71 aa, Artificial Sequence; identical to SEQ ID NO: 4179
  Synthetic polypeptide

SEQ ID NO: 4181 - protein, 71 aa, Artificial Sequence; identical to SEQ ID NO: 4179
  Synthetic polypeptide

SEQ ID NO: 4182 - protein, 71 aa, Artificial Sequence; identical to SEQ ID NO: 4179
  Synthetic polypeptide

SEQ ID NO: 4183 - protein, 71 aa, Artificial Sequence
  Synthetic polypeptide
QENKLGAPIDSTLCFSQMPTSSVKDETNDNITIFTRILDGLLDGYDNRLRPGLGERITQVRTDIYVTSFGP

SEQ ID NO: 4184 - protein, 71 aa, Artificial Sequence
  Synthetic polypeptide
GGGGGGRRARHGRPGRGAWRRRADGRAAAGADPPPPPPRSSGPGRGAAAARCPSTPSGRAASVTGSPPSPS

SEQ ID NO: 4185 - protein, 71 aa, Artificial Sequence; identical to SEQ ID NO: 4184
  Synthetic polypeptide

SEQ ID NO: 4186 - protein, 71 aa, Artificial Sequence; identical to SEQ ID NO: 4184
  Synthetic polypeptide

SEQ ID NO: 4187 - protein, 71 aa, Artificial Sequence
  Synthetic polypeptide
RGSLSYASRSRRFPSWGSQGPLQTKSLGLPTRIRTTLKKDVASPPTMRCSRRSTRWLCWGRPTTLLPRRPP

SEQ ID NO: 4188 - protein, 71 aa, Artificial Sequence
  Synthetic polypeptide
GQARWLLPVISALWMPRRVDHLRSGVQDQPAQHGPQDRLRALVVIPIIFGILFAILLVLVFIKKVAKKPTN

SEQ ID NO: 4189 - protein, 70 aa, Artificial Sequence
  Synthetic polypeptide
SKSNHEKNQINSNLRTLQEKLAGNHQKCQGYKSQGHTEDPFGIKNLRRRVNYTRLDLWISLLKRKLLKFH

SEQ ID NO: 4190 - protein, 70 aa, Artificial Sequence; identical to SEQ ID NO: 4189
  Synthetic polypeptide

SEQ ID NO: 4191 - protein, 70 aa, Artificial Sequence
  Synthetic polypeptide
SQLLGRLRQENRLNPGGEPGIPTHHPRVYNIHSRTVTRYPANSIVVVGGCPVCRHQRSSWLYTYPLRVCT

SEQ ID NO: 4192 - protein, 70 aa, Artificial Sequence
  Synthetic polypeptide
PGREIYKDRQKFSEQVFKVASSDLVNMGISVVSYTLKDIHDDQDYLHSLGKARTAQVQKDARIGEAEAKR

SEQ ID NO: 4193 - protein, 70 aa, Artificial Sequence
  Synthetic polypeptide
MGAVAHACNASTLRGRGGKITRRSRSCREDQKPVMDDQRDLISNNEQLPMLGRRPGAPESPCRMPPSMAT

SEQ ID NO: 4194 - protein, 70 aa, Artificial Sequence
  Synthetic polypeptide
TIYCKSSLLMTCRSSPNSPPKLAEDLCLARSHSPPLTATVQLHPTQIALMMRFLPERSSKPTPRAAAISV

SEQ ID NO: 4195 - protein, 70 aa, Artificial Sequence
  Synthetic polypeptide
EAEAGESLEPKEAEVAVRCRCSSMHFLVAEWNEPSINFYKRRGASDLSSEEGWRLFKIDKEYLLKMATEE

SEQ ID NO: 4196 - protein, 70 aa, Artificial Sequence; identical to SEQ ID NO: 4195
  Synthetic polypeptide

SEQ ID NO: 4197 - protein, 70 aa, Artificial Sequence
  Synthetic polypeptide
VTWEIFRNAESLPIPQQNCTCITSAPAQNLAARPPGEQQLNGNDVEGVSSALRFGKRVALGPGRRRGRRL

SEQ ID NO: 4198 - protein, 70 aa, Artificial Sequence
  Synthetic polypeptide
ISQTDRKITLCFLCLKRMTTGERPPRPSQAPRSTAYPKRTLPGSARTWRTAWGWIANATWASPSPLFLDF

SEQ ID NO: 4199 - protein, 70 aa, Artificial Sequence; identical to SEQ ID NO: 4198
  Synthetic polypeptide

SEQ ID NO: 4200 - protein, 70 aa, Artificial Sequence; identical to SEQ ID NO: 4198
  Synthetic polypeptide

SEQ ID NO: 4201 - protein, 70 aa, Artificial Sequence; identical to SEQ ID NO: 4198
  Synthetic polypeptide

SEQ ID NO: 4202 - protein, 70 aa, Artificial Sequence
  Synthetic polypeptide
PATVAHACNPNTLENELCCVRAPAASRPTTRVRQMGPAWFPFSIWMGWSTMCAPASPKWSWSLPGSPSTA

SEQ ID NO: 4203 - protein, 70 aa, Artificial Sequence; identical to SEQ ID NO: 4202
  Synthetic polypeptide

SEQ ID NO: 4204 - protein, 70 aa, Artificial Sequence; identical to SEQ ID NO: 4202
  Synthetic polypeptide

SEQ ID NO: 4205 - protein, 70 aa, Artificial Sequence; identical to SEQ ID NO: 4202
  Synthetic polypeptide

SEQ ID NO: 4206 - protein, 70 aa, Artificial Sequence
  Synthetic polypeptide
GNSETSAGACPPYAEHRSPGPLFFLYTLSLCLLSFLSLSSHLTRNIHRCSMSSYTKPFWSIISMEIQNWK

SEQ ID NO: 4207 - protein, 70 aa, Artificial Sequence; identical to SEQ ID NO: 4206
  Synthetic polypeptide

SEQ ID NO: 4208 - protein, 70 aa, Artificial Sequence; identical to SEQ ID NO: 4206
  Synthetic polypeptide

SEQ ID NO: 4209 - protein, 70 aa, Artificial Sequence; identical to SEQ ID NO: 4206
  Synthetic polypeptide

SEQ ID NO: 4210 - protein, 70 aa, Artificial Sequence; identical to SEQ ID NO: 4206
  Synthetic polypeptide

SEQ ID NO: 4211 - protein, 70 aa, Artificial Sequence; identical to SEQ ID NO: 4206
  Synthetic polypeptide

SEQ ID NO: 4212 - protein, 70 aa, Artificial Sequence; identical to SEQ ID NO: 4206
  Synthetic polypeptide

SEQ ID NO: 4213 - protein, 70 aa, Artificial Sequence
  Synthetic polypeptide
CIIRYDNPKSKSIQQIHKNKKQEIKTDHQRKSPSLKGRQEEKKEGRGGHKTTIKDITKWQEKKKKQLEER

SEQ ID NO: 4214 - protein, 70 aa, Artificial Sequence; identical to SEQ ID NO: 4213
  Synthetic polypeptide

SEQ ID NO: 4215 - protein, 70 aa, Artificial Sequence; identical to SEQ ID NO: 4213
  Synthetic polypeptide

SEQ ID NO: 4216 - protein, 70 aa, Artificial Sequence; identical to SEQ ID NO: 4213
  Synthetic polypeptide

SEQ ID NO: 4217 - protein, 70 aa, Artificial Sequence; identical to SEQ ID NO: 4213
  Synthetic polypeptide

SEQ ID NO: 4218 - protein, 70 aa, Artificial Sequence
  Synthetic polypeptide
SFGERAPSTRSGDPLVAVLPTRTRVPQASRCPAGSSCPTPGARPPASPRVRASACRGDGDFCRSSGRMCL

SEQ ID NO: 4219 - protein, 70 aa, Artificial Sequence
  Synthetic polypeptide
PGAVALACNLSTLDAKAGGSLEVRSSRPASTTWSPGSAESPGGDPHHLRDPVCHPLGAGLYQKGGQEANQ

SEQ ID NO: 4220 - protein, 70 aa, Artificial Sequence; identical to SEQ ID NO: 4219
  Synthetic polypeptide

SEQ ID NO: 4221 - protein, 69 aa, Artificial Sequence
  Synthetic polypeptide
EANKALGKTGLIFCVHSPCTGFLACGNIIGSGIFVSPKGVLENAGSVGLALIVWIVTGFITVVGALCYA

SEQ ID NO: 4222 - protein, 69 aa, Artificial Sequence
  Synthetic polypeptide
GYLQRAPGAADHLLPGNHGPGLPGAHACAPWQEPPALPFPGVLVALLADFGPGCDPAEHGSPLGLPGDS

SEQ ID NO: 4223 - protein, 69 aa, Artificial Sequence; identical to SEQ ID NO: 4222
  Synthetic polypeptide

SEQ ID NO: 4224 - protein, 69 aa, Artificial Sequence; identical to SEQ ID NO: 4222
  Synthetic polypeptide

SEQ ID NO: 4225 - protein, 69 aa, Artificial Sequence; identical to SEQ ID NO: 4222
  Synthetic polypeptide

SEQ ID NO: 4226 - protein, 69 aa, Artificial Sequence; identical to SEQ ID NO: 4222
  Synthetic polypeptide

SEQ ID NO: 4227 - protein, 69 aa, Artificial Sequence; identical to SEQ ID NO: 4222
  Synthetic polypeptide

SEQ ID NO: 4228 - protein, 69 aa, Artificial Sequence; identical to SEQ ID NO: 4222
  Synthetic polypeptide

SEQ ID NO: 4229 - protein, 69 aa, Artificial Sequence; identical to SEQ ID NO: 4222
  Synthetic polypeptide

SEQ ID NO: 4230 - protein, 69 aa, Artificial Sequence
  Synthetic polypeptide
VKTGRPLLVCHPAHGGVLVHGGPAALSDGAAAHRPLPLHGHLALQQGLPPVLPRHQLPLPQWADHGQRH

SEQ ID NO: 4231 - protein, 69 aa, Artificial Sequence; identical to SEQ ID NO: 4230
  Synthetic polypeptide

SEQ ID NO: 4232 - protein, 69 aa, Artificial Sequence; identical to SEQ ID NO: 4230
  Synthetic polypeptide

SEQ ID NO: 4233 - protein, 69 aa, Artificial Sequence; identical to SEQ ID NO: 4230
  Synthetic polypeptide

SEQ ID NO: 4234 - protein, 69 aa, Artificial Sequence; identical to SEQ ID NO: 4230
  Synthetic polypeptide

SEQ ID NO: 4235 - protein, 69 aa, Artificial Sequence
  Synthetic polypeptide
GQVRWLTAVIPALWEAEAGRSPEVDSLRPAWPTRVIVLDKGEIQEYGAPSDLLQQRGLFYSMAKDAGLV

SEQ ID NO: 4236 - protein, 69 aa, Artificial Sequence; identical to SEQ ID NO: 4235
  Synthetic polypeptide

SEQ ID NO: 4237 - protein, 69 aa, Artificial Sequence; identical to SEQ ID NO: 4235
  Synthetic polypeptide

SEQ ID NO: 4238 - protein, 69 aa, Artificial Sequence; identical to SEQ ID NO: 4235
  Synthetic polypeptide

SEQ ID NO: 4239 - protein, 69 aa, Artificial Sequence; identical to SEQ ID NO: 4235
  Synthetic polypeptide

SEQ ID NO: 4240 - protein, 69 aa, Artificial Sequence; identical to SEQ ID NO: 4235
  Synthetic polypeptide

SEQ ID NO: 4241 - protein, 69 aa, Artificial Sequence; identical to SEQ ID NO: 4235
  Synthetic polypeptide

SEQ ID NO: 4242 - protein, 69 aa, Artificial Sequence
  Synthetic polypeptide
SQHFGRPRRADHKEFGHWNRDPEFPRGPGCQPSLARGRLLHLESFLVWAAERHGGAPGRGLWCLCRGAG

SEQ ID NO: 4243 - protein, 69 aa, Artificial Sequence; identical to SEQ ID NO: 4242
  Synthetic polypeptide

SEQ ID NO: 4244 - protein, 69 aa, Artificial Sequence
  Synthetic polypeptide
WKLKRNKTGPVPFASQLWTAWKRRTRPCAMTTTSTSTPPSGILKHLQRSLQLEKILKDLTESCEQSDRR

SEQ ID NO: 4245 - protein, 69 aa, Artificial Sequence
  Synthetic polypeptide
GHTATHCPPNWRDRQQKYKESQLTGAETHKQKPLQESVLSPHPPTLSRTTWQQLFTQFCHPCSILLSTA

SEQ ID NO: 4246 - protein, 69 aa, Artificial Sequence
  Synthetic polypeptide
AGRAKPTVQPSPSTTSKTVTTSGTTNNTVTPTSQPVRKSTFDAASFIGGIVLVLEIRCHTRNYIPDLKK

SEQ ID NO: 4247 - protein, 69 aa, Artificial Sequence
  Synthetic polypeptide
GTQHFPGEQEENIRRYMGLSHSFTFSILCALEWTYCIHSIVEGTATISSRLTSPQTTWAVSPSAGSHAA

SEQ ID NO: 4248 - protein, 69 aa, Artificial Sequence; identical to SEQ ID NO: 4247
  Synthetic polypeptide

SEQ ID NO: 4249 - protein, 69 aa, Artificial Sequence; identical to SEQ ID NO: 4247
  Synthetic polypeptide

SEQ ID NO: 4250 - protein, 69 aa, Artificial Sequence; identical to SEQ ID NO: 4247
  Synthetic polypeptide

SEQ ID NO: 4251 - protein, 69 aa, Artificial Sequence; identical to SEQ ID NO: 4247
  Synthetic polypeptide

SEQ ID NO: 4252 - protein, 69 aa, Artificial Sequence
  Synthetic polypeptide
KYKKLVRTKYFGQISSTKPFSVPTASQVPMSTCWLKTYCPQRIWFSSTTSPSQERLRLQWPPRRHPPSG

SEQ ID NO: 4253 - protein, 69 aa, Artificial Sequence
  Synthetic polypeptide
KYKMSQKYLGCQKEFGHWNRDPEFPRGPGCQPSLARGRLLHLESFLVWAAERHGGAPGRGLWCLCRGAG

SEQ ID NO: 4254 - protein, 69 aa, Artificial Sequence; identical to SEQ ID NO: 4253
  Synthetic polypeptide

SEQ ID NO: 4255 - protein, 68 aa, Artificial Sequence
  Synthetic polypeptide
CICDFGICKQIYIDKKQIIFCLDTGVKRGLNCKVMRNLLGEMEMSCVLFVVVVVSQVNTPIKSWLLKR

SEQ ID NO: 4256 - protein, 68 aa, Artificial Sequence; identical to SEQ ID NO: 4255
  Synthetic polypeptide

SEQ ID NO: 4257 - protein, 68 aa, Artificial Sequence; identical to SEQ ID NO: 4255
  Synthetic polypeptide

SEQ ID NO: 4258 - protein, 68 aa, Artificial Sequence; identical to SEQ ID NO: 4255
  Synthetic polypeptide

SEQ ID NO: 4259 - protein, 68 aa, Artificial Sequence; identical to SEQ ID NO: 4255
  Synthetic polypeptide

SEQ ID NO: 4260 - protein, 68 aa, Artificial Sequence; identical to SEQ ID NO: 4255
  Synthetic polypeptide

SEQ ID NO: 4261 - protein, 68 aa, Artificial Sequence
  Synthetic polypeptide
LAFSGLQLLSTIARGGSVRGTMVQPCGACAKTPWKACSSCYSSPCCLQERWPLPSAACPEPGPSSHPV

SEQ ID NO: 4262 - protein, 68 aa, Artificial Sequence
  Synthetic polypeptide
SQLLGRLRQENCSNPGGGGAVGKIRSQSWMTSATLSPTMSNCPCWAGALGPRRASAAAEPCTQAFPSW

SEQ ID NO: 4263 - protein, 68 aa, Artificial Sequence; identical to SEQ ID NO: 4262
  Synthetic polypeptide

SEQ ID NO: 4264 - protein, 68 aa, Artificial Sequence; identical to SEQ ID NO: 4262
  Synthetic polypeptide

SEQ ID NO: 4265 - protein, 68 aa, Artificial Sequence; identical to SEQ ID NO: 4262
  Synthetic polypeptide

SEQ ID NO: 4266 - protein, 68 aa, Artificial Sequence; identical to SEQ ID NO: 4262
  Synthetic polypeptide

SEQ ID NO: 4267 - protein, 68 aa, Artificial Sequence; identical to SEQ ID NO: 4262
  Synthetic polypeptide

SEQ ID NO: 4268 - protein, 68 aa, Artificial Sequence; identical to SEQ ID NO: 4262
  Synthetic polypeptide

SEQ ID NO: 4269 - protein, 68 aa, Artificial Sequence
  Synthetic polypeptide
RAPVIPTTWEAEAGELLEPGRRRSCREDQKPVMDDQRDLISNNEQLPMLGRRPGAPESPCRMPPSMAT

SEQ ID NO: 4270 - protein, 68 aa, Artificial Sequence
  Synthetic polypeptide
GDGDARVAGHGVHAHREDHEGPGAAGQGLQRHQRPLRQDLPAARQEAQAGDQGEAEEPEPPLERDLPL

SEQ ID NO: 4271 - protein, 68 aa, Artificial Sequence; identical to SEQ ID NO: 4270
  Synthetic polypeptide

SEQ ID NO: 4272 - protein, 68 aa, Artificial Sequence; identical to SEQ ID NO: 4270
  Synthetic polypeptide

SEQ ID NO: 4273 - protein, 68 aa, Artificial Sequence; identical to SEQ ID NO: 4270
  Synthetic polypeptide

SEQ ID NO: 4274 - protein, 68 aa, Artificial Sequence; identical to SEQ ID NO: 4270
  Synthetic polypeptide

SEQ ID NO: 4275 - protein, 68 aa, Artificial Sequence; identical to SEQ ID NO: 4270
  Synthetic polypeptide

SEQ ID NO: 4276 - protein, 68 aa, Artificial Sequence
  Synthetic polypeptide
IGNSRSKQFITFKARAVLHSLVLGVLFFAIACFLYKPLSESSDGLETCLPSQSSAPDSATDSQLQSSV

SEQ ID NO: 4277 - protein, 68 aa, Artificial Sequence; identical to SEQ ID NO: 4276
  Synthetic polypeptide

SEQ ID NO: 4278 - protein, 68 aa, Artificial Sequence; identical to SEQ ID NO: 4276
  Synthetic polypeptide

SEQ ID NO: 4279 - protein, 68 aa, Artificial Sequence
  Synthetic polypeptide
SQLVGRLRQENHLNPGSGGCSEPRSHHCTPAWATERDAISKAKSVCPGPGRIHPGGPHGPGDCSCGSE

SEQ ID NO: 4280 - protein, 68 aa, Artificial Sequence
  Synthetic polypeptide
DLMVLKRGSFPAQTLFLPAAIRVRCDLVLLAFRHDCEVSPATWNCKSIKPLFLPGFRASSLTLAHHII

SEQ ID NO: 4281 - protein, 68 aa, Artificial Sequence; identical to SEQ ID NO: 4280
  Synthetic polypeptide

SEQ ID NO: 4282 - protein, 68 aa, Artificial Sequence
  Synthetic polypeptide
GAPLPGQPPHPGGRWGGQPPARPAAPSGREVGGGQPPTRPAAPSGRKLHGVMVNLPHNRVQICHQQVH

SEQ ID NO: 4283 - protein, 68 aa, Artificial Sequence; identical to SEQ ID NO: 4282
  Synthetic polypeptide

SEQ ID NO: 4284 - protein, 68 aa, Artificial Sequence
  Synthetic polypeptide
HFERPRRRITRSPGCASSSATRGARPARGHRGAAVPPAATCSWTVHLPGDLAAPRCTCEPPECGRLPP

SEQ ID NO: 4285 - protein, 68 aa, Artificial Sequence; identical to SEQ ID NO: 4284
  Synthetic polypeptide

SEQ ID NO: 4286 - protein, 68 aa, Artificial Sequence
  Synthetic polypeptide
GGRHCHALMPKEPVAVSSHVVTISSLLPATAYNCSVTSFSHDSPSVPTFIAVSTMGSVELVHLSILHP

SEQ ID NO: 4287 - protein, 68 aa, Artificial Sequence
  Synthetic polypeptide
VQEFKTSLGNMVNPHLYKNLASEAHHDASAATTNTGAHHRVAAPVPAPRGVPASGGGRSAHEGAGLRL

SEQ ID NO: 4288 - protein, 68 aa, Artificial Sequence; identical to SEQ ID NO: 4287
  Synthetic polypeptide

SEQ ID NO: 4289 - protein, 68 aa, Artificial Sequence; identical to SEQ ID NO: 4287
  Synthetic polypeptide

SEQ ID NO: 4290 - protein, 68 aa, Artificial Sequence
  Synthetic polypeptide
LALTSNRSLKNTCSFLLALLKLCPHHETMPRLVCWKEVRGTRKRATFSQGHSRPVVPCHFTNWPQHKI

SEQ ID NO: 4291 - protein, 68 aa, Artificial Sequence; identical to SEQ ID NO: 4290
  Synthetic polypeptide

SEQ ID NO: 4292 - protein, 68 aa, Artificial Sequence; identical to SEQ ID NO: 4290
  Synthetic polypeptide

SEQ ID NO: 4293 - protein, 68 aa, Artificial Sequence; identical to SEQ ID NO: 4290
  Synthetic polypeptide

SEQ ID NO: 4294 - protein, 68 aa, Artificial Sequence; identical to SEQ ID NO: 4290
  Synthetic polypeptide

SEQ ID NO: 4295 - protein, 68 aa, Artificial Sequence; identical to SEQ ID NO: 4290
  Synthetic polypeptide

SEQ ID NO: 4296 - protein, 68 aa, Artificial Sequence; identical to SEQ ID NO: 4290
  Synthetic polypeptide

SEQ ID NO: 4297 - protein, 68 aa, Artificial Sequence; identical to SEQ ID NO: 4290
  Synthetic polypeptide

SEQ ID NO: 4298 - protein, 68 aa, Artificial Sequence; identical to SEQ ID NO: 4290
  Synthetic polypeptide

SEQ ID NO: 4299 - protein, 68 aa, Artificial Sequence; identical to SEQ ID NO: 4290
  Synthetic polypeptide

SEQ ID NO: 4300 - protein, 68 aa, Artificial Sequence; identical to SEQ ID NO: 4290
  Synthetic polypeptide

SEQ ID NO: 4301 - protein, 68 aa, Artificial Sequence; identical to SEQ ID NO: 4290
  Synthetic polypeptide

SEQ ID NO: 4302 - protein, 68 aa, Artificial Sequence; identical to SEQ ID NO: 4290
  Synthetic polypeptide

SEQ ID NO: 4303 - protein, 68 aa, Artificial Sequence; identical to SEQ ID NO: 4290
  Synthetic polypeptide

SEQ ID NO: 4304 - protein, 68 aa, Artificial Sequence; identical to SEQ ID NO: 4290
  Synthetic polypeptide

SEQ ID NO: 4305 - protein, 68 aa, Artificial Sequence; identical to SEQ ID NO: 4290
  Synthetic polypeptide

SEQ ID NO: 4306 - protein, 68 aa, Artificial Sequence; identical to SEQ ID NO: 4290
  Synthetic polypeptide

SEQ ID NO: 4307 - protein, 68 aa, Artificial Sequence
  Synthetic polypeptide
ERSYTAGEEFKSFALKHPEYAKIFTTYLDLQTCHVFSLPKEVQTTPSTASNKVSPEKHEESTSDKKDD

SEQ ID NO: 4308 - protein, 67 aa, Artificial Sequence
  Synthetic polypeptide
SASPKTKLPSWLHFGFVKSSDFFSPEPRPCLHRLSDHLSVRRAPPSHPAPKGRPDHRPARGVGEPAL

SEQ ID NO: 4309 - protein, 67 aa, Artificial Sequence; identical to SEQ ID NO: 4308
  Synthetic polypeptide

SEQ ID NO: 4310 - protein, 67 aa, Artificial Sequence
  Synthetic polypeptide
GRARWLTPVIPALWEADAGGSRGTASGLVFILRPEQSTCTWYLGTSGIQPVQNMAILLSYSERDPVP

SEQ ID NO: 4311 - protein, 67 aa, Artificial Sequence
  Synthetic polypeptide
NVTSLNLQLENLRMKLPKPPKPVSKMRMATPLLMQALPMGALPQGPMQNATKYGNMTEDHVMHLLQY

SEQ ID NO: 4312 - protein, 67 aa, Artificial Sequence
  Synthetic polypeptide
QDSNLSFALTGHMTLDKWSNLPESQLASSWAPNMRPVWWQSYLKTTAAWCGQWKTTARSWRSPWACS

SEQ ID NO: 4313 - protein, 67 aa, Artificial Sequence; identical to SEQ ID NO: 4312
  Synthetic polypeptide

SEQ ID NO: 4314 - protein, 67 aa, Artificial Sequence; identical to SEQ ID NO: 4312
  Synthetic polypeptide

SEQ ID NO: 4315 - protein, 67 aa, Artificial Sequence; identical to SEQ ID NO: 4312
  Synthetic polypeptide

SEQ ID NO: 4316 - protein, 67 aa, Artificial Sequence; identical to SEQ ID NO: 4312
  Synthetic polypeptide

SEQ ID NO: 4317 - protein, 67 aa, Artificial Sequence; identical to SEQ ID NO: 4312
  Synthetic polypeptide

SEQ ID NO: 4318 - protein, 67 aa, Artificial Sequence
  Synthetic polypeptide
VSRDLMWVYQGFLLLLLPHFLLPPPCKKSLSPPTMILRLPHPCETDFPGPVQTSGNVLWHCPGFCCI

SEQ ID NO: 4319 - protein, 67 aa, Artificial Sequence; identical to SEQ ID NO: 4318
  Synthetic polypeptide

SEQ ID NO: 4320 - protein, 67 aa, Artificial Sequence; identical to SEQ ID NO: 4318
  Synthetic polypeptide

SEQ ID NO: 4321 - protein, 67 aa, Artificial Sequence
  Synthetic polypeptide
ACPVEHSGGGLWPARATWILRALPGRHLPRWDALPEQCVAGPRGGSTQWLNTGKELVLGVWTSETWL

SEQ ID NO: 4322 - protein, 67 aa, Artificial Sequence
  Synthetic polypeptide
TQEAEVAVSGDRAIALAWATGNEYCIEGRTSGLLLPNCSPYCLCYFYLHQEGSTVEKLLQKEEITNI

SEQ ID NO: 4323 - protein, 67 aa, Artificial Sequence
  Synthetic polypeptide
SQHFGRLRYLRDGGHLLVRLQHHPGLLRPLVPRNQVRAGPRPLPGVERLTDLHPGWPLPLLRLLLRL

SEQ ID NO: 4324 - protein, 67 aa, Artificial Sequence; identical to SEQ ID NO: 4323
  Synthetic polypeptide

SEQ ID NO: 4325 - protein, 67 aa, Artificial Sequence; identical to SEQ ID NO: 4323
  Synthetic polypeptide

SEQ ID NO: 4326 - protein, 67 aa, Artificial Sequence; identical to SEQ ID NO: 4323
  Synthetic polypeptide

SEQ ID NO: 4327 - protein, 67 aa, Artificial Sequence
  Synthetic polypeptide
LLGRLRREDRLSPGVGGCGCRRKLQTPSRPCRRPGSKSGFSRETRWRRPRPRATPASSSAGTRSCWS

SEQ ID NO: 4328 - protein, 67 aa, Artificial Sequence; identical to SEQ ID NO: 4327
  Synthetic polypeptide

SEQ ID NO: 4329 - protein, 67 aa, Artificial Sequence; identical to SEQ ID NO: 4327
  Synthetic polypeptide

SEQ ID NO: 4330 - protein, 67 aa, Artificial Sequence; identical to SEQ ID NO: 4327
  Synthetic polypeptide

SEQ ID NO: 4331 - protein, 67 aa, Artificial Sequence; identical to SEQ ID NO: 4327
  Synthetic polypeptide

SEQ ID NO: 4332 - protein, 67 aa, Artificial Sequence; identical to SEQ ID NO: 4327
  Synthetic polypeptide

SEQ ID NO: 4333 - protein, 67 aa, Artificial Sequence
  Synthetic polypeptide
PGAVAHPCNPSTLGGQGGQITRNLAIGIGIQNFPEGLAVSLPLRGAGFSTWRAFWYGQLSGMVEPLA

SEQ ID NO: 4334 - protein, 67 aa, Artificial Sequence
  Synthetic polypeptide
GRAGWFMPVIPALWDAKDYLHSLGKARTAQVQKDARIGEAEAKRDAGIREAKAKQEKVSAQYLSEIE

SEQ ID NO: 4335 - protein, 67 aa, Artificial Sequence
  Synthetic polypeptide
EHDFWHHSEPGIWHQCDGDSGQVLRGTNKIGVSPGSAGERPRSKQLCHAGTWRCRHSRDLHCLAAAL

SEQ ID NO: 4336 - protein, 67 aa, Artificial Sequence; identical to SEQ ID NO: 4335
  Synthetic polypeptide

SEQ ID NO: 4337 - protein, 67 aa, Artificial Sequence; identical to SEQ ID NO: 4335
  Synthetic polypeptide

SEQ ID NO: 4338 - protein, 67 aa, Artificial Sequence; identical to SEQ ID NO: 4335
  Synthetic polypeptide

SEQ ID NO: 4339 - protein, 67 aa, Artificial Sequence; identical to SEQ ID NO: 4335
  Synthetic polypeptide

SEQ ID NO: 4340 - protein, 67 aa, Artificial Sequence
  Synthetic polypeptide
GAPLPGQPPHPGGRWGGQPPPGQPPRPGGRWGGQPPARPAAPPGRKLHGVMVNLPHNRVQICHQQVH

SEQ ID NO: 4341 - protein, 67 aa, Artificial Sequence; identical to SEQ ID NO: 4340
  Synthetic polypeptide

SEQ ID NO: 4342 - protein, 67 aa, Artificial Sequence
  Synthetic polypeptide
VNLVSGSACALHGDKQWTGMSRGIPATPTSPSAFRTRSSCGCLVFTSGPVSPSTSSISPDMTEATFR

SEQ ID NO: 4343 - protein, 67 aa, Artificial Sequence; identical to SEQ ID NO: 4342
  Synthetic polypeptide

SEQ ID NO: 4344 - protein, 67 aa, Artificial Sequence; identical to SEQ ID NO: 4342
  Synthetic polypeptide

SEQ ID NO: 4345 - protein, 67 aa, Artificial Sequence; identical to SEQ ID NO: 4342
  Synthetic polypeptide

SEQ ID NO: 4346 - protein, 67 aa, Artificial Sequence; identical to SEQ ID NO: 4342
  Synthetic polypeptide

SEQ ID NO: 4347 - protein, 67 aa, Artificial Sequence; identical to SEQ ID NO: 4342
  Synthetic polypeptide

SEQ ID NO: 4348 - protein, 67 aa, Artificial Sequence
  Synthetic polypeptide
SFGERAPSTRSGDPLVAVLPTRTRVPQASRCPAGSSCPTPGARPPASPRVRASACRGDGDFCRSSGR

SEQ ID NO: 4349 - protein, 67 aa, Artificial Sequence
  Synthetic polypeptide
SQEFETSLTYMIHHQQHGSEKPNSYFKIPSPGTDRGSGTAARPFQPVPVHVLGHHPGEPAHPLGCHL

SEQ ID NO: 4350 - protein, 67 aa, Artificial Sequence
  Synthetic polypeptide
ETQEGEIPAAQRAEEEEDRQVRHGWPHHPLPHRHHLVPTALHVAGALRGWGCQPAHRCHRHPEAGRL

SEQ ID NO: 4351 - protein, 67 aa, Artificial Sequence; identical to SEQ ID NO: 4350
  Synthetic polypeptide

SEQ ID NO: 4352 - protein, 66 aa, Artificial Sequence
  Synthetic polypeptide
EKSSKIKWGRIKKIVAKKYRDFEFPSEMTGIWRYLNNAYARDEFTNTCPADQEIEHAYSDVAKRMK

SEQ ID NO: 4353 - protein, 66 aa, Artificial Sequence; identical to SEQ ID NO: 4352
  Synthetic polypeptide

SEQ ID NO: 4354 - protein, 66 aa, Artificial Sequence
  Synthetic polypeptide
DVCFITLVWNQTHTVSKFPEMNDMLREKVTGRKTDFTFFMIQNAGMLTGFTAILLITLYAGEIELE

SEQ ID NO: 4355 - protein, 66 aa, Artificial Sequence; identical to SEQ ID NO: 4354
  Synthetic polypeptide

SEQ ID NO: 4356 - protein, 66 aa, Artificial Sequence
  Synthetic polypeptide
SQRFGRPGWEDCLSPGVRDLPGQHSETPSLQEISLDSLAPPQLSQNRRPRISLAHTAMLTVPPARC

SEQ ID NO: 4357 - protein, 66 aa, Artificial Sequence
  Synthetic polypeptide
TQEAEEISGPLTSANKITLVSSGSGTMGAAKVTGEVLDILTRLPESVERLTGVSISQVNHKPLRTA

SEQ ID NO: 4358 - protein, 66 aa, Artificial Sequence; identical to SEQ ID NO: 4357
  Synthetic polypeptide

SEQ ID NO: 4359 - protein, 66 aa, Artificial Sequence
  Synthetic polypeptide
SQHFGRLMLADHEALPVDWFSSLDQSRVHALGTWGLQAYSLSRIWLSYSPTQKEILSLEAVIWSSI

SEQ ID NO: 4360 - protein, 66 aa, Artificial Sequence
  Synthetic polypeptide
LVLVETGFCCDGRAGLQPLTASDPPALASRGAGIADGLSFTQCSMQAVVDDDANNAKAVVKTFHET

SEQ ID NO: 4361 - protein, 66 aa, Artificial Sequence
  Synthetic polypeptide
VPYAPATDLFFCSLQTTRSSLLLGFCALRSLKSPHIMQVSAHLSPLQRNLLSSSKLKKAHCKQPVP

SEQ ID NO: 4362 - protein, 66 aa, Artificial Sequence
  Synthetic polypeptide
VLMRSGGFYKCFNSSSLAPFSLLLPSEKGACFLFTFCHDCKFPEASPAMQNSRTPGFKVYTCICHT

SEQ ID NO: 4363 - protein, 66 aa, Artificial Sequence; identical to SEQ ID NO: 4362
  Synthetic polypeptide

SEQ ID NO: 4364 - protein, 66 aa, Artificial Sequence; identical to SEQ ID NO: 4362
  Synthetic polypeptide

SEQ ID NO: 4365 - protein, 66 aa, Artificial Sequence; identical to SEQ ID NO: 4362
  Synthetic polypeptide

SEQ ID NO: 4366 - protein, 66 aa, Artificial Sequence; identical to SEQ ID NO: 4362
  Synthetic polypeptide

SEQ ID NO: 4367 - protein, 66 aa, Artificial Sequence
  Synthetic polypeptide
AMLSWELITAAHELGVAHPPGYPLFTLVAKLAITLFPFGSIAYRVNLLCGLFGAVAASLLFFTVFR

SEQ ID NO: 4368 - protein, 66 aa, Artificial Sequence
  Synthetic polypeptide
SQLLRRLRKENRLNPGGRGCGPLCSPITLGLLVAGVLVLLVSLGVAIHLCCRRRRARLRFMKQFYK

SEQ ID NO: 4369 - protein, 66 aa, Artificial Sequence
  Synthetic polypeptide
EVRRPSARQPPRLRSSLKTWPARGFVPAWSVCPSTSSSAPVLTVAGGSTPCSSARSSNFCTKYSAL

SEQ ID NO: 4370 - protein, 66 aa, Artificial Sequence; identical to SEQ ID NO: 4369
  Synthetic polypeptide

SEQ ID NO: 4371 - protein, 66 aa, Artificial Sequence; identical to SEQ ID NO: 4369
  Synthetic polypeptide

SEQ ID NO: 4372 - protein, 66 aa, Artificial Sequence
  Synthetic polypeptide
GQAWWLMPVIPALWEAEADGSLEVRNLKPAWPTGSSCQNQANSARKSKFGFRSTGTSQISWPFPHS

SEQ ID NO: 4373 - protein, 66 aa, Artificial Sequence; identical to SEQ ID NO: 4372
  Synthetic polypeptide

SEQ ID NO: 4374 - protein, 66 aa, Artificial Sequence; identical to SEQ ID NO: 4372
  Synthetic polypeptide

SEQ ID NO: 4375 - protein, 66 aa, Artificial Sequence; identical to SEQ ID NO: 4372
  Synthetic polypeptide

SEQ ID NO: 4376 - protein, 66 aa, Artificial Sequence; identical to SEQ ID NO: 4372
  Synthetic polypeptide

SEQ ID NO: 4377 - protein, 65 aa, Artificial Sequence
  Synthetic polypeptide
VTWGKLLNFLIPKVWAEEKASDQQWQWSCGGQKAKWTQRRGQQVSGNGAFGEQGVVRNSRPVYDS

SEQ ID NO: 4378 - protein, 65 aa, Artificial Sequence; identical to SEQ ID NO: 4377
  Synthetic polypeptide

SEQ ID NO: 4379 - protein, 65 aa, Artificial Sequence; identical to SEQ ID NO: 4377
  Synthetic polypeptide

SEQ ID NO: 4380 - protein, 65 aa, Artificial Sequence; identical to SEQ ID NO: 4377
  Synthetic polypeptide

SEQ ID NO: 4381 - protein, 65 aa, Artificial Sequence; identical to SEQ ID NO: 4377
  Synthetic polypeptide

SEQ ID NO: 4382 - protein, 65 aa, Artificial Sequence; identical to SEQ ID NO: 4377
  Synthetic polypeptide

SEQ ID NO: 4383 - protein, 65 aa, Artificial Sequence; identical to SEQ ID NO: 4377
  Synthetic polypeptide

SEQ ID NO: 4384 - protein, 65 aa, Artificial Sequence; identical to SEQ ID NO: 4377
  Synthetic polypeptide

SEQ ID NO: 4385 - protein, 65 aa, Artificial Sequence; identical to SEQ ID NO: 4377
  Synthetic polypeptide

SEQ ID NO: 4386 - protein, 65 aa, Artificial Sequence; identical to SEQ ID NO: 4377
  Synthetic polypeptide

SEQ ID NO: 4387 - protein, 65 aa, Artificial Sequence; identical to SEQ ID NO: 4377
  Synthetic polypeptide

SEQ ID NO: 4388 - protein, 65 aa, Artificial Sequence; identical to SEQ ID NO: 4377
  Synthetic polypeptide

SEQ ID NO: 4389 - protein, 65 aa, Artificial Sequence; identical to SEQ ID NO: 4377
  Synthetic polypeptide

SEQ ID NO: 4390 - protein, 65 aa, Artificial Sequence; identical to SEQ ID NO: 4377
  Synthetic polypeptide

SEQ ID NO: 4391 - protein, 65 aa, Artificial Sequence
  Synthetic polypeptide
GDGDARVAGHGSEEDEAHEGCSRENLGRIQFSVGYNFQESTLTVKIMKAQELPAKDFSGTSDPFV

SEQ ID NO: 4392 - protein, 65 aa, Artificial Sequence
  Synthetic polypeptide
SPWKNWPHILCTQSVYRVSGLWEHHRLWNLCLAKGSAGECWFCGPCSHRLDCDGLHHSCGSPLLC

SEQ ID NO: 4393 - protein, 65 aa, Artificial Sequence; identical to SEQ ID NO: 4392
  Synthetic polypeptide

SEQ ID NO: 4394 - protein, 65 aa, Artificial Sequence; identical to SEQ ID NO: 4392
  Synthetic polypeptide

SEQ ID NO: 4395 - protein, 65 aa, Artificial Sequence
  Synthetic polypeptide
VLARSDCLKVCSTSCFPLSLSCHHGKMFLLPLHPSAMIISFLRPPHPRLLYSLWNSNKKGKKRRQ

SEQ ID NO: 4396 - protein, 65 aa, Artificial Sequence; identical to SEQ ID NO: 4395
  Synthetic polypeptide

SEQ ID NO: 4397 - protein, 65 aa, Artificial Sequence; identical to SEQ ID NO: 4395
  Synthetic polypeptide

SEQ ID NO: 4398 - protein, 65 aa, Artificial Sequence; identical to SEQ ID NO: 4395
  Synthetic polypeptide

SEQ ID NO: 4399 - protein, 65 aa, Artificial Sequence; identical to SEQ ID NO: 4395
  Synthetic polypeptide

SEQ ID NO: 4400 - protein, 65 aa, Artificial Sequence; identical to SEQ ID NO: 4395
  Synthetic polypeptide

SEQ ID NO: 4401 - protein, 65 aa, Artificial Sequence
  Synthetic polypeptide
GLLELRNPRPAWATWEVPSCHTSIPPGLYHACLASLSILVLLLLAMLVRRRQLWPDCVRGRPGLP

SEQ ID NO: 4402 - protein, 65 aa, Artificial Sequence
  Synthetic polypeptide
SWPSQPPLTVGYLQPLVAVQVSFAPNNTGKEVTVECKIDGSANLKSQDDRDKFLGRVMFKITARA

SEQ ID NO: 4403 - protein, 65 aa, Artificial Sequence; identical to SEQ ID NO: 4402
  Synthetic polypeptide

SEQ ID NO: 4404 - protein, 65 aa, Artificial Sequence
  Synthetic polypeptide
GRVQWPTPVIPALWQAECTVFSPRYTPIGMYTHQQVSSLFMFWKENILRGNFHLTQNLARLVMIP

SEQ ID NO: 4405 - protein, 65 aa, Artificial Sequence; identical to SEQ ID NO: 4404
  Synthetic polypeptide

SEQ ID NO: 4406 - protein, 65 aa, Artificial Sequence; identical to SEQ ID NO: 4404
  Synthetic polypeptide

SEQ ID NO: 4407 - protein, 65 aa, Artificial Sequence; identical to SEQ ID NO: 4404
  Synthetic polypeptide

SEQ ID NO: 4408 - protein, 65 aa, Artificial Sequence; identical to SEQ ID NO: 4404
  Synthetic polypeptide

SEQ ID NO: 4409 - protein, 65 aa, Artificial Sequence
  Synthetic polypeptide
PCQASRPVREGGGGVSPPPGQPPRPGGRWGGQPPTRPAAPSGRKLHGVMVNLPHNRVQICHQQVH

SEQ ID NO: 4410 - protein, 65 aa, Artificial Sequence; identical to SEQ ID NO: 4409
  Synthetic polypeptide

SEQ ID NO: 4411 - protein, 65 aa, Artificial Sequence
  Synthetic polypeptide
EWPSLQPARKWRPQSDNHQEMNPANNLRKAGNRYFSSQALRPQGQPLLSTALTLGICWARKMTWP

SEQ ID NO: 4412 - protein, 65 aa, Artificial Sequence; identical to SEQ ID NO: 4411
  Synthetic polypeptide

SEQ ID NO: 4413 - protein, 65 aa, Artificial Sequence; identical to SEQ ID NO: 4411
  Synthetic polypeptide

SEQ ID NO: 4414 - protein, 65 aa, Artificial Sequence
  Synthetic polypeptide
HRETPSLLKIRKISRAWWRAPVVPATPEADAGEWNGSSRCYRDRTITPSTTREMEWPKSTSSSRS

SEQ ID NO: 4415 - protein, 65 aa, Artificial Sequence; identical to SEQ ID NO: 4414
  Synthetic polypeptide

SEQ ID NO: 4416 - protein, 65 aa, Artificial Sequence; identical to SEQ ID NO: 4414
  Synthetic polypeptide

SEQ ID NO: 4417 - protein, 65 aa, Artificial Sequence; identical to SEQ ID NO: 4414
  Synthetic polypeptide

SEQ ID NO: 4418 - protein, 65 aa, Artificial Sequence; identical to SEQ ID NO: 4414
  Synthetic polypeptide

SEQ ID NO: 4419 - protein, 65 aa, Artificial Sequence; identical to SEQ ID NO: 4414
  Synthetic polypeptide

SEQ ID NO: 4420 - protein, 65 aa, Artificial Sequence
  Synthetic polypeptide
GWTWWLILVFLALWEADTALIKSDLRRHNINIGITNVDVKAIPADSPTDQEPKTVMLSKQSESAI

SEQ ID NO: 4421 - protein, 65 aa, Artificial Sequence; identical to SEQ ID NO: 4420
  Synthetic polypeptide

SEQ ID NO: 4422 - protein, 65 aa, Artificial Sequence
  Synthetic polypeptide
PPRASAVNAVFFATYLTLACCSGPRRHFPWNLILLTVFTLSMAYLTGMLSSSTSPPARACSSCFS

SEQ ID NO: 4423 - protein, 65 aa, Artificial Sequence
  Synthetic polypeptide
TVSFMKAALNAASSVWEESPTPPWWPPSSASPGWPYSAAVGMWLSQAPWRFLSNTSPPTPVTMPC

SEQ ID NO: 4424 - protein, 65 aa, Artificial Sequence; identical to SEQ ID NO: 4423
  Synthetic polypeptide

SEQ ID NO: 4425 - protein, 65 aa, Artificial Sequence; identical to SEQ ID NO: 4423
  Synthetic polypeptide

SEQ ID NO: 4426 - protein, 65 aa, Artificial Sequence; identical to SEQ ID NO: 4423
  Synthetic polypeptide

SEQ ID NO: 4427 - protein, 65 aa, Artificial Sequence; identical to SEQ ID NO: 4423
  Synthetic polypeptide

SEQ ID NO: 4428 - protein, 65 aa, Artificial Sequence; identical to SEQ ID NO: 4423
  Synthetic polypeptide

SEQ ID NO: 4429 - protein, 65 aa, Artificial Sequence
  Synthetic polypeptide
GHHYNSTVNAATAQLSLPIIGRPQSIPAMMESHSVAQAGVQWHDLGSLQPPPPRCQAILLPQPPK

SEQ ID NO: 4430 - protein, 65 aa, Artificial Sequence
  Synthetic polypeptide
AQSSEGKLISGETRMPFTGLLPRSASGFCSLNSSTVLLSCSSHGSSEPRCSSTHHSIRCNWERIM

SEQ ID NO: 4431 - protein, 65 aa, Artificial Sequence; identical to SEQ ID NO: 4430
  Synthetic polypeptide

SEQ ID NO: 4432 - protein, 65 aa, Artificial Sequence
  Synthetic polypeptide
EVPCASHHDSEASTAMWNWMITTRMGSASLTGELPVHASLATGPFMWTRFRCRGRLKTESQRPSP

SEQ ID NO: 4433 - protein, 65 aa, Artificial Sequence; identical to SEQ ID NO: 4432
  Synthetic polypeptide

SEQ ID NO: 4434 - protein, 65 aa, Artificial Sequence
  Synthetic polypeptide
SQHFGRPKWVATSTLGGHKPGDHRQASGCGTRVLPRHPHPGNLWAQAPATRCRVLRDAETSPGLR

SEQ ID NO: 4435 - protein, 65 aa, Artificial Sequence
  Synthetic polypeptide
SNFLLSVCLHTRQWFLEEGAIWFISKACLTMEFRSCCPGWSAMAQSRLTTTSASRVQAILLPQSP

SEQ ID NO: 4436 - protein, 65 aa, Artificial Sequence; identical to SEQ ID NO: 4435
  Synthetic polypeptide

SEQ ID NO: 4437 - protein, 65 aa, Artificial Sequence; identical to SEQ ID NO: 4435
  Synthetic polypeptide

SEQ ID NO: 4438 - protein, 65 aa, Artificial Sequence
  Synthetic polypeptide
FNRGGGYPYAVLVTMSEFSRDLMIFCKGLFPLLLGTSCCHHVKKDVFASTSTMIESGLSVWIGGQ

SEQ ID NO: 4439 - protein, 65 aa, Artificial Sequence
  Synthetic polypeptide
GLPSHAELNRGCLYGLVGSCTPWRMCPPPWLCCSSLWSSPSSLSLPATRRPSSSSCRSWQSWPSA

SEQ ID NO: 4440 - protein, 65 aa, Artificial Sequence; identical to SEQ ID NO: 4439
  Synthetic polypeptide

SEQ ID NO: 4441 - protein, 65 aa, Artificial Sequence; identical to SEQ ID NO: 4439
  Synthetic polypeptide

SEQ ID NO: 4442 - protein, 65 aa, Artificial Sequence; identical to SEQ ID NO: 4439
  Synthetic polypeptide

SEQ ID NO: 4443 - protein, 65 aa, Artificial Sequence; identical to SEQ ID NO: 4439
  Synthetic polypeptide

SEQ ID NO: 4444 - protein, 65 aa, Artificial Sequence; identical to SEQ ID NO: 4439
  Synthetic polypeptide

SEQ ID NO: 4445 - protein, 65 aa, Artificial Sequence; identical to SEQ ID NO: 4439
  Synthetic polypeptide

SEQ ID NO: 4446 - protein, 64 aa, Artificial Sequence
  Synthetic polypeptide
VTHACNPSTLGGQAKRRTVHSHPARGHAAGHRLGHAVPCRDELRPPRPGCSQHPSQQQPRLQSV

SEQ ID NO: 4447 - protein, 64 aa, Artificial Sequence; identical to SEQ ID NO: 4446
  Synthetic polypeptide

SEQ ID NO: 4448 - protein, 64 aa, Artificial Sequence
  Synthetic polypeptide
LSISHPTYFSSNHLSLPDPARQIVFADWHSLQVGGLICAGVLCAMGIIIVMSAKCKCKFGQKSG

SEQ ID NO: 4449 - protein, 64 aa, Artificial Sequence
  Synthetic polypeptide
SQLLGRLRQENCSNPGGGGAVGKIRSQSWMTSATLSPTMSNCPCWAGALGPRRAHAECHQVWQH

SEQ ID NO: 4450 - protein, 64 aa, Artificial Sequence
  Synthetic polypeptide
ATYKADHLLPGNHGPGLPGAHACAPWQEPPALPFPGVLVALLADFGPGCDPAEHGSPLGLPGDS

SEQ ID NO: 4451 - protein, 64 aa, Artificial Sequence; identical to SEQ ID NO: 4450
  Synthetic polypeptide

SEQ ID NO: 4452 - protein, 64 aa, Artificial Sequence; identical to SEQ ID NO: 4450
  Synthetic polypeptide

SEQ ID NO: 4453 - protein, 64 aa, Artificial Sequence; identical to SEQ ID NO: 4450
  Synthetic polypeptide

SEQ ID NO: 4454 - protein, 64 aa, Artificial Sequence; identical to SEQ ID NO: 4450
  Synthetic polypeptide

SEQ ID NO: 4455 - protein, 64 aa, Artificial Sequence; identical to SEQ ID NO: 4450
  Synthetic polypeptide

SEQ ID NO: 4456 - protein, 64 aa, Artificial Sequence; identical to SEQ ID NO: 4450
  Synthetic polypeptide

SEQ ID NO: 4457 - protein, 64 aa, Artificial Sequence; identical to SEQ ID NO: 4450
  Synthetic polypeptide

SEQ ID NO: 4458 - protein, 64 aa, Artificial Sequence
  Synthetic polypeptide
ILYKTMNFQWLIIIWKKLFNLPVSRNTNEDNVFSPIRFAKQPTNAQKDSFSEQSCVLQRETRQS

SEQ ID NO: 4459 - protein, 64 aa, Artificial Sequence; identical to SEQ ID NO: 4458
  Synthetic polypeptide

SEQ ID NO: 4460 - protein, 64 aa, Artificial Sequence; identical to SEQ ID NO: 4458
  Synthetic polypeptide

SEQ ID NO: 4461 - protein, 64 aa, Artificial Sequence; identical to SEQ ID NO: 4458
  Synthetic polypeptide

SEQ ID NO: 4462 - protein, 64 aa, Artificial Sequence; identical to SEQ ID NO: 4458
  Synthetic polypeptide

SEQ ID NO: 4463 - protein, 64 aa, Artificial Sequence
  Synthetic polypeptide
LSYIKHGQMLKARGRLCSSAQLQQDPRRELRISRKCLHLQRVSQPKHAVLWGAGVMASPLSQEV

SEQ ID NO: 4464 - protein, 64 aa, Artificial Sequence; identical to SEQ ID NO: 4463
  Synthetic polypeptide

SEQ ID NO: 4465 - protein, 64 aa, Artificial Sequence
  Synthetic polypeptide
SGKSVALEICIFSNSSSGPCLFAFLSLIFFFCEMAMLVPARQGDVRVGDGVWKAHEAQNLLQLA

SEQ ID NO: 4466 - protein, 64 aa, Artificial Sequence; identical to SEQ ID NO: 4465
  Synthetic polypeptide

SEQ ID NO: 4467 - protein, 64 aa, Artificial Sequence; identical to SEQ ID NO: 4465
  Synthetic polypeptide

SEQ ID NO: 4468 - protein, 64 aa, Artificial Sequence; identical to SEQ ID NO: 4465
  Synthetic polypeptide

SEQ ID NO: 4469 - protein, 64 aa, Artificial Sequence; identical to SEQ ID NO: 4465
  Synthetic polypeptide

SEQ ID NO: 4470 - protein, 64 aa, Artificial Sequence; identical to SEQ ID NO: 4465
  Synthetic polypeptide

SEQ ID NO: 4471 - protein, 64 aa, Artificial Sequence; identical to SEQ ID NO: 4465
  Synthetic polypeptide

SEQ ID NO: 4472 - protein, 64 aa, Artificial Sequence; identical to SEQ ID NO: 4465
  Synthetic polypeptide

SEQ ID NO: 4473 - protein, 64 aa, Artificial Sequence
  Synthetic polypeptide
PCLLCSIYSRGKTAGHRYNTPAPAAFSWFIFFCAFHIYFFSAFYDCCGSSHHWTDCPKIHQGLA

SEQ ID NO: 4474 - protein, 64 aa, Artificial Sequence; identical to SEQ ID NO: 4473
  Synthetic polypeptide

SEQ ID NO: 4475 - protein, 64 aa, Artificial Sequence; identical to SEQ ID NO: 4473
  Synthetic polypeptide

SEQ ID NO: 4476 - protein, 64 aa, Artificial Sequence; identical to SEQ ID NO: 4473
  Synthetic polypeptide

SEQ ID NO: 4477 - protein, 64 aa, Artificial Sequence
  Synthetic polypeptide
SQLHFQEVARCLAHRKPLLLCCPVPHGVPHEDHREPGCDGTCLHLASLAHRLPATPVWLVIRGV

SEQ ID NO: 4478 - protein, 64 aa, Artificial Sequence; identical to SEQ ID NO: 4477
  Synthetic polypeptide

SEQ ID NO: 4479 - protein, 64 aa, Artificial Sequence; identical to SEQ ID NO: 4477
  Synthetic polypeptide

SEQ ID NO: 4480 - protein, 64 aa, Artificial Sequence; identical to SEQ ID NO: 4477
  Synthetic polypeptide

SEQ ID NO: 4481 - protein, 64 aa, Artificial Sequence; identical to SEQ ID NO: 4477
  Synthetic polypeptide

SEQ ID NO: 4482 - protein, 64 aa, Artificial Sequence; identical to SEQ ID NO: 4477
  Synthetic polypeptide

SEQ ID NO: 4483 - protein, 64 aa, Artificial Sequence; identical to SEQ ID NO: 4477
  Synthetic polypeptide

SEQ ID NO: 4484 - protein, 64 aa, Artificial Sequence
  Synthetic polypeptide
GLLELRNPRPAWATWEVPSCHTSIPPGLYHACLASLSVSPTQVEPGLQAAASLGSGTCVPHWGW

SEQ ID NO: 4485 - protein, 64 aa, Artificial Sequence
  Synthetic polypeptide
GGTQWLTPVIPALWEAEERFVTLDRGSLCLSCFTSAWRCFFQRWSGPLWGLPGWQMVFSATGQL

SEQ ID NO: 4486 - protein, 64 aa, Artificial Sequence; identical to SEQ ID NO: 4485
  Synthetic polypeptide

SEQ ID NO: 4487 - protein, 64 aa, Artificial Sequence; identical to SEQ ID NO: 4485
  Synthetic polypeptide

SEQ ID NO: 4488 - protein, 64 aa, Artificial Sequence; identical to SEQ ID NO: 4485
  Synthetic polypeptide

SEQ ID NO: 4489 - protein, 64 aa, Artificial Sequence
  Synthetic polypeptide
TWETEVVDIQEVQGYVLIAHNQVRQVPLQRLRIVRGTQLFEDNYALAVLDNGDPLNNTTPVTGA

SEQ ID NO: 4490 - protein, 64 aa, Artificial Sequence
  Synthetic polypeptide
RAAICTGIGIGFYGNSETSDGVSQLSSALLHANHTLSTIDHLVLETVERLGEAVRTELTTLEEV

SEQ ID NO: 4491 - protein, 64 aa, Artificial Sequence
  Synthetic polypeptide
GASPPGSHPIWEISLHIHQCLKKLLMQIFNSRTPVRWKKSQKLANLGKKHLQLPLMYGVQQPCF

SEQ ID NO: 4492 - protein, 64 aa, Artificial Sequence
  Synthetic polypeptide
LRGNKIYQQPMSLEEDPEPQMRTAAPANTDFSLRHRALACWIPNSATCWMESSSSMVSFSLPCS

SEQ ID NO: 4493 - protein, 64 aa, Artificial Sequence
  Synthetic polypeptide
ELQPQPTLISALGTELWPAGSQTLLPAGWNPLHLWCHSHCLVPESEVQQERRRPRVPAGPEPAL

SEQ ID NO: 4494 - protein, 64 aa, Artificial Sequence; identical to SEQ ID NO: 4492
  Synthetic polypeptide

SEQ ID NO: 4495 - protein, 64 aa, Artificial Sequence; identical to SEQ ID NO: 4493
  Synthetic polypeptide

SEQ ID NO: 4496 - protein, 64 aa, Artificial Sequence
  Synthetic polypeptide
GEGERGQALGLIRFLLCQWQSVSLCRGLQHSGPRWWKKGITIPVLQDYYLPKIFYILMHLLPKA

SEQ ID NO: 4497 - protein, 64 aa, Artificial Sequence; identical to SEQ ID NO: 4496
  Synthetic polypeptide

SEQ ID NO: 4498 - protein, 64 aa, Artificial Sequence; identical to SEQ ID NO: 4496
  Synthetic polypeptide

SEQ ID NO: 4499 - protein, 64 aa, Artificial Sequence; identical to SEQ ID NO: 4496
  Synthetic polypeptide

SEQ ID NO: 4500 - protein, 64 aa, Artificial Sequence; identical to SEQ ID NO: 4496
  Synthetic polypeptide

SEQ ID NO: 4501 - protein, 64 aa, Artificial Sequence; identical to SEQ ID NO: 4496
  Synthetic polypeptide

SEQ ID NO: 4502 - protein, 64 aa, Artificial Sequence; identical to SEQ ID NO: 4496
  Synthetic polypeptide

SEQ ID NO: 4503 - protein, 64 aa, Artificial Sequence
  Synthetic polypeptide
MGAVAHACNASTLRGRGGKITSQSWMTSATLSPTMSNCPCWAGALGPRRASAAAEPCTQAFPSW

SEQ ID NO: 4504 - protein, 64 aa, Artificial Sequence; identical to SEQ ID NO: 4503
  Synthetic polypeptide

SEQ ID NO: 4505 - protein, 64 aa, Artificial Sequence; identical to SEQ ID NO: 4503
  Synthetic polypeptide

SEQ ID NO: 4506 - protein, 64 aa, Artificial Sequence; identical to SEQ ID NO: 4503
  Synthetic polypeptide

SEQ ID NO: 4507 - protein, 64 aa, Artificial Sequence; identical to SEQ ID NO: 4503
  Synthetic polypeptide

SEQ ID NO: 4508 - protein, 64 aa, Artificial Sequence; identical to SEQ ID NO: 4503
  Synthetic polypeptide

SEQ ID NO: 4509 - protein, 64 aa, Artificial Sequence; identical to SEQ ID NO: 4503
  Synthetic polypeptide

SEQ ID NO: 4510 - protein, 64 aa, Artificial Sequence
  Synthetic polypeptide
KVSQIPLGLSIGVCVRVGMALGAADTVQAKRSAVSGVLSIVGISLVLGTLISILKNQLGHIFTN

SEQ ID NO: 4511 - protein, 64 aa, Artificial Sequence
  Synthetic polypeptide
EGDGQWEFFLPGWRTRRRERHCRMLEAEACATEAPLAGVGGDVGHYSSARVVEMLWGRKPPDSH

SEQ ID NO: 4512 - protein, 64 aa, Artificial Sequence; identical to SEQ ID NO: 4511
  Synthetic polypeptide

SEQ ID NO: 4513 - protein, 64 aa, Artificial Sequence; identical to SEQ ID NO: 4511
  Synthetic polypeptide

SEQ ID NO: 4514 - protein, 64 aa, Artificial Sequence; identical to SEQ ID NO: 4511
  Synthetic polypeptide

SEQ ID NO: 4515 - protein, 63 aa, Artificial Sequence
  Synthetic polypeptide
SQHFGRPRQADHERKDLLPVTCAQLAQTKIISTHTRPAMPTERHNSCTNGPSRKSVARTLRGQ

SEQ ID NO: 4516 - protein, 63 aa, Artificial Sequence; identical to SEQ ID NO: 4515
  Synthetic polypeptide

SEQ ID NO: 4517 - protein, 63 aa, Artificial Sequence
  Synthetic polypeptide
DRARWLTPVIAALWEAEAGGLLEEVFWGEDRPVLRLAGRVHPDAHPCLHRGNHCLPVRMRHHG

SEQ ID NO: 4518 - protein, 63 aa, Artificial Sequence; identical to SEQ ID NO: 4517
  Synthetic polypeptide

SEQ ID NO: 4519 - protein, 63 aa, Artificial Sequence; identical to SEQ ID NO: 4517
  Synthetic polypeptide

SEQ ID NO: 4520 - protein, 63 aa, Artificial Sequence; identical to SEQ ID NO: 4517
  Synthetic polypeptide

SEQ ID NO: 4521 - protein, 63 aa, Artificial Sequence; identical to SEQ ID NO: 4517
  Synthetic polypeptide

SEQ ID NO: 4522 - protein, 63 aa, Artificial Sequence; identical to SEQ ID NO: 4517
  Synthetic polypeptide

SEQ ID NO: 4523 - protein, 63 aa, Artificial Sequence; identical to SEQ ID NO: 4517
  Synthetic polypeptide

SEQ ID NO: 4524 - protein, 63 aa, Artificial Sequence
  Synthetic polypeptide
SWVTPVGLEILRHQPLAHRPALHVAVLRANGHRAHVQFANSNLRGLQTYPPAEPAGAAEEPQE

SEQ ID NO: 4525 - protein, 63 aa, Artificial Sequence; identical to SEQ ID NO: 4524
  Synthetic polypeptide

SEQ ID NO: 4526 - protein, 63 aa, Artificial Sequence; identical to SEQ ID NO: 4524
  Synthetic polypeptide

SEQ ID NO: 4527 - protein, 63 aa, Artificial Sequence; identical to SEQ ID NO: 4524
  Synthetic polypeptide

SEQ ID NO: 4528 - protein, 63 aa, Artificial Sequence
  Synthetic polypeptide
LEMEIILGYPSRPGDSTPPTSRAQTCTPRGSTTSERSPCPCTGTAAGHLPPSNCFIFYFPFVL

SEQ ID NO: 4529 - protein, 63 aa, Artificial Sequence
  Synthetic polypeptide
KCRISPYPTTELHLHNQCPSSESCCSAPRRATTQRERCGRCQLCSSFWEARRSGSWQKEGKAF

SEQ ID NO: 4530 - protein, 63 aa, Artificial Sequence
  Synthetic polypeptide
NDDIKIKSLDEQCVVGKISKHWTGILREAFTDADNFGIQFPLDLDVKMKAVMIGACFLIDFMF

SEQ ID NO: 4531 - protein, 63 aa, Artificial Sequence
  Synthetic polypeptide
DCRVRSPGFLSFSHGSGLLCCPVPHGVPHEDHREPGCDGTCLHLASLAHRLPATPVWLVIRGV

SEQ ID NO: 4532 - protein, 63 aa, Artificial Sequence; identical to SEQ ID NO: 4531
  Synthetic polypeptide

SEQ ID NO: 4533 - protein, 63 aa, Artificial Sequence; identical to SEQ ID NO: 4531
  Synthetic polypeptide

SEQ ID NO: 4534 - protein, 63 aa, Artificial Sequence; identical to SEQ ID NO: 4531
  Synthetic polypeptide

SEQ ID NO: 4535 - protein, 63 aa, Artificial Sequence; identical to SEQ ID NO: 4531
  Synthetic polypeptide

SEQ ID NO: 4536 - protein, 63 aa, Artificial Sequence; identical to SEQ ID NO: 4531
  Synthetic polypeptide

SEQ ID NO: 4537 - protein, 63 aa, Artificial Sequence; identical to SEQ ID NO: 4531
  Synthetic polypeptide

SEQ ID NO: 4538 - protein, 63 aa, Artificial Sequence
  Synthetic polypeptide
MIDWIKKMWHIYTMDYYAAIKKDEYMSFAGTWMKVETIILSKLSQGQKTKHRMFSLIATEQHA

SEQ ID NO: 4539 - protein, 63 aa, Artificial Sequence; identical to SEQ ID NO: 4538
  Synthetic polypeptide

SEQ ID NO: 4540 - protein, 63 aa, Artificial Sequence; identical to SEQ ID NO: 4538
  Synthetic polypeptide

SEQ ID NO: 4541 - protein, 63 aa, Artificial Sequence; identical to SEQ ID NO: 4538
  Synthetic polypeptide

SEQ ID NO: 4542 - protein, 63 aa, Artificial Sequence; identical to SEQ ID NO: 4538
  Synthetic polypeptide

SEQ ID NO: 4543 - protein, 63 aa, Artificial Sequence
  Synthetic polypeptide
GASPPGSHPVREGGGGQPPPGQPPRPGGRWGGISPLPGQPPRPGGRWGGQPPARLAAPSGRNQ

SEQ ID NO: 4544 - protein, 63 aa, Artificial Sequence
  Synthetic polypeptide
SQHFGGQGGWMDSLSPGVQDQPGQHGEPPSLQKFSQGTEDVFANVPGLWSNRETSPAFRRDTS

SEQ ID NO: 4545 - protein, 63 aa, Artificial Sequence; identical to SEQ ID NO: 4544
  Synthetic polypeptide

SEQ ID NO: 4546 - protein, 63 aa, Artificial Sequence; identical to SEQ ID NO: 4544
  Synthetic polypeptide

SEQ ID NO: 4547 - protein, 63 aa, Artificial Sequence; identical to SEQ ID NO: 4544
  Synthetic polypeptide

SEQ ID NO: 4548 - protein, 63 aa, Artificial Sequence; identical to SEQ ID NO: 4544
  Synthetic polypeptide

SEQ ID NO: 4549 - protein, 63 aa, Artificial Sequence; identical to SEQ ID NO: 4544
  Synthetic polypeptide

SEQ ID NO: 4550 - protein, 63 aa, Artificial Sequence
  Synthetic polypeptide
GQVQWLMPIISALWEAKPAPAPPTSSPVPVAAASPSPGRVIWMTTVGTALMSLLRVPIPPASP

SEQ ID NO: 4551 - protein, 63 aa, Artificial Sequence
  Synthetic polypeptide
ATYKDHLLPGNHGPGLPGAHACAPWQEPPALPFPGVLVALLADFGPGCDPAEHGSPLGLPGDS

SEQ ID NO: 4552 - protein, 63 aa, Artificial Sequence; identical to SEQ ID NO: 4551
  Synthetic polypeptide

SEQ ID NO: 4553 - protein, 63 aa, Artificial Sequence; identical to SEQ ID NO: 4551
  Synthetic polypeptide

SEQ ID NO: 4554 - protein, 63 aa, Artificial Sequence; identical to SEQ ID NO: 4551
  Synthetic polypeptide

SEQ ID NO: 4555 - protein, 63 aa, Artificial Sequence; identical to SEQ ID NO: 4551
  Synthetic polypeptide

SEQ ID NO: 4556 - protein, 63 aa, Artificial Sequence; identical to SEQ ID NO: 4551
  Synthetic polypeptide

SEQ ID NO: 4557 - protein, 63 aa, Artificial Sequence; identical to SEQ ID NO: 4551
  Synthetic polypeptide

SEQ ID NO: 4558 - protein, 63 aa, Artificial Sequence; identical to SEQ ID NO: 4551
  Synthetic polypeptide

SEQ ID NO: 4559 - protein, 63 aa, Artificial Sequence
  Synthetic polypeptide
RVCVAALNAASSVWEESPTPPWWPPSSASPGWPYSAAVGMWLSQAPWRFLSNTSPPTPVTMPC

SEQ ID NO: 4560 - protein, 63 aa, Artificial Sequence; identical to SEQ ID NO: 4559
  Synthetic polypeptide

SEQ ID NO: 4561 - protein, 63 aa, Artificial Sequence; identical to SEQ ID NO: 4559
  Synthetic polypeptide

SEQ ID NO: 4562 - protein, 63 aa, Artificial Sequence; identical to SEQ ID NO: 4559
  Synthetic polypeptide

SEQ ID NO: 4563 - protein, 63 aa, Artificial Sequence; identical to SEQ ID NO: 4559
  Synthetic polypeptide

SEQ ID NO: 4564 - protein, 63 aa, Artificial Sequence; identical to SEQ ID NO: 4559
  Synthetic polypeptide

SEQ ID NO: 4565 - protein, 63 aa, Artificial Sequence
  Synthetic polypeptide
LATAQDLNITCRFAGVFHVEKNGRYSISRTEAADLCKAFNSTLPTMAQMEKALSIGFETCSST

SEQ ID NO: 4566 - protein, 63 aa, Artificial Sequence
  Synthetic polypeptide
GWREWRGRNAGACRGLNRRGNRFSLEPPGGHGSDSSFILAQGDPFWTCDLRDGDPGGSGVPSG

SEQ ID NO: 4567 - protein, 63 aa, Artificial Sequence; identical to SEQ ID NO: 4566
  Synthetic polypeptide

SEQ ID NO: 4568 - protein, 63 aa, Artificial Sequence; identical to SEQ ID NO: 4566
  Synthetic polypeptide

SEQ ID NO: 4569 - protein, 63 aa, Artificial Sequence; identical to SEQ ID NO: 4566
  Synthetic polypeptide

SEQ ID NO: 4570 - protein, 63 aa, Artificial Sequence; identical to SEQ ID NO: 4566
  Synthetic polypeptide

SEQ ID NO: 4571 - protein, 63 aa, Artificial Sequence; identical to SEQ ID NO: 4566
  Synthetic polypeptide

SEQ ID NO: 4572 - protein, 63 aa, Artificial Sequence
  Synthetic polypeptide
NRNDMTCPLHLRKYLGDQVREHHRLWNLCLAKGSAGECWFCGPCSHRLDCDGLHHSCGSPLLC

SEQ ID NO: 4573 - protein, 63 aa, Artificial Sequence; identical to SEQ ID NO: 4572
  Synthetic polypeptide

SEQ ID NO: 4574 - protein, 63 aa, Artificial Sequence; identical to SEQ ID NO: 4572
  Synthetic polypeptide

SEQ ID NO: 4575 - protein, 62 aa, Artificial Sequence
  Synthetic polypeptide
SYHWTQHFHSQDRRIHPACVPPSCRPGPGGWQDLYRDGLGQHAVLWPTGRGTPGGSSPHNQQ

SEQ ID NO: 4576 - protein, 62 aa, Artificial Sequence; identical to SEQ ID NO: 4575
  Synthetic polypeptide

SEQ ID NO: 4577 - protein, 62 aa, Artificial Sequence; identical to SEQ ID NO: 4575
  Synthetic polypeptide

SEQ ID NO: 4578 - protein, 62 aa, Artificial Sequence
  Synthetic polypeptide
WAQWLIPVIPALLEAKAAAPAMTTVSPPETMSSSPLSAGMTRKFVESLSERTPPTPRSTPSC

SEQ ID NO: 4579 - protein, 62 aa, Artificial Sequence
  Synthetic polypeptide
SQHFGRLRPSEQPVPQDKGHSCAPGHHRGHRAGSPPRGGHHPGWNLHQWPPHIQCCALLHRA

SEQ ID NO: 4580 - protein, 62 aa, Artificial Sequence; identical to SEQ ID NO: 4579
  Synthetic polypeptide

SEQ ID NO: 4581 - protein, 62 aa, Artificial Sequence
  Synthetic polypeptide
AEIQMKTTYFHLSDLQSNQQMHRKTASLNSPVSCKEKPDRVEEPPDYSAIPLSQCGSLSQVR

SEQ ID NO: 4582 - protein, 62 aa, Artificial Sequence
  Synthetic polypeptide
PGMVAHAYNPSYLGRLRQENHLNLGDGGCGYPGGAGLRAHRSQPSEAGPTAEAADCARHPAL

SEQ ID NO: 4583 - protein, 62 aa, Artificial Sequence; identical to SEQ ID NO: 4582
  Synthetic polypeptide

SEQ ID NO: 4584 - protein, 62 aa, Artificial Sequence; identical to SEQ ID NO: 4582
  Synthetic polypeptide

SEQ ID NO: 4585 - protein, 62 aa, Artificial Sequence; identical to SEQ ID NO: 4582
  Synthetic polypeptide

SEQ ID NO: 4586 - protein, 62 aa, Artificial Sequence; identical to SEQ ID NO: 4582
  Synthetic polypeptide

SEQ ID NO: 4587 - protein, 62 aa, Artificial Sequence; identical to SEQ ID NO: 4582
  Synthetic polypeptide

SEQ ID NO: 4588 - protein, 62 aa, Artificial Sequence; identical to SEQ ID NO: 4582
  Synthetic polypeptide

SEQ ID NO: 4589 - protein, 62 aa, Artificial Sequence; identical to SEQ ID NO: 4582
  Synthetic polypeptide

SEQ ID NO: 4590 - protein, 62 aa, Artificial Sequence; identical to SEQ ID NO: 4582
  Synthetic polypeptide

SEQ ID NO: 4591 - protein, 62 aa, Artificial Sequence; identical to SEQ ID NO: 4582
  Synthetic polypeptide

SEQ ID NO: 4592 - protein, 62 aa, Artificial Sequence
  Synthetic polypeptide
GRARWLTPVIPALWEADAGGSRGQEIKTILANMTLLSNSSETGTASGLVFILRPEQSTCTWY

SEQ ID NO: 4593 - protein, 62 aa, Artificial Sequence
  Synthetic polypeptide
ALDRDLNITCRFAGVFHVEKNGRYSISRTEAADLCKAFNSTLPTMAQMEKALSIGFETCSST

SEQ ID NO: 4594 - protein, 62 aa, Artificial Sequence
  Synthetic polypeptide
SQHLGRPRQADHLRCTRSCRLHVWSRLRRPSPWSAGAGVPGAAAAPTPTTRLCPSAACLVNL

SEQ ID NO: 4595 - protein, 62 aa, Artificial Sequence; identical to SEQ ID NO: 4594
  Synthetic polypeptide

SEQ ID NO: 4596 - protein, 62 aa, Artificial Sequence; identical to SEQ ID NO: 4594
  Synthetic polypeptide

SEQ ID NO: 4597 - protein, 62 aa, Artificial Sequence; identical to SEQ ID NO: 4594
  Synthetic polypeptide

SEQ ID NO: 4598 - protein, 62 aa, Artificial Sequence; identical to SEQ ID NO: 4594
  Synthetic polypeptide

SEQ ID NO: 4599 - protein, 62 aa, Artificial Sequence; identical to SEQ ID NO: 4594
  Synthetic polypeptide

SEQ ID NO: 4600 - protein, 62 aa, Artificial Sequence
  Synthetic polypeptide
YSCAACVLLNNIHLRERDVLRRGERDRAVQAVHRVRGAPEHVGAVRGGRRRRVPLRLRLLPG

SEQ ID NO: 4601 - protein, 62 aa, Artificial Sequence
  Synthetic polypeptide
AMLSWELITAAHELGVAHPPGYPLFTLVAKLAITLFPFGSIAYRVNLLCGLFGAVAASLLFF

SEQ ID NO: 4602 - protein, 62 aa, Artificial Sequence
  Synthetic polypeptide
KYKKISQAWWCMPVIPAIREAESEYHYEYTACDSTGSRWRVAVPHTPGLCTSLPDPIKGTEC

SEQ ID NO: 4603 - protein, 62 aa, Artificial Sequence
  Synthetic polypeptide
CAGYFLFLPPGIVPSRLTSTDYTDLAPLSSGFLVDPASGRPQLDIRAGRTESWKGSSSCRVK

SEQ ID NO: 4604 - protein, 62 aa, Artificial Sequence
  Synthetic polypeptide
GHHSEGYGIIQLPGHHSEGNGIIQLPGHHSEVASPPTMRCSRRSTRWLCWGRPTTLLPRRPP

SEQ ID NO: 4605 - protein, 62 aa, Artificial Sequence
  Synthetic polypeptide
GQAWWLTPVIPALWEANAGRSLEESTSGWSQRMHLRISRNLTSASSHWLSFRAPLPMEAGTF

SEQ ID NO: 4606 - protein, 62 aa, Artificial Sequence; identical to SEQ ID NO: 4605
  Synthetic polypeptide

SEQ ID NO: 4607 - protein, 62 aa, Artificial Sequence; identical to SEQ ID NO: 4605
  Synthetic polypeptide

SEQ ID NO: 4608 - protein, 62 aa, Artificial Sequence; identical to SEQ ID NO: 4605
  Synthetic polypeptide

SEQ ID NO: 4609 - protein, 62 aa, Artificial Sequence; identical to SEQ ID NO: 4605
  Synthetic polypeptide

SEQ ID NO: 4610 - protein, 62 aa, Artificial Sequence
  Synthetic polypeptide
TCTVRTSTDLPQTENCFQYIHQVTESHGGLAWLSDRGGVPLPAGLLPHRHQLPAQQAHGPQE

SEQ ID NO: 4611 - protein, 62 aa, Artificial Sequence
  Synthetic polypeptide
AAAAAGAERGMGARAAGPGGGGRTGARLRAQTLLLRPPAARALVVARLPHGAPRRPPDALPL

SEQ ID NO: 4612 - protein, 62 aa, Artificial Sequence; identical to SEQ ID NO: 4611
  Synthetic polypeptide

SEQ ID NO: 4613 - protein, 62 aa, Artificial Sequence; identical to SEQ ID NO: 4611
  Synthetic polypeptide

SEQ ID NO: 4614 - protein, 62 aa, Artificial Sequence
  Synthetic polypeptide
SAGRKSEAHGREPHSAKAILDQLFPVTSLIGHSTRFEYNLPLCRCIPRGEKWSLQHLSDGGR

SEQ ID NO: 4615 - protein, 62 aa, Artificial Sequence; identical to SEQ ID NO: 4614
  Synthetic polypeptide

SEQ ID NO: 4616 - protein, 62 aa, Artificial Sequence; identical to SEQ ID NO: 4614
  Synthetic polypeptide

SEQ ID NO: 4617 - protein, 62 aa, Artificial Sequence; identical to SEQ ID NO: 4614
  Synthetic polypeptide

SEQ ID NO: 4618 - protein, 62 aa, Artificial Sequence; identical to SEQ ID NO: 4614
  Synthetic polypeptide

SEQ ID NO: 4619 - protein, 62 aa, Artificial Sequence; identical to SEQ ID NO: 4614
  Synthetic polypeptide

SEQ ID NO: 4620 - protein, 62 aa, Artificial Sequence; identical to SEQ ID NO: 4614
  Synthetic polypeptide

SEQ ID NO: 4621 - protein, 62 aa, Artificial Sequence; identical to SEQ ID NO: 4614
  Synthetic polypeptide

SEQ ID NO: 4622 - protein, 62 aa, Artificial Sequence; identical to SEQ ID NO: 4614
  Synthetic polypeptide

SEQ ID NO: 4623 - protein, 62 aa, Artificial Sequence; identical to SEQ ID NO: 4614
  Synthetic polypeptide

SEQ ID NO: 4624 - protein, 62 aa, Artificial Sequence; identical to SEQ ID NO: 4614
  Synthetic polypeptide

SEQ ID NO: 4625 - protein, 62 aa, Artificial Sequence; identical to SEQ ID NO: 4614
  Synthetic polypeptide

SEQ ID NO: 4626 - protein, 62 aa, Artificial Sequence; identical to SEQ ID NO: 4614
  Synthetic polypeptide

SEQ ID NO: 4627 - protein, 62 aa, Artificial Sequence; identical to SEQ ID NO: 4614
  Synthetic polypeptide

SEQ ID NO: 4628 - protein, 62 aa, Artificial Sequence; identical to SEQ ID NO: 4614
  Synthetic polypeptide

SEQ ID NO: 4629 - protein, 62 aa, Artificial Sequence; identical to SEQ ID NO: 4614
  Synthetic polypeptide

SEQ ID NO: 4630 - protein, 62 aa, Artificial Sequence; identical to SEQ ID NO: 4614
  Synthetic polypeptide

SEQ ID NO: 4631 - protein, 62 aa, Artificial Sequence
  Synthetic polypeptide
IWSQKDLTLDPSSGPKLHTCVIRFRDVLHQAHPPAWCHHRHRQFLHLPDQQEEGHPCQLLTQ

SEQ ID NO: 4632 - protein, 62 aa, Artificial Sequence; identical to SEQ ID NO: 4631
  Synthetic polypeptide

SEQ ID NO: 4633 - protein, 62 aa, Artificial Sequence
  Synthetic polypeptide
QKKGLDIQEVQGYVLIAHNQVRQVPLQRLRIVRGTQLFEDNYALAVLDNGDPLNNTTPVTGA

SEQ ID NO: 4634 - protein, 61 aa, Artificial Sequence
  Synthetic polypeptide
VSATMPSPPSDFPSPTPLIFLQTTYLCLTLHDRSCLLTGTASRLAGSSALGFCAPWASSSS

SEQ ID NO: 4635 - protein, 61 aa, Artificial Sequence; identical to SEQ ID NO: 4634
  Synthetic polypeptide

SEQ ID NO: 4636 - protein, 61 aa, Artificial Sequence; identical to SEQ ID NO: 4634
  Synthetic polypeptide

SEQ ID NO: 4637 - protein, 61 aa, Artificial Sequence; identical to SEQ ID NO: 4634
  Synthetic polypeptide

SEQ ID NO: 4638 - protein, 61 aa, Artificial Sequence; identical to SEQ ID NO: 4634
  Synthetic polypeptide

SEQ ID NO: 4639 - protein, 61 aa, Artificial Sequence; identical to SEQ ID NO: 4634
  Synthetic polypeptide

SEQ ID NO: 4640 - protein, 61 aa, Artificial Sequence; identical to SEQ ID NO: 4634
  Synthetic polypeptide

SEQ ID NO: 4641 - protein, 61 aa, Artificial Sequence; identical to SEQ ID NO: 4634
  Synthetic polypeptide

SEQ ID NO: 4642 - protein, 61 aa, Artificial Sequence; identical to SEQ ID NO: 4634
  Synthetic polypeptide

SEQ ID NO: 4643 - protein, 61 aa, Artificial Sequence; identical to SEQ ID NO: 4634
  Synthetic polypeptide

SEQ ID NO: 4644 - protein, 61 aa, Artificial Sequence; identical to SEQ ID NO: 4634
  Synthetic polypeptide

SEQ ID NO: 4645 - protein, 61 aa, Artificial Sequence; identical to SEQ ID NO: 4634
  Synthetic polypeptide

SEQ ID NO: 4646 - protein, 61 aa, Artificial Sequence; identical to SEQ ID NO: 4634
  Synthetic polypeptide

SEQ ID NO: 4647 - protein, 61 aa, Artificial Sequence; identical to SEQ ID NO: 4634
  Synthetic polypeptide

SEQ ID NO: 4648 - protein, 61 aa, Artificial Sequence
  Synthetic polypeptide
EAEAGRSRGEAGAVGKIRSQSWMTSATLSPTMSNCPCWAGALGPRRASAAAEPCTQAFPSW

SEQ ID NO: 4649 - protein, 61 aa, Artificial Sequence; identical to SEQ ID NO: 4648
  Synthetic polypeptide

SEQ ID NO: 4650 - protein, 61 aa, Artificial Sequence; identical to SEQ ID NO: 4648
  Synthetic polypeptide

SEQ ID NO: 4651 - protein, 61 aa, Artificial Sequence; identical to SEQ ID NO: 4648
  Synthetic polypeptide

SEQ ID NO: 4652 - protein, 61 aa, Artificial Sequence; identical to SEQ ID NO: 4648
  Synthetic polypeptide

SEQ ID NO: 4653 - protein, 61 aa, Artificial Sequence; identical to SEQ ID NO: 4648
  Synthetic polypeptide

SEQ ID NO: 4654 - protein, 61 aa, Artificial Sequence
  Synthetic polypeptide
DGDNPGLPQSAWRFYATNLSRTDLHSTWQYYERTVTVPMYRYRRRAPATKQLFHFLFSICS

SEQ ID NO: 4655 - protein, 61 aa, Artificial Sequence
  Synthetic polypeptide
LCTERAKCRVTPSSGAPRGGSPPWQGPCLSCCCFLGEPVTSCGNSRRKKRLSSERKRESKS

SEQ ID NO: 4656 - protein, 61 aa, Artificial Sequence; identical to SEQ ID NO: 4655
  Synthetic polypeptide

SEQ ID NO: 4657 - protein, 61 aa, Artificial Sequence; identical to SEQ ID NO: 4655
  Synthetic polypeptide

SEQ ID NO: 4658 - protein, 61 aa, Artificial Sequence; identical to SEQ ID NO: 4655
  Synthetic polypeptide

SEQ ID NO: 4659 - protein, 61 aa, Artificial Sequence
  Synthetic polypeptide
VRKAFLTIRSVRRRTWLRKAVMNSPSPQALILAARCSLTPSRQRQQSRCPTSCRSHRTPTL

SEQ ID NO: 4660 - protein, 61 aa, Artificial Sequence; identical to SEQ ID NO: 4659
  Synthetic polypeptide

SEQ ID NO: 4661 - protein, 61 aa, Artificial Sequence
  Synthetic polypeptide
PWGNSATFLRPFLHPSMELITPVPQGGDLQVLLPAGLPASPAGPRIPEPLVPCAAGEKLQP

SEQ ID NO: 4662 - protein, 61 aa, Artificial Sequence; identical to SEQ ID NO: 4661
  Synthetic polypeptide

SEQ ID NO: 4663 - protein, 61 aa, Artificial Sequence; identical to SEQ ID NO: 4661
  Synthetic polypeptide

SEQ ID NO: 4664 - protein, 61 aa, Artificial Sequence; identical to SEQ ID NO: 4661
  Synthetic polypeptide

SEQ ID NO: 4665 - protein, 61 aa, Artificial Sequence; identical to SEQ ID NO: 4661
  Synthetic polypeptide

SEQ ID NO: 4666 - protein, 61 aa, Artificial Sequence; identical to SEQ ID NO: 4661
  Synthetic polypeptide

SEQ ID NO: 4667 - protein, 61 aa, Artificial Sequence; identical to SEQ ID NO: 4661
  Synthetic polypeptide

SEQ ID NO: 4668 - protein, 61 aa, Artificial Sequence; identical to SEQ ID NO: 4661
  Synthetic polypeptide

SEQ ID NO: 4669 - protein, 61 aa, Artificial Sequence; identical to SEQ ID NO: 4661
  Synthetic polypeptide

SEQ ID NO: 4670 - protein, 61 aa, Artificial Sequence
  Synthetic polypeptide
EKSKGPAEGAGMWTSAAPGSISVTAPPSASTPWVHTAAAAAQAGSPDTESRITKRTLSVKI

SEQ ID NO: 4671 - protein, 61 aa, Artificial Sequence; identical to SEQ ID NO: 4670
  Synthetic polypeptide

SEQ ID NO: 4672 - protein, 61 aa, Artificial Sequence; identical to SEQ ID NO: 4670
  Synthetic polypeptide

SEQ ID NO: 4673 - protein, 61 aa, Artificial Sequence; identical to SEQ ID NO: 4670
  Synthetic polypeptide

SEQ ID NO: 4674 - protein, 61 aa, Artificial Sequence; identical to SEQ ID NO: 4670
  Synthetic polypeptide

SEQ ID NO: 4675 - protein, 61 aa, Artificial Sequence; identical to SEQ ID NO: 4670
  Synthetic polypeptide

SEQ ID NO: 4676 - protein, 61 aa, Artificial Sequence; identical to SEQ ID NO: 4670
  Synthetic polypeptide

SEQ ID NO: 4677 - protein, 61 aa, Artificial Sequence; identical to SEQ ID NO: 4670
  Synthetic polypeptide

SEQ ID NO: 4678 - protein, 61 aa, Artificial Sequence; identical to SEQ ID NO: 4670
  Synthetic polypeptide

SEQ ID NO: 4679 - protein, 61 aa, Artificial Sequence; identical to SEQ ID NO: 4670
  Synthetic polypeptide

SEQ ID NO: 4680 - protein, 61 aa, Artificial Sequence; identical to SEQ ID NO: 4670
  Synthetic polypeptide

SEQ ID NO: 4681 - protein, 61 aa, Artificial Sequence
  Synthetic polypeptide
GHTGKCQGCVCTEEALWEGKREGSHLRAKERGLRRSQPCQPLELRLPASRTCPGRAAPLTT

SEQ ID NO: 4682 - protein, 61 aa, Artificial Sequence; identical to SEQ ID NO: 4681
  Synthetic polypeptide

SEQ ID NO: 4683 - protein, 61 aa, Artificial Sequence; identical to SEQ ID NO: 4681
  Synthetic polypeptide

SEQ ID NO: 4684 - protein, 61 aa, Artificial Sequence; identical to SEQ ID NO: 4681
  Synthetic polypeptide

SEQ ID NO: 4685 - protein, 61 aa, Artificial Sequence
  Synthetic polypeptide
CRRMRDQLPALCWLLTMALGDIPGMGLPDAIATEQLHRQQQEKWSGQSQHLLQGAELQNQF

SEQ ID NO: 4686 - protein, 61 aa, Artificial Sequence; identical to SEQ ID NO: 4685
  Synthetic polypeptide

SEQ ID NO: 4687 - protein, 61 aa, Artificial Sequence; identical to SEQ ID NO: 4685
  Synthetic polypeptide

SEQ ID NO: 4688 - protein, 61 aa, Artificial Sequence; identical to SEQ ID NO: 4685
  Synthetic polypeptide

SEQ ID NO: 4689 - protein, 61 aa, Artificial Sequence; identical to SEQ ID NO: 4685
  Synthetic polypeptide

SEQ ID NO: 4690 - protein, 61 aa, Artificial Sequence
  Synthetic polypeptide
GAFPCFTLHFSSPPPYEGRVCFPFCRNCKFPEASPAMLNYPGQRLPLPVRHRCGHHVLLHG

SEQ ID NO: 4691 - protein, 61 aa, Artificial Sequence; identical to SEQ ID NO: 4690
  Synthetic polypeptide

SEQ ID NO: 4692 - protein, 61 aa, Artificial Sequence
  Synthetic polypeptide
LATAQDLNITCRFAGVFHVEKNGRYSISRTEAADLCKAFNSTLPTMAQMEKALSIGFETCR

SEQ ID NO: 4693 - protein, 61 aa, Artificial Sequence
  Synthetic polypeptide
GRTWWLTAVIPALWEAKAAGSRGQEIEAILANTVISRKKRMAKYEKAEIKEMGEMHRELNA

SEQ ID NO: 4694 - protein, 61 aa, Artificial Sequence; identical to SEQ ID NO: 4693
  Synthetic polypeptide

SEQ ID NO: 4695 - protein, 61 aa, Artificial Sequence; identical to SEQ ID NO: 4693
  Synthetic polypeptide

SEQ ID NO: 4696 - protein, 60 aa, Artificial Sequence
  Synthetic polypeptide
RARWLTPVIPALWEAKAGGSRGQEIKTILANMAQRLRSQDWTYLHSCPLTSAATSNMRGL

SEQ ID NO: 4697 - protein, 60 aa, Artificial Sequence
  Synthetic polypeptide
NTLKTEPPLPRQDYGAALRGLCEDALEGLLFLLLFSLLSAGALATALCSLPRAWALFPPS

SEQ ID NO: 4698 - protein, 60 aa, Artificial Sequence
  Synthetic polypeptide
ILSKQSLHCPDRTMVQPCGACAKTPWKACSSCYSSPCCLQERWPLPSAACPEPGPSSHPV

SEQ ID NO: 4699 - protein, 60 aa, Artificial Sequence
  Synthetic polypeptide
PSFLVHSSAVMVSSLLFLRQFGPVLTSGPLHLLFSLPGALFSQLSTWLTLSPLTGDHGNG

SEQ ID NO: 4700 - protein, 60 aa, Artificial Sequence; identical to SEQ ID NO: 4699
  Synthetic polypeptide

SEQ ID NO: 4701 - protein, 60 aa, Artificial Sequence
  Synthetic polypeptide
GVRSAPPRAQSASPSASEHLRRGPGTPSSLSSRSGFCLPRRRRLLPQLRKNVSVKTTSWP

SEQ ID NO: 4702 - protein, 60 aa, Artificial Sequence
  Synthetic polypeptide
SFGERAPSTRSGDPLVAVLPTRTRVPQASRCPAGSSCPRVRASACRGDGDFCRSSGRMCL

SEQ ID NO: 4703 - protein, 60 aa, Artificial Sequence
  Synthetic polypeptide
ILHSLVSELHRATESHRCLRIPPPGTLRGSRTAAGPRWAVPVHVPGHGAGEPAHHPGCQL

SEQ ID NO: 4704 - protein, 60 aa, Artificial Sequence
  Synthetic polypeptide
WCVPVIPATREAEAGESLEPGRQSWCSLWTLTRSWWRSCRPKSSCGWCWWPWVQGCCCWG

SEQ ID NO: 4705 - protein, 60 aa, Artificial Sequence; identical to SEQ ID NO: 4704
  Synthetic polypeptide

SEQ ID NO: 4706 - protein, 60 aa, Artificial Sequence
  Synthetic polypeptide
ALDRDLNITCRFAGVFHVEKNGRYSISRTEAADLCKAFNSTLPTMAQMEKALSIGFETCR

SEQ ID NO: 4707 - protein, 60 aa, Artificial Sequence
  Synthetic polypeptide
SQLLGRLRKRCTASTWTASLSSWASTSAHTSSRPPTPSSRGSRALCRSECPHPSPSSCSS

SEQ ID NO: 4708 - protein, 60 aa, Artificial Sequence; identical to SEQ ID NO: 4707
  Synthetic polypeptide

SEQ ID NO: 4709 - protein, 60 aa, Artificial Sequence
  Synthetic polypeptide
SQHLGRLRRVDRLSPGVQDQSGQHMMCSVDSYSVPILLELHVLVNFRVRSFQLPSTIKAG

SEQ ID NO: 4710 - protein, 60 aa, Artificial Sequence; identical to SEQ ID NO: 4709
  Synthetic polypeptide

SEQ ID NO: 4711 - protein, 60 aa, Artificial Sequence; identical to SEQ ID NO: 4709
  Synthetic polypeptide

SEQ ID NO: 4712 - protein, 60 aa, Artificial Sequence
  Synthetic polypeptide
MGAVAHACNASTLRGRGGKITSQSWMTSATLSPTMSNCPCWAGALGPRRAHAECHQVWQH

SEQ ID NO: 4713 - protein, 60 aa, Artificial Sequence
  Synthetic polypeptide
VSVSTPDSGSWRKGLSGSSPKPASQWSFALVAQAGVQWHNLGSPQPLPPGFKRFSCLSLL

SEQ ID NO: 4714 - protein, 60 aa, Artificial Sequence; identical to SEQ ID NO: 4713
  Synthetic polypeptide

SEQ ID NO: 4715 - protein, 60 aa, Artificial Sequence; identical to SEQ ID NO: 4713
  Synthetic polypeptide

SEQ ID NO: 4716 - protein, 60 aa, Artificial Sequence
  Synthetic polypeptide
PWASVSSSVKWGEQRPPPHLPAAGRAQRDSSTMPAMDPACLCCASCVTTSWSISVSTGQP

SEQ ID NO: 4717 - protein, 59 aa, Artificial Sequence
  Synthetic polypeptide
YSQNRASIAPTGLWCSPAGPVRRRPGRPALPATLLPAVCRSAGHCPLQPAPSLGPLPTQ

SEQ ID NO: 4718 - protein, 59 aa, Artificial Sequence; identical to SEQ ID NO: 4717
  Synthetic polypeptide

SEQ ID NO: 4719 - protein, 59 aa, Artificial Sequence; identical to SEQ ID NO: 4717
  Synthetic polypeptide

SEQ ID NO: 4720 - protein, 59 aa, Artificial Sequence
  Synthetic polypeptide
ACSLALFPCSLLCSYGVLPAVPPTVRACPHLRAFAPAVLPARSTLLPAFHVADSLTSYR

SEQ ID NO: 4721 - protein, 59 aa, Artificial Sequence; identical to SEQ ID NO: 4720
  Synthetic polypeptide

SEQ ID NO: 4722 - protein, 59 aa, Artificial Sequence
  Synthetic polypeptide
SQTQWLKLGSGLTLPTFELWLHLLTVYFRSVASLRLDFCICKMQQIPMRLAPLPTLDPV

SEQ ID NO: 4723 - protein, 59 aa, Artificial Sequence
  Synthetic polypeptide
TTSTPPGRGHHQLLDLTMKTMDTNRKTPIPHSPLWSPLSTRCIRLSTTRPPCPSTPRGS

SEQ ID NO: 4724 - protein, 59 aa, Artificial Sequence; identical to SEQ ID NO: 4723
  Synthetic polypeptide

SEQ ID NO: 4725 - protein, 59 aa, Artificial Sequence; identical to SEQ ID NO: 4723
  Synthetic polypeptide

SEQ ID NO: 4726 - protein, 59 aa, Artificial Sequence; identical to SEQ ID NO: 4723
  Synthetic polypeptide

SEQ ID NO: 4727 - protein, 59 aa, Artificial Sequence; identical to SEQ ID NO: 4723
  Synthetic polypeptide

SEQ ID NO: 4728 - protein, 59 aa, Artificial Sequence; identical to SEQ ID NO: 4723
  Synthetic polypeptide

SEQ ID NO: 4729 - protein, 59 aa, Artificial Sequence
  Synthetic polypeptide
PRKEFGHWNRDPEFPRGPGCQPSLARGRLLHLESFLVWAAERHGGAPGRGLWCLCRGAG

SEQ ID NO: 4730 - protein, 59 aa, Artificial Sequence; identical to SEQ ID NO: 4729
  Synthetic polypeptide

SEQ ID NO: 4731 - protein, 59 aa, Artificial Sequence
  Synthetic polypeptide
THKEFGHWNRDPEFPRGPGCQPSLARGRLLHLESFLVWAAERHGGAPGRGLWCLCRGAG

SEQ ID NO: 4732 - protein, 59 aa, Artificial Sequence; identical to SEQ ID NO: 4731
  Synthetic polypeptide

SEQ ID NO: 4733 - protein, 59 aa, Artificial Sequence
  Synthetic polypeptide
RYTSKNMKLRRHTRNLAIGIGIQNFPEGLAVSLPLRGAGFSTWRAFWYGQLSGMVEPLA

SEQ ID NO: 4734 - protein, 59 aa, Artificial Sequence
  Synthetic polypeptide
SQHFGRPRRADHEVRRSRPSWLTRRPPAEAGWPEDHPADHAPGAWHREGGPDQQAEATP

SEQ ID NO: 4735 - protein, 59 aa, Artificial Sequence
  Synthetic polypeptide
GQARWLLPVISALWMPRRVDHLRSGVQDQPAQHAVRPKTWLCNRQAQTRLMLSVVPRIG

SEQ ID NO: 4736 - protein, 59 aa, Artificial Sequence; identical to SEQ ID NO: 4735
  Synthetic polypeptide

SEQ ID NO: 4737 - protein, 59 aa, Artificial Sequence
  Synthetic polypeptide
PGAVALACNLSTLDAKAGGSLEVRSSRPASTTCCETKDLVVQQAGTNKTDVVCGPQDRL

SEQ ID NO: 4738 - protein, 59 aa, Artificial Sequence
  Synthetic polypeptide
SQETHATAGLLSESESGQVESGLPTDPALHADLRASGSGKTHHPGRTEPATATVRPAWI

SEQ ID NO: 4739 - protein, 59 aa, Artificial Sequence; identical to SEQ ID NO: 4738
  Synthetic polypeptide

SEQ ID NO: 4740 - protein, 59 aa, Artificial Sequence
  Synthetic polypeptide
SQHFERPRQDDHLRTPAGQPLRGPRGAGVGEPAGNVVGGGLRGGSRGVRLQRGLVRGPP

SEQ ID NO: 4741 - protein, 59 aa, Artificial Sequence; identical to SEQ ID NO: 4740
  Synthetic polypeptide

SEQ ID NO: 4742 - protein, 59 aa, Artificial Sequence
  Synthetic polypeptide
DMDLTTPLCCCVLFNASPQNFCVKIIAFDELRTDFKNPIDQGNPARAVSDTCAVPSASV

SEQ ID NO: 4743 - protein, 59 aa, Artificial Sequence
  Synthetic polypeptide
ASETTNPPEGRNSEHIRTSVGINSGHAAFKNGECQNTPGEKHCLYQLGFIYRRQLYSQS

SEQ ID NO: 4744 - protein, 59 aa, Artificial Sequence; identical to SEQ ID NO: 4743
  Synthetic polypeptide

SEQ ID NO: 4745 - protein, 59 aa, Artificial Sequence
  Synthetic polypeptide
IFMRSARFINGNFSCVLPGLPSLTCCHVRCACFTFRHDCQFPEASPAMWNCERPDHPGA

SEQ ID NO: 4746 - protein, 59 aa, Artificial Sequence; identical to SEQ ID NO: 4745
  Synthetic polypeptide

SEQ ID NO: 4747 - protein, 59 aa, Artificial Sequence; identical to SEQ ID NO: 4745
  Synthetic polypeptide

SEQ ID NO: 4748 - protein, 59 aa, Artificial Sequence
  Synthetic polypeptide
SQHFGRPRRVACLRSGVRDQPGQYGKKVTEGKESIEDLPIQTYLTKTQERLGGCSNICP

SEQ ID NO: 4749 - protein, 59 aa, Artificial Sequence; identical to SEQ ID NO: 4748
  Synthetic polypeptide

SEQ ID NO: 4750 - protein, 59 aa, Artificial Sequence; identical to SEQ ID NO: 4748
  Synthetic polypeptide

SEQ ID NO: 4751 - protein, 59 aa, Artificial Sequence; identical to SEQ ID NO: 4748
  Synthetic polypeptide

SEQ ID NO: 4752 - protein, 59 aa, Artificial Sequence
  Synthetic polypeptide
SQLFGRLSLSTTMSTRRVTARVPGGGSPCRIPRACAPACLTPSRAPSAPSPATPGSFWI

SEQ ID NO: 4753 - protein, 59 aa, Artificial Sequence; identical to SEQ ID NO: 4752
  Synthetic polypeptide

SEQ ID NO: 4754 - protein, 59 aa, Artificial Sequence; identical to SEQ ID NO: 4752
  Synthetic polypeptide

SEQ ID NO: 4755 - protein, 59 aa, Artificial Sequence; identical to SEQ ID NO: 4752
  Synthetic polypeptide

SEQ ID NO: 4756 - protein, 59 aa, Artificial Sequence; identical to SEQ ID NO: 4752
  Synthetic polypeptide

SEQ ID NO: 4757 - protein, 59 aa, Artificial Sequence; identical to SEQ ID NO: 4752
  Synthetic polypeptide

SEQ ID NO: 4758 - protein, 59 aa, Artificial Sequence
  Synthetic polypeptide
AQEFKTSLANMLSTAFCLRRARKLPSPITACGRPWASSLPSGTACFCACTSSSTFCWGS

SEQ ID NO: 4759 - protein, 59 aa, Artificial Sequence; identical to SEQ ID NO: 4758
  Synthetic polypeptide

SEQ ID NO: 4760 - protein, 59 aa, Artificial Sequence
  Synthetic polypeptide
GQALWLTPVIPALWEAKAGRSQGIWPLESGSRISPRAWLSAFPCEGQASPPGELSGMGS

SEQ ID NO: 4761 - protein, 59 aa, Artificial Sequence; identical to SEQ ID NO: 4760
  Synthetic polypeptide

SEQ ID NO: 4762 - protein, 59 aa, Artificial Sequence; identical to SEQ ID NO: 4760
  Synthetic polypeptide

SEQ ID NO: 4763 - protein, 59 aa, Artificial Sequence
  Synthetic polypeptide
SQHFGRPRRADHKEFGHWNRDPEFPRGPGCQPSLARGRLLHLESFLVWAAERHGGAPGR

SEQ ID NO: 4764 - protein, 59 aa, Artificial Sequence
  Synthetic polypeptide
NPSTLGGQASPSPSPKVLWWPWWARWAAESRPCSQPSWLRWTKWRGTWLSRRGSWSRTA

SEQ ID NO: 4765 - protein, 59 aa, Artificial Sequence
  Synthetic polypeptide
KYKMSQKYLGCQKEFGHWNRDPEFPRGPGCQPSLARGRLLHLESFLVWAAERHGGAPGR

SEQ ID NO: 4766 - protein, 59 aa, Artificial Sequence
  Synthetic polypeptide
NQALCLTFTSYNLVHGNIIGSGIFVSPKGVLENAGSVGLALIVWIVTGFITVVGALCYA

SEQ ID NO: 4767 - protein, 58 aa, Artificial Sequence
  Synthetic polypeptide
VESKQQIHKDWNNGQWRLQKEPRMCEFKCYPRCEASSGAPWSCRATCCHLFLDCTSPW

SEQ ID NO: 4768 - protein, 58 aa, Artificial Sequence; identical to SEQ ID NO: 4767
  Synthetic polypeptide

SEQ ID NO: 4769 - protein, 58 aa, Artificial Sequence
  Synthetic polypeptide
SWVTPVGLEILRHQPLAHRPALHVAVLRANGHRAHVQVPPPGTCHQATVSFFIFHLFL

SEQ ID NO: 4770 - protein, 58 aa, Artificial Sequence
  Synthetic polypeptide
RLSIPNLKIQSPKCSKTQNYLHVNMMLKGNAHWSILDFGLSGFQMLNQSTLNCRSPMW

SEQ ID NO: 4771 - protein, 58 aa, Artificial Sequence; identical to SEQ ID NO: 4770
  Synthetic polypeptide

SEQ ID NO: 4772 - protein, 58 aa, Artificial Sequence; identical to SEQ ID NO: 4770
  Synthetic polypeptide

SEQ ID NO: 4773 - protein, 58 aa, Artificial Sequence; identical to SEQ ID NO: 4770
  Synthetic polypeptide

SEQ ID NO: 4774 - protein, 58 aa, Artificial Sequence; identical to SEQ ID NO: 4770
  Synthetic polypeptide

SEQ ID NO: 4775 - protein, 58 aa, Artificial Sequence; identical to SEQ ID NO: 4770
  Synthetic polypeptide

SEQ ID NO: 4776 - protein, 58 aa, Artificial Sequence; identical to SEQ ID NO: 4770
  Synthetic polypeptide

SEQ ID NO: 4777 - protein, 58 aa, Artificial Sequence; identical to SEQ ID NO: 4770
  Synthetic polypeptide

SEQ ID NO: 4778 - protein, 58 aa, Artificial Sequence; identical to SEQ ID NO: 4770
  Synthetic polypeptide

SEQ ID NO: 4779 - protein, 58 aa, Artificial Sequence
  Synthetic polypeptide
SQHFGRLMLADHEALPVDWFSSLDQSRVHALGTWGLQAYSLSRIWLSYSPTQKEILSL

SEQ ID NO: 4780 - protein, 58 aa, Artificial Sequence
  Synthetic polypeptide
EFKTSLGNMPTSVRNPELERNGLYPAYTGLPGSRHSCIFPGQYNPSFISDESRRRDYF

SEQ ID NO: 4781 - protein, 58 aa, Artificial Sequence; identical to SEQ ID NO: 4780
  Synthetic polypeptide

SEQ ID NO: 4782 - protein, 58 aa, Artificial Sequence
  Synthetic polypeptide
MRDVLWIQCCHILFSRASDSIPQICLSRRQTAVVWVPYRRETLYSIVLSSSMLAFKKP

SEQ ID NO: 4783 - protein, 58 aa, Artificial Sequence
  Synthetic polypeptide
HQSFTDSFQEYSRWLGARAPHLPGSRCWTSTAAWTRPCWTAPSSRSQASTLSRPLLDR

SEQ ID NO: 4784 - protein, 58 aa, Artificial Sequence; identical to SEQ ID NO: 4783
  Synthetic polypeptide

SEQ ID NO: 4785 - protein, 58 aa, Artificial Sequence
  Synthetic polypeptide
AQEFETSWGNKVRPHLYKKLRKISRYSWAALGKSQLCLALIMMTSLCGMARQSRKEGH

SEQ ID NO: 4786 - protein, 58 aa, Artificial Sequence; identical to SEQ ID NO: 4785
  Synthetic polypeptide

SEQ ID NO: 4787 - protein, 58 aa, Artificial Sequence; identical to SEQ ID NO: 4785
  Synthetic polypeptide

SEQ ID NO: 4788 - protein, 58 aa, Artificial Sequence
  Synthetic polypeptide
QPGVAEGAGLSSGQAQIQAQPPLRWSLWAGPLPCPGLGSGAGSTPSCPSYSPWWSSRS

SEQ ID NO: 4789 - protein, 58 aa, Artificial Sequence
  Synthetic polypeptide
GASLPGRPSSEMWGAPLPCRPVWDVRSTSARPRPCLGGTTQSSIHWRGKYLMPSPVNW

SEQ ID NO: 4790 - protein, 58 aa, Artificial Sequence; identical to SEQ ID NO: 4789
  Synthetic polypeptide

SEQ ID NO: 4791 - protein, 58 aa, Artificial Sequence; identical to SEQ ID NO: 4789
  Synthetic polypeptide

SEQ ID NO: 4792 - protein, 58 aa, Artificial Sequence
  Synthetic polypeptide
EESCRHGVTIPRFNSDCLTKGQDKRSEPQQCGRRVLHPDRRTWTSHAGCLNRVLLQIP

SEQ ID NO: 4793 - protein, 58 aa, Artificial Sequence; identical to SEQ ID NO: 4792
  Synthetic polypeptide

SEQ ID NO: 4794 - protein, 58 aa, Artificial Sequence; identical to SEQ ID NO: 4792
  Synthetic polypeptide

SEQ ID NO: 4795 - protein, 58 aa, Artificial Sequence; identical to SEQ ID NO: 4792
  Synthetic polypeptide

SEQ ID NO: 4796 - protein, 58 aa, Artificial Sequence; identical to SEQ ID NO: 4792
  Synthetic polypeptide

SEQ ID NO: 4797 - protein, 58 aa, Artificial Sequence; identical to SEQ ID NO: 4792
  Synthetic polypeptide

SEQ ID NO: 4798 - protein, 58 aa, Artificial Sequence
  Synthetic polypeptide
YQFKRTTRSSLLLPGIWICSRTRTLLKLRMCLQSFDISHITAMGRTWPGIGYNSTGTI

SEQ ID NO: 4799 - protein, 58 aa, Artificial Sequence
  Synthetic polypeptide
WMWWLTPMIPTLWEAEEGGLLENRSLRPAWATWRKPVKVEEMIVCGTCKVRWRELRIL

SEQ ID NO: 4800 - protein, 58 aa, Artificial Sequence; identical to SEQ ID NO: 4799
  Synthetic polypeptide

SEQ ID NO: 4801 - protein, 57 aa, Artificial Sequence
  Synthetic polypeptide
EAEAGRSRGEAGAVGKIRSQSWMTSATLSPTMSNCPCWAGALGPRRAHAECHQVWQH

SEQ ID NO: 4802 - protein, 57 aa, Artificial Sequence
  Synthetic polypeptide
LEMEIILGYPSRPGDSTPPTSRAQTCTPRGSTTSERSPCPCTVRKLKPTGPPDLSPR

SEQ ID NO: 4803 - protein, 57 aa, Artificial Sequence; identical to SEQ ID NO: 4802
  Synthetic polypeptide

SEQ ID NO: 4804 - protein, 57 aa, Artificial Sequence; identical to SEQ ID NO: 4802
  Synthetic polypeptide

SEQ ID NO: 4805 - protein, 57 aa, Artificial Sequence; identical to SEQ ID NO: 4802
  Synthetic polypeptide

SEQ ID NO: 4806 - protein, 57 aa, Artificial Sequence
  Synthetic polypeptide
LKKPIKPLEKLASYFVYTVRVQGFWPVGTSSALESLSRQRECWRMLVLWALLSSSGL

SEQ ID NO: 4807 - protein, 57 aa, Artificial Sequence; identical to SEQ ID NO: 4806
  Synthetic polypeptide

SEQ ID NO: 4808 - protein, 57 aa, Artificial Sequence; identical to SEQ ID NO: 4806
  Synthetic polypeptide

SEQ ID NO: 4809 - protein, 57 aa, Artificial Sequence
  Synthetic polypeptide
SFGERAPSTRSGDPLVAVLPTRTRVPQASRCPAGSSCPRVRASACRGDGDFCRSSGR

SEQ ID NO: 4810 - protein, 57 aa, Artificial Sequence
  Synthetic polypeptide
LKLSAPPFARGEAHHDASAATTNTGAHHRVAAPVPAPRGVPASGGGRSAHEGAGLRL

SEQ ID NO: 4811 - protein, 57 aa, Artificial Sequence; identical to SEQ ID NO: 4810
  Synthetic polypeptide

SEQ ID NO: 4812 - protein, 57 aa, Artificial Sequence; identical to SEQ ID NO: 4810
  Synthetic polypeptide

SEQ ID NO: 4813 - protein, 57 aa, Artificial Sequence
  Synthetic polypeptide
GAPLPGRDPVWEEPVDPLKEEALLVRLMAHPTSLEKELQLKQSFLWMSFLHLSSLEN

SEQ ID NO: 4814 - protein, 57 aa, Artificial Sequence
  Synthetic polypeptide
SQHFGRLRHEDCLSSEIQDQPGRHGKCPPATPAYHPACTTPAWPRCQSLCCCSWPCW

SEQ ID NO: 4815 - protein, 57 aa, Artificial Sequence; identical to SEQ ID NO: 4814
  Synthetic polypeptide

SEQ ID NO: 4816 - protein, 57 aa, Artificial Sequence; identical to SEQ ID NO: 4814
  Synthetic polypeptide

SEQ ID NO: 4817 - protein, 57 aa, Artificial Sequence; identical to SEQ ID NO: 4814
  Synthetic polypeptide

SEQ ID NO: 4818 - protein, 57 aa, Artificial Sequence; identical to SEQ ID NO: 4814
  Synthetic polypeptide

SEQ ID NO: 4819 - protein, 57 aa, Artificial Sequence; identical to SEQ ID NO: 4814
  Synthetic polypeptide

SEQ ID NO: 4820 - protein, 57 aa, Artificial Sequence; identical to SEQ ID NO: 4814
  Synthetic polypeptide

SEQ ID NO: 4821 - protein, 57 aa, Artificial Sequence; identical to SEQ ID NO: 4814
  Synthetic polypeptide

SEQ ID NO: 4822 - protein, 57 aa, Artificial Sequence; identical to SEQ ID NO: 4814
  Synthetic polypeptide

SEQ ID NO: 4823 - protein, 57 aa, Artificial Sequence; identical to SEQ ID NO: 4814
  Synthetic polypeptide

SEQ ID NO: 4824 - protein, 57 aa, Artificial Sequence; identical to SEQ ID NO: 4814
  Synthetic polypeptide

SEQ ID NO: 4825 - protein, 57 aa, Artificial Sequence
  Synthetic polypeptide
KEIIHMRTGMSRGIPATPTSPSAFRTRSSCGCLVFTSGPVSPSTSSISPDMTEATFR

SEQ ID NO: 4826 - protein, 57 aa, Artificial Sequence; identical to SEQ ID NO: 4825
  Synthetic polypeptide

SEQ ID NO: 4827 - protein, 57 aa, Artificial Sequence; identical to SEQ ID NO: 4825
  Synthetic polypeptide

SEQ ID NO: 4828 - protein, 57 aa, Artificial Sequence; identical to SEQ ID NO: 4825
  Synthetic polypeptide

SEQ ID NO: 4829 - protein, 57 aa, Artificial Sequence; identical to SEQ ID NO: 4825
  Synthetic polypeptide

SEQ ID NO: 4830 - protein, 57 aa, Artificial Sequence; identical to SEQ ID NO: 4825
  Synthetic polypeptide

SEQ ID NO: 4831 - protein, 57 aa, Artificial Sequence
  Synthetic polypeptide
WIYKHLAFPLLALTPSCHSVKKVSPLPSTMIVSFLRPLNHAELQPRAVSTNTECNRC

SEQ ID NO: 4832 - protein, 57 aa, Artificial Sequence; identical to SEQ ID NO: 4831
  Synthetic polypeptide

SEQ ID NO: 4833 - protein, 57 aa, Artificial Sequence; identical to SEQ ID NO: 4831
  Synthetic polypeptide

SEQ ID NO: 4834 - protein, 57 aa, Artificial Sequence
  Synthetic polypeptide
HQSFTDSFQEYSRWLGARAPHLPGSRCWTSTAAWTRPCWTAPSSRSQASTLRPLLDR

SEQ ID NO: 4835 - protein, 57 aa, Artificial Sequence
  Synthetic polypeptide
SQHFRRLRQTNHLSLPRAHYWTVCIGPNGTTTRAWAMAPTPSSTMRTCCWGFRGCGS

SEQ ID NO: 4836 - protein, 57 aa, Artificial Sequence; identical to SEQ ID NO: 4835
  Synthetic polypeptide

SEQ ID NO: 4837 - protein, 57 aa, Artificial Sequence; identical to SEQ ID NO: 4835
  Synthetic polypeptide

SEQ ID NO: 4838 - protein, 57 aa, Artificial Sequence
  Synthetic polypeptide
FYCQLCNWWPWTNLLTCIFFSLLTCKMRFLSPFNPPIVSEVSRVFMKSNGKWITRFL

SEQ ID NO: 4839 - protein, 57 aa, Artificial Sequence
  Synthetic polypeptide
GAPLPGHHPVWEEPVDPLKEEALLVRLMAHPTSLEKELQLKQSFLWMSFLHLSSLEN

SEQ ID NO: 4840 - protein, 57 aa, Artificial Sequence
  Synthetic polypeptide
GAPLPGQPPRPGGRWGGSAPRPASCLVREVRGASARPPLLGSEEPLCPATTPSGRNQ

SEQ ID NO: 4841 - protein, 57 aa, Artificial Sequence
  Synthetic polypeptide
QSSILVTSTCHGSSDPEGHQAPALKPCVHLHHPGRLHGDCSGGWLRCLFGEVPGAAV

SEQ ID NO: 4842 - protein, 57 aa, Artificial Sequence; identical to SEQ ID NO: 4841
  Synthetic polypeptide

SEQ ID NO: 4843 - protein, 57 aa, Artificial Sequence
  Synthetic polypeptide
VDGLRSGVRIQPGQHGESPSLLKIQKISQDKVFWTDIINEAIFSANRLTGSDVNLLA

SEQ ID NO: 4844 - protein, 57 aa, Artificial Sequence
  Synthetic polypeptide
GDWSPSPSSCWDKSLDPSVFPSVKWEGKSCSFHPRQGSATRTNRTASTRHTHQGWMR

SEQ ID NO: 4845 - protein, 57 aa, Artificial Sequence; identical to SEQ ID NO: 4844
  Synthetic polypeptide

SEQ ID NO: 4846 - protein, 57 aa, Artificial Sequence; identical to SEQ ID NO: 4844
  Synthetic polypeptide

SEQ ID NO: 4847 - protein, 57 aa, Artificial Sequence; identical to SEQ ID NO: 4844
  Synthetic polypeptide

SEQ ID NO: 4848 - protein, 57 aa, Artificial Sequence; identical to SEQ ID NO: 4844
  Synthetic polypeptide

SEQ ID NO: 4849 - protein, 56 aa, Artificial Sequence
  Synthetic polypeptide
WAQWLIPVIPALLEAKAAAPAMTTVSPPETMSSSPLSAGMTRKFVESLSERSTPSC

SEQ ID NO: 4850 - protein, 56 aa, Artificial Sequence; identical to SEQ ID NO: 4849
  Synthetic polypeptide

SEQ ID NO: 4851 - protein, 56 aa, Artificial Sequence; identical to SEQ ID NO: 4849
  Synthetic polypeptide

SEQ ID NO: 4852 - protein, 56 aa, Artificial Sequence; identical to SEQ ID NO: 4849
  Synthetic polypeptide

SEQ ID NO: 4853 - protein, 56 aa, Artificial Sequence; identical to SEQ ID NO: 4849
  Synthetic polypeptide

SEQ ID NO: 4854 - protein, 56 aa, Artificial Sequence
  Synthetic polypeptide
NLRLPPGHAELHMPLNQKAKRELCIGWGDPSGLPRRSYRLLLLHQEGVTTSYWTLL

SEQ ID NO: 4855 - protein, 56 aa, Artificial Sequence; identical to SEQ ID NO: 4854
  Synthetic polypeptide

SEQ ID NO: 4856 - protein, 56 aa, Artificial Sequence; identical to SEQ ID NO: 4854
  Synthetic polypeptide

SEQ ID NO: 4857 - protein, 56 aa, Artificial Sequence; identical to SEQ ID NO: 4854
  Synthetic polypeptide

SEQ ID NO: 4858 - protein, 56 aa, Artificial Sequence; identical to SEQ ID NO: 4854
  Synthetic polypeptide

SEQ ID NO: 4859 - protein, 56 aa, Artificial Sequence; identical to SEQ ID NO: 4854
  Synthetic polypeptide

SEQ ID NO: 4860 - protein, 56 aa, Artificial Sequence
  Synthetic polypeptide
GQAWCLTPGIPALWEAEGPEDTVSQPGLAAGPDRPPSPYTPLLPDSPSGQPPSPTA

SEQ ID NO: 4861 - protein, 56 aa, Artificial Sequence
  Synthetic polypeptide
CCSKCRKPGQQNYLGGCWTSSVSCWPKDRNRHFNYFPEERGVEQRLPCSSVASSSW

SEQ ID NO: 4862 - protein, 56 aa, Artificial Sequence
  Synthetic polypeptide
DVMEQRWALDLGSPAFECRLSHFPVGNPVHDAGIWTSLRVYPGLFLYQNLRGCGLH

SEQ ID NO: 4863 - protein, 56 aa, Artificial Sequence; identical to SEQ ID NO: 4862
  Synthetic polypeptide

SEQ ID NO: 4864 - protein, 56 aa, Artificial Sequence
  Synthetic polypeptide
VAQLVPCTEINNGLECHVEYQQPRLHQVLSEHGPRVGALFLPLGLFPLLLPLSLPT

SEQ ID NO: 4865 - protein, 56 aa, Artificial Sequence; identical to SEQ ID NO: 4864
  Synthetic polypeptide

SEQ ID NO: 4866 - protein, 56 aa, Artificial Sequence; identical to SEQ ID NO: 4864
  Synthetic polypeptide

SEQ ID NO: 4867 - protein, 56 aa, Artificial Sequence; identical to SEQ ID NO: 4864
  Synthetic polypeptide

SEQ ID NO: 4868 - protein, 56 aa, Artificial Sequence; identical to SEQ ID NO: 4864
  Synthetic polypeptide

SEQ ID NO: 4869 - protein, 56 aa, Artificial Sequence; identical to SEQ ID NO: 4864
  Synthetic polypeptide

SEQ ID NO: 4870 - protein, 56 aa, Artificial Sequence
  Synthetic polypeptide
EKGRVGISELIPPPEELLSSHELSEATILELWSLVEHLQHPREYLIRKEAVLSSRH

SEQ ID NO: 4871 - protein, 56 aa, Artificial Sequence; identical to SEQ ID NO: 4870
  Synthetic polypeptide

SEQ ID NO: 4872 - protein, 56 aa, Artificial Sequence; identical to SEQ ID NO: 4870
  Synthetic polypeptide

SEQ ID NO: 4873 - protein, 56 aa, Artificial Sequence; identical to SEQ ID NO: 4870
  Synthetic polypeptide

SEQ ID NO: 4874 - protein, 56 aa, Artificial Sequence; identical to SEQ ID NO: 4870
  Synthetic polypeptide

SEQ ID NO: 4875 - protein, 56 aa, Artificial Sequence
  Synthetic polypeptide
WCRDSDQGTSLGRSIPCPPVLCSVRKIHLRPQVLRPTSPRNISPILNREMHLQPQL

SEQ ID NO: 4876 - protein, 56 aa, Artificial Sequence; identical to SEQ ID NO: 4875
  Synthetic polypeptide

SEQ ID NO: 4877 - protein, 56 aa, Artificial Sequence; identical to SEQ ID NO: 4875
  Synthetic polypeptide

SEQ ID NO: 4878 - protein, 56 aa, Artificial Sequence; identical to SEQ ID NO: 4875
  Synthetic polypeptide

SEQ ID NO: 4879 - protein, 55 aa, Artificial Sequence
  Synthetic polypeptide
EAKNKGEGGRHVCKPQLRHSSAVWSWAIHCSCLSLSFFNGLLSGSHDFQPLCPGH

SEQ ID NO: 4880 - protein, 55 aa, Artificial Sequence
  Synthetic polypeptide
GQAQLLTPLIPALWGAEEAATRKQRITETESPYQELQGQRSDVYSDLNTQRPYYK

SEQ ID NO: 4881 - protein, 55 aa, Artificial Sequence; identical to SEQ ID NO: 4880
  Synthetic polypeptide

SEQ ID NO: 4882 - protein, 55 aa, Artificial Sequence; identical to SEQ ID NO: 4880
  Synthetic polypeptide

SEQ ID NO: 4883 - protein, 55 aa, Artificial Sequence
  Synthetic polypeptide
PGVVVHTCNPSTEEAETVCQAHVLLGRFSFSPRHRCCLPSTELSSGMSKLIRASV

SEQ ID NO: 4884 - protein, 55 aa, Artificial Sequence; identical to SEQ ID NO: 4883
  Synthetic polypeptide

SEQ ID NO: 4885 - protein, 55 aa, Artificial Sequence
  Synthetic polypeptide
SSKRTPSSRWHRTASLWLPVRRTHLSYAWTPYPWTLWLWKIQNRSTIFYIQSLWI

SEQ ID NO: 4886 - protein, 55 aa, Artificial Sequence; identical to SEQ ID NO: 4885
  Synthetic polypeptide

SEQ ID NO: 4887 - protein, 55 aa, Artificial Sequence; identical to SEQ ID NO: 4885
  Synthetic polypeptide

SEQ ID NO: 4888 - protein, 55 aa, Artificial Sequence; identical to SEQ ID NO: 4885
  Synthetic polypeptide

SEQ ID NO: 4889 - protein, 55 aa, Artificial Sequence; identical to SEQ ID NO: 4885
  Synthetic polypeptide

SEQ ID NO: 4890 - protein, 55 aa, Artificial Sequence; identical to SEQ ID NO: 4885
  Synthetic polypeptide

SEQ ID NO: 4891 - protein, 55 aa, Artificial Sequence
  Synthetic polypeptide
GWIWWLKPVTPALWEAKMIILALECWVWCLDLFLTPRSHHPTKGTETGCLKTSAW

SEQ ID NO: 4892 - protein, 55 aa, Artificial Sequence; identical to SEQ ID NO: 4891
  Synthetic polypeptide

SEQ ID NO: 4893 - protein, 55 aa, Artificial Sequence; identical to SEQ ID NO: 4891
  Synthetic polypeptide

SEQ ID NO: 4894 - protein, 55 aa, Artificial Sequence; identical to SEQ ID NO: 4891
  Synthetic polypeptide

SEQ ID NO: 4895 - protein, 55 aa, Artificial Sequence; identical to SEQ ID NO: 4891
  Synthetic polypeptide

SEQ ID NO: 4896 - protein, 55 aa, Artificial Sequence; identical to SEQ ID NO: 4891
  Synthetic polypeptide

SEQ ID NO: 4897 - protein, 55 aa, Artificial Sequence; identical to SEQ ID NO: 4891
  Synthetic polypeptide

SEQ ID NO: 4898 - protein, 55 aa, Artificial Sequence; identical to SEQ ID NO: 4891
  Synthetic polypeptide

SEQ ID NO: 4899 - protein, 55 aa, Artificial Sequence; identical to SEQ ID NO: 4891
  Synthetic polypeptide

SEQ ID NO: 4900 - protein, 55 aa, Artificial Sequence
  Synthetic polypeptide
LPTKGSWCSRSSSSWEPRPWPSWCSCLCSMAGTSCSSVPWSPREHGSPLGLPGDS

SEQ ID NO: 4901 - protein, 55 aa, Artificial Sequence
  Synthetic polypeptide
ARSRRRSGTQLRPGSNPGTAPLALESLGRTSTLSRTRIRSTPSCPSYSPWWSSRS

SEQ ID NO: 4902 - protein, 55 aa, Artificial Sequence
  Synthetic polypeptide
GRWITKSGDEDQPGQHGLLVQQIIFFLGTTALAFLVLMPVLHGRNLLLFRSLESS

SEQ ID NO: 4903 - protein, 55 aa, Artificial Sequence
  Synthetic polypeptide
SFYTAKETINRVNRKPTEWEKILANYASDKGLISSIHKRGVEQRLPCSSVASSSW

SEQ ID NO: 4904 - protein, 55 aa, Artificial Sequence
  Synthetic polypeptide
QCGAVVMSRDSGARVPGFSSCFCSVVAGWPWTSRLTSPCLSSKCCVLCNLPDPGL

SEQ ID NO: 4905 - protein, 55 aa, Artificial Sequence
  Synthetic polypeptide
FLHFHLRNDDRHNRNNGEHFCRERWLYHLTMSPLLHHGTSDPGQLGAAGPASGHL

SEQ ID NO: 4906 - protein, 55 aa, Artificial Sequence; identical to SEQ ID NO: 4905
  Synthetic polypeptide

SEQ ID NO: 4907 - protein, 55 aa, Artificial Sequence; identical to SEQ ID NO: 4905
  Synthetic polypeptide

SEQ ID NO: 4908 - protein, 55 aa, Artificial Sequence
  Synthetic polypeptide
LCGSTYMGIFFCLCHPEKARPTPPLPSSQPPQHEDNENEDLYDDPVSLNSWRAVV

SEQ ID NO: 4909 - protein, 55 aa, Artificial Sequence; identical to SEQ ID NO: 4908
  Synthetic polypeptide

SEQ ID NO: 4910 - protein, 55 aa, Artificial Sequence; identical to SEQ ID NO: 4908
  Synthetic polypeptide

SEQ ID NO: 4911 - protein, 55 aa, Artificial Sequence
  Synthetic polypeptide
TSGSAWRFYATNLSRTDLHSTWQYYERTVTVPMYRYRRRAPATKQLFHFLFSICS

SEQ ID NO: 4912 - protein, 55 aa, Artificial Sequence
  Synthetic polypeptide
KYKKLVRTKYFGQISSTKPFSVPTASQVPMSTCWLKTYCPQRIWFSSTTSPSQEE

SEQ ID NO: 4913 - protein, 55 aa, Artificial Sequence; identical to SEQ ID NO: 4912
  Synthetic polypeptide

SEQ ID NO: 4914 - protein, 55 aa, Artificial Sequence; identical to SEQ ID NO: 4912
  Synthetic polypeptide

SEQ ID NO: 4915 - protein, 55 aa, Artificial Sequence; identical to SEQ ID NO: 4912
  Synthetic polypeptide

SEQ ID NO: 4916 - protein, 55 aa, Artificial Sequence; identical to SEQ ID NO: 4912
  Synthetic polypeptide

SEQ ID NO: 4917 - protein, 55 aa, Artificial Sequence; identical to SEQ ID NO: 4912
  Synthetic polypeptide

SEQ ID NO: 4918 - protein, 55 aa, Artificial Sequence
  Synthetic polypeptide
KYKNISQAWWYTSVVPATQEPEVFLWTQGKVLFLKMRSLLYLVLPEPITVEPWFC

SEQ ID NO: 4919 - protein, 55 aa, Artificial Sequence; identical to SEQ ID NO: 4918
  Synthetic polypeptide

SEQ ID NO: 4920 - protein, 55 aa, Artificial Sequence; identical to SEQ ID NO: 4918
  Synthetic polypeptide

SEQ ID NO: 4921 - protein, 55 aa, Artificial Sequence; identical to SEQ ID NO: 4918
  Synthetic polypeptide

SEQ ID NO: 4922 - protein, 55 aa, Artificial Sequence; identical to SEQ ID NO: 4918
  Synthetic polypeptide

SEQ ID NO: 4923 - protein, 55 aa, Artificial Sequence; identical to SEQ ID NO: 4918
  Synthetic polypeptide

SEQ ID NO: 4924 - protein, 55 aa, Artificial Sequence; identical to SEQ ID NO: 4918
  Synthetic polypeptide

SEQ ID NO: 4925 - protein, 55 aa, Artificial Sequence; identical to SEQ ID NO: 4918
  Synthetic polypeptide

SEQ ID NO: 4926 - protein, 55 aa, Artificial Sequence; identical to SEQ ID NO: 4918
  Synthetic polypeptide

SEQ ID NO: 4927 - protein, 54 aa, Artificial Sequence
  Synthetic polypeptide
PGAVAHACNPSTLGGPVGLSGCGGPGRHLQPHCDGPNGFPGCREGPRTKESGGA

SEQ ID NO: 4928 - protein, 54 aa, Artificial Sequence
  Synthetic polypeptide
SASPKTKLPSWLHFGFVKSSDFFSPEPRPCLHRLSDHLSVRRAPPSHPAPKGRP

SEQ ID NO: 4929 - protein, 54 aa, Artificial Sequence
  Synthetic polypeptide
GQAQLLTPLIPALWGAEEATRKQRITETESPYQELQGQRSDVYSDLNTQRPYYK

SEQ ID NO: 4930 - protein, 54 aa, Artificial Sequence; identical to SEQ ID NO: 4929
  Synthetic polypeptide

SEQ ID NO: 4931 - protein, 54 aa, Artificial Sequence; identical to SEQ ID NO: 4929
  Synthetic polypeptide

SEQ ID NO: 4932 - protein, 54 aa, Artificial Sequence; identical to SEQ ID NO: 4929
  Synthetic polypeptide

SEQ ID NO: 4933 - protein, 54 aa, Artificial Sequence; identical to SEQ ID NO: 4929
  Synthetic polypeptide

SEQ ID NO: 4934 - protein, 54 aa, Artificial Sequence
  Synthetic polypeptide
HPVEHWRMRVSRGDTSHSHSVPDATWTQNSGEPTTCGSSARLQMSIRLDDSPQD

SEQ ID NO: 4935 - protein, 54 aa, Artificial Sequence
  Synthetic polypeptide
TSAPPFISSVVLGNSLFLPELELFQWSPLWESRLSASVPWALTASTWPPAPCPR

SEQ ID NO: 4936 - protein, 54 aa, Artificial Sequence
  Synthetic polypeptide
LKKPIKPLEKLASYFVYTVRVQGFWPVGTSSALESLSRQRECWRMLVLWALLSS

SEQ ID NO: 4937 - protein, 54 aa, Artificial Sequence
  Synthetic polypeptide
RPAWATQEHHDRVLHVRADAGVRRGLLHLQPHPRRSRQLPARLHRQWFHPRRPL

SEQ ID NO: 4938 - protein, 54 aa, Artificial Sequence; identical to SEQ ID NO: 4937
  Synthetic polypeptide

SEQ ID NO: 4939 - protein, 54 aa, Artificial Sequence; identical to SEQ ID NO: 4937
  Synthetic polypeptide

SEQ ID NO: 4940 - protein, 54 aa, Artificial Sequence
  Synthetic polypeptide
CLKCTVRGSCLDFGCLLQCSSTSTTRMGHVCVRDSVFLFAPLSGHVPLWHGGSN

SEQ ID NO: 4941 - protein, 54 aa, Artificial Sequence
  Synthetic polypeptide
SQHFGRLSPWYVSPFPGAGSCSGRTLWRQRASLSSPPPWTPRTSSRSPSSWSSQ

SEQ ID NO: 4942 - protein, 54 aa, Artificial Sequence; identical to SEQ ID NO: 4941
  Synthetic polypeptide

SEQ ID NO: 4943 - protein, 54 aa, Artificial Sequence; identical to SEQ ID NO: 4941
  Synthetic polypeptide

SEQ ID NO: 4944 - protein, 54 aa, Artificial Sequence; identical to SEQ ID NO: 4941
  Synthetic polypeptide

SEQ ID NO: 4945 - protein, 54 aa, Artificial Sequence; identical to SEQ ID NO: 4941
  Synthetic polypeptide

SEQ ID NO: 4946 - protein, 54 aa, Artificial Sequence
  Synthetic polypeptide
SEPLGTTGPGSELSLIPGDPRHCRPPVRVRVRPGRVRTAHRSCPPRRSTCQWEW

SEQ ID NO: 4947 - protein, 54 aa, Artificial Sequence; identical to SEQ ID NO: 4946
  Synthetic polypeptide

SEQ ID NO: 4948 - protein, 54 aa, Artificial Sequence
  Synthetic polypeptide
TMAKSLPSLDLSFSSCKMAVCAGTTLLEVGTAAATHSPVLPGGLCPLRGLHPRV

SEQ ID NO: 4949 - protein, 54 aa, Artificial Sequence; identical to SEQ ID NO: 4948
  Synthetic polypeptide

SEQ ID NO: 4950 - protein, 54 aa, Artificial Sequence; identical to SEQ ID NO: 4948
  Synthetic polypeptide

SEQ ID NO: 4951 - protein, 54 aa, Artificial Sequence; identical to SEQ ID NO: 4948
  Synthetic polypeptide

SEQ ID NO: 4952 - protein, 54 aa, Artificial Sequence
  Synthetic polypeptide
SSFPNPSSFKVPVSVLAQRHTSQTAGWPPCTFIRRFSLTLEAVTLPWQEPRTPT

SEQ ID NO: 4953 - protein, 54 aa, Artificial Sequence; identical to SEQ ID NO: 4952
  Synthetic polypeptide

SEQ ID NO: 4954 - protein, 54 aa, Artificial Sequence; identical to SEQ ID NO: 4952
  Synthetic polypeptide

SEQ ID NO: 4955 - protein, 54 aa, Artificial Sequence
  Synthetic polypeptide
GRPGPASGIQDSQSGLRAGLPRPDDCCLGPGSAGHFTAADCSSLHPDGPGARCG

SEQ ID NO: 4956 - protein, 54 aa, Artificial Sequence; identical to SEQ ID NO: 4955
  Synthetic polypeptide

SEQ ID NO: 4957 - protein, 54 aa, Artificial Sequence; identical to SEQ ID NO: 4955
  Synthetic polypeptide

SEQ ID NO: 4958 - protein, 54 aa, Artificial Sequence
  Synthetic polypeptide
GRINTNPSQTLSKNTAGGWEPEPHTCRAAGAGHRQLPGLVRAGQLLPHVLRPPR

SEQ ID NO: 4959 - protein, 54 aa, Artificial Sequence; identical to SEQ ID NO: 4958
  Synthetic polypeptide

SEQ ID NO: 4960 - protein, 54 aa, Artificial Sequence; identical to SEQ ID NO: 4958
  Synthetic polypeptide

SEQ ID NO: 4961 - protein, 54 aa, Artificial Sequence
  Synthetic polypeptide
SVDFGTRLPEFSSGSCTSCLCGCGTCASTPVACPSTCGRRSLSPSISPSTSLTS

SEQ ID NO: 4962 - protein, 54 aa, Artificial Sequence; identical to SEQ ID NO: 4961
  Synthetic polypeptide

SEQ ID NO: 4963 - protein, 54 aa, Artificial Sequence; identical to SEQ ID NO: 4961
  Synthetic polypeptide

SEQ ID NO: 4964 - protein, 54 aa, Artificial Sequence; identical to SEQ ID NO: 4961
  Synthetic polypeptide

SEQ ID NO: 4965 - protein, 54 aa, Artificial Sequence; identical to SEQ ID NO: 4961
  Synthetic polypeptide

SEQ ID NO: 4966 - protein, 54 aa, Artificial Sequence; identical to SEQ ID NO: 4961
  Synthetic polypeptide

SEQ ID NO: 4967 - protein, 54 aa, Artificial Sequence; identical to SEQ ID NO: 4961
  Synthetic polypeptide

SEQ ID NO: 4968 - protein, 54 aa, Artificial Sequence
  Synthetic polypeptide
RETSTDAVCLHIPSPSGALSLWRYRTGSDLSRNPPAENLQQNPRDQQQWIRGGV

SEQ ID NO: 4969 - protein, 54 aa, Artificial Sequence; identical to SEQ ID NO: 4968
  Synthetic polypeptide

SEQ ID NO: 4970 - protein, 54 aa, Artificial Sequence; identical to SEQ ID NO: 4968
  Synthetic polypeptide

SEQ ID NO: 4971 - protein, 54 aa, Artificial Sequence; identical to SEQ ID NO: 4968
  Synthetic polypeptide

SEQ ID NO: 4972 - protein, 54 aa, Artificial Sequence; identical to SEQ ID NO: 4968
  Synthetic polypeptide

SEQ ID NO: 4973 - protein, 54 aa, Artificial Sequence; identical to SEQ ID NO: 4968
  Synthetic polypeptide

SEQ ID NO: 4974 - protein, 54 aa, Artificial Sequence; identical to SEQ ID NO: 4968
  Synthetic polypeptide

SEQ ID NO: 4975 - protein, 54 aa, Artificial Sequence
  Synthetic polypeptide
AQKFETSLDNMCCPRHRSISAEAISGVPGGSTAEASPQKRNGHTTGRKLVVLDV

SEQ ID NO: 4976 - protein, 54 aa, Artificial Sequence; identical to SEQ ID NO: 4975
  Synthetic polypeptide

SEQ ID NO: 4977 - protein, 54 aa, Artificial Sequence; identical to SEQ ID NO: 4975
  Synthetic polypeptide

SEQ ID NO: 4978 - protein, 54 aa, Artificial Sequence; identical to SEQ ID NO: 4975
  Synthetic polypeptide

SEQ ID NO: 4979 - protein, 54 aa, Artificial Sequence; identical to SEQ ID NO: 4975
  Synthetic polypeptide

SEQ ID NO: 4980 - protein, 54 aa, Artificial Sequence; identical to SEQ ID NO: 4975
  Synthetic polypeptide

SEQ ID NO: 4981 - protein, 54 aa, Artificial Sequence
  Synthetic polypeptide
AGRGGSCLYSHHFGRLRRVDHLRSRVRDQPGQHSATSSLLKIQKLARRVSPSNA

SEQ ID NO: 4982 - protein, 54 aa, Artificial Sequence; identical to SEQ ID NO: 4981
  Synthetic polypeptide

SEQ ID NO: 4983 - protein, 54 aa, Artificial Sequence; identical to SEQ ID NO: 4981
  Synthetic polypeptide

SEQ ID NO: 4984 - protein, 54 aa, Artificial Sequence; identical to SEQ ID NO: 4981
  Synthetic polypeptide

SEQ ID NO: 4985 - protein, 54 aa, Artificial Sequence; identical to SEQ ID NO: 4981
  Synthetic polypeptide

SEQ ID NO: 4986 - protein, 54 aa, Artificial Sequence; identical to SEQ ID NO: 4981
  Synthetic polypeptide

SEQ ID NO: 4987 - protein, 54 aa, Artificial Sequence; identical to SEQ ID NO: 4981
  Synthetic polypeptide

SEQ ID NO: 4988 - protein, 54 aa, Artificial Sequence
  Synthetic polypeptide
GASLPCRPSSEMWGAPLPCRPVRDVRSVSARTPRLRSEETLCLATAPSENALRS

SEQ ID NO: 4989 - protein, 54 aa, Artificial Sequence; identical to SEQ ID NO: 4988
  Synthetic polypeptide

SEQ ID NO: 4990 - protein, 54 aa, Artificial Sequence; identical to SEQ ID NO: 4988
  Synthetic polypeptide

SEQ ID NO: 4991 - protein, 54 aa, Artificial Sequence; identical to SEQ ID NO: 4988
  Synthetic polypeptide

SEQ ID NO: 4992 - protein, 54 aa, Artificial Sequence
  Synthetic polypeptide
GASLPGRPSSEMWGAPLPRLPIWDVRSASARPQPRLGGSQQTCRTWLPGPTHHL

SEQ ID NO: 4993 - protein, 54 aa, Artificial Sequence; identical to SEQ ID NO: 4992
  Synthetic polypeptide

SEQ ID NO: 4994 - protein, 54 aa, Artificial Sequence
  Synthetic polypeptide
QGPTRPPGVQETGARQPYPVKNCVASPPTMRCSRRSTRWLCWGRPTTLLPRRPP

SEQ ID NO: 4995 - protein, 54 aa, Artificial Sequence
  Synthetic polypeptide
VPCPSPRHQALSSRELLPMSGGCGAREERGWGCHHVHPQFRGGDGEGHGGVPGS

SEQ ID NO: 4996 - protein, 54 aa, Artificial Sequence; identical to SEQ ID NO: 4995
  Synthetic polypeptide

SEQ ID NO: 4997 - protein, 54 aa, Artificial Sequence; identical to SEQ ID NO: 4995
  Synthetic polypeptide

SEQ ID NO: 4998 - protein, 54 aa, Artificial Sequence
  Synthetic polypeptide
ARNTWDARRNLAIGIGIQNFPEGLAVSLPLRGAGFSTWRAFWYGQLSGMVEPLA

SEQ ID NO: 4999 - protein, 54 aa, Artificial Sequence
  Synthetic polypeptide
EAEAADHEVRRSRPFWEPRMCEFKCYPRCEASSGAPWSCRATCCHLFLDCTSPW

SEQ ID NO: 5000 - protein, 54 aa, Artificial Sequence; identical to SEQ ID NO: 4999
  Synthetic polypeptide

SEQ ID NO: 5001 - protein, 54 aa, Artificial Sequence
  Synthetic polypeptide
VLMRSGGFYKCFNSSSLAPFSLLLPSEKGACFLFTFCHDSRTPGFKVYTCICHT

SEQ ID NO: 5002 - protein, 54 aa, Artificial Sequence; identical to SEQ ID NO: 5001
  Synthetic polypeptide

SEQ ID NO: 5003 - protein, 54 aa, Artificial Sequence; identical to SEQ ID NO: 5001
  Synthetic polypeptide

SEQ ID NO: 5004 - protein, 54 aa, Artificial Sequence; identical to SEQ ID NO: 5001
  Synthetic polypeptide

SEQ ID NO: 5005 - protein, 54 aa, Artificial Sequence; identical to SEQ ID NO: 5001
  Synthetic polypeptide

SEQ ID NO: 5006 - protein, 53 aa, Artificial Sequence
  Synthetic polypeptide
SNTENTVWPVTVAKLDCLLQFLLQGIPPSNEEYSVMMSPSSTLTKKTPYLMRY

SEQ ID NO: 5007 - protein, 53 aa, Artificial Sequence; identical to SEQ ID NO: 5006
  Synthetic polypeptide

SEQ ID NO: 5008 - protein, 53 aa, Artificial Sequence
  Synthetic polypeptide
GCFEGHMKHWEHHRLWNLCLAKGSAGECWFCGPCSHRLDCDGLHHSCGSPLLC

SEQ ID NO: 5009 - protein, 53 aa, Artificial Sequence; identical to SEQ ID NO: 5008
  Synthetic polypeptide

SEQ ID NO: 5010 - protein, 53 aa, Artificial Sequence; identical to SEQ ID NO: 5008
  Synthetic polypeptide

SEQ ID NO: 5011 - protein, 53 aa, Artificial Sequence
  Synthetic polypeptide
SWVTPVGLEILRHQPLAHRPALHVAVLRANGHRAHVQTYPPAEPAGAAEEPQE

SEQ ID NO: 5012 - protein, 53 aa, Artificial Sequence; identical to SEQ ID NO: 5011
  Synthetic polypeptide

SEQ ID NO: 5013 - protein, 53 aa, Artificial Sequence; identical to SEQ ID NO: 5011
  Synthetic polypeptide

SEQ ID NO: 5014 - protein, 53 aa, Artificial Sequence
  Synthetic polypeptide
EANKALGKTGLIFCVHSPCTGFLACGNIIGSGIFVSPKGVLENAGSVGLALIV

SEQ ID NO: 5015 - protein, 53 aa, Artificial Sequence
  Synthetic polypeptide
VCAPPRRAHRALVLRRASTFDAVRGPPRRCPRVRASACRGDGDFCRSSGRMCL

SEQ ID NO: 5016 - protein, 53 aa, Artificial Sequence
  Synthetic polypeptide
LSYIKHGQMLKARGRLCSSAQLQQDPRRELRLTQMPQCTDNSWLRWKEGWQRH

SEQ ID NO: 5017 - protein, 53 aa, Artificial Sequence; identical to SEQ ID NO: 5016
  Synthetic polypeptide

SEQ ID NO: 5018 - protein, 53 aa, Artificial Sequence; identical to SEQ ID NO: 5016
  Synthetic polypeptide

SEQ ID NO: 5019 - protein, 53 aa, Artificial Sequence
  Synthetic polypeptide
EQLRSTAPSVSDAEDGRFLHFHLRKIITIRIFDREEYEKECSFSLVLEEPKWI

SEQ ID NO: 5020 - protein, 53 aa, Artificial Sequence
  Synthetic polypeptide
EDMTTKYNLLSWMGSWNRKRTLAQVLLTNTIWLWTLCLNHSIYQTPILAKSTS

SEQ ID NO: 5021 - protein, 53 aa, Artificial Sequence; identical to SEQ ID NO: 5020
  Synthetic polypeptide

SEQ ID NO: 5022 - protein, 53 aa, Artificial Sequence
  Synthetic polypeptide
SQHFGGQGGWMDSLSPGVQDQPGQHGEPPSLQKFSQACGQIGRQAQPFGEIRL

SEQ ID NO: 5023 - protein, 53 aa, Artificial Sequence; identical to SEQ ID NO: 5022
  Synthetic polypeptide

SEQ ID NO: 5024 - protein, 53 aa, Artificial Sequence; identical to SEQ ID NO: 5022
  Synthetic polypeptide

SEQ ID NO: 5025 - protein, 53 aa, Artificial Sequence; identical to SEQ ID NO: 5022
  Synthetic polypeptide

SEQ ID NO: 5026 - protein, 53 aa, Artificial Sequence; identical to SEQ ID NO: 5022
  Synthetic polypeptide

SEQ ID NO: 5027 - protein, 53 aa, Artificial Sequence; identical to SEQ ID NO: 5022
  Synthetic polypeptide

SEQ ID NO: 5028 - protein, 53 aa, Artificial Sequence
  Synthetic polypeptide
WFKSVWHFPIHSLSLLPSREDVLASPLPFHRNCEFPEASPAMPPVQPVELKLP

SEQ ID NO: 5029 - protein, 53 aa, Artificial Sequence
  Synthetic polypeptide
VLTISDGFIRQFSLLLLALSRLLPCKTRLFPFCHEFKFLEASPAMQNCSYVCC

SEQ ID NO: 5030 - protein, 53 aa, Artificial Sequence; identical to SEQ ID NO: 5029
  Synthetic polypeptide

SEQ ID NO: 5031 - protein, 53 aa, Artificial Sequence; identical to SEQ ID NO: 5029
  Synthetic polypeptide

SEQ ID NO: 5032 - protein, 53 aa, Artificial Sequence; identical to SEQ ID NO: 5029
  Synthetic polypeptide

SEQ ID NO: 5033 - protein, 53 aa, Artificial Sequence; identical to SEQ ID NO: 5029
  Synthetic polypeptide

SEQ ID NO: 5034 - protein, 53 aa, Artificial Sequence; identical to SEQ ID NO: 5029
  Synthetic polypeptide

SEQ ID NO: 5035 - protein, 53 aa, Artificial Sequence; identical to SEQ ID NO: 5029
  Synthetic polypeptide

SEQ ID NO: 5036 - protein, 53 aa, Artificial Sequence; identical to SEQ ID NO: 5029
  Synthetic polypeptide

SEQ ID NO: 5037 - protein, 53 aa, Artificial Sequence; identical to SEQ ID NO: 5029
  Synthetic polypeptide

SEQ ID NO: 5038 - protein, 53 aa, Artificial Sequence
  Synthetic polypeptide
GRARWLTPVIPALWEAEAARSQVASPPTMRCSRRSTRWLCWGRPTTLLPRRPP

SEQ ID NO: 5039 - protein, 53 aa, Artificial Sequence
  Synthetic polypeptide
VQRVTFWGTTQSSTSCGRQGWRWTTHPPGRPYTALPPRAQRPLLRGPRRARPQ

SEQ ID NO: 5040 - protein, 53 aa, Artificial Sequence
  Synthetic polypeptide
GQPSALALASVSMATVRPVMGCPSSALRCCTPTTHSAPLTTWCWRRWRGWARR

SEQ ID NO: 5041 - protein, 53 aa, Artificial Sequence; identical to SEQ ID NO: 5040
  Synthetic polypeptide

SEQ ID NO: 5042 - protein, 53 aa, Artificial Sequence; identical to SEQ ID NO: 5040
  Synthetic polypeptide

SEQ ID NO: 5043 - protein, 53 aa, Artificial Sequence; identical to SEQ ID NO: 5040
  Synthetic polypeptide

SEQ ID NO: 5044 - protein, 53 aa, Artificial Sequence; identical to SEQ ID NO: 5040
  Synthetic polypeptide

SEQ ID NO: 5045 - protein, 53 aa, Artificial Sequence; identical to SEQ ID NO: 5040
  Synthetic polypeptide

SEQ ID NO: 5046 - protein, 53 aa, Artificial Sequence
  Synthetic polypeptide
LYCCSLVAIICPDFLHQLPSWMSAPSCCLCWPSSVKKLYHNVLYVEDFIFLSL

SEQ ID NO: 5047 - protein, 53 aa, Artificial Sequence
  Synthetic polypeptide
GQEFKATRCTWELETPTHLASLPSIKPSSLQLHHQAFPASQPSPSVQTLPPAC

SEQ ID NO: 5048 - protein, 53 aa, Artificial Sequence; identical to SEQ ID NO: 5047
  Synthetic polypeptide

SEQ ID NO: 5049 - protein, 53 aa, Artificial Sequence; identical to SEQ ID NO: 5047
  Synthetic polypeptide

SEQ ID NO: 5050 - protein, 53 aa, Artificial Sequence
  Synthetic polypeptide
SQHFGMPRTICTLWGRLEQLKSKKMHGLEKQRPREMLGSGKLKPSRKRCLLST

SEQ ID NO: 5051 - protein, 53 aa, Artificial Sequence; identical to SEQ ID NO: 5050
  Synthetic polypeptide

SEQ ID NO: 5052 - protein, 53 aa, Artificial Sequence; identical to SEQ ID NO: 5050
  Synthetic polypeptide

SEQ ID NO: 5053 - protein, 53 aa, Artificial Sequence; identical to SEQ ID NO: 5050
  Synthetic polypeptide

SEQ ID NO: 5054 - protein, 53 aa, Artificial Sequence; identical to SEQ ID NO: 5050
  Synthetic polypeptide

SEQ ID NO: 5055 - protein, 53 aa, Artificial Sequence; identical to SEQ ID NO: 5050
  Synthetic polypeptide

SEQ ID NO: 5056 - protein, 53 aa, Artificial Sequence; identical to SEQ ID NO: 5050
  Synthetic polypeptide

SEQ ID NO: 5057 - protein, 53 aa, Artificial Sequence
  Synthetic polypeptide
DVRWRESFPVCIGSRGYLCWLHGIDYQPSLCVFLAGTDDAPNSHPEEPRGSCY

SEQ ID NO: 5058 - protein, 53 aa, Artificial Sequence; identical to SEQ ID NO: 5057
  Synthetic polypeptide

SEQ ID NO: 5059 - protein, 53 aa, Artificial Sequence
  Synthetic polypeptide
RAYGNSLYLCNSFASLNLFPVLCLAQTIHTQEVDAEILLCFPPRRSAQTLHLG

SEQ ID NO: 5060 - protein, 53 aa, Artificial Sequence; identical to SEQ ID NO: 5059
  Synthetic polypeptide

SEQ ID NO: 5061 - protein, 53 aa, Artificial Sequence
  Synthetic polypeptide
CLKSVRGSCLDFGCLLQCSSTSTTRMGHVCVRDSVFLFAPLSGHVPLWHGGSN

SEQ ID NO: 5062 - protein, 53 aa, Artificial Sequence
  Synthetic polypeptide
SQHFGRPRLEDYLRPGVPDQPGQHREAQSLQKSRKISQNILEGLPADGGDTRA

SEQ ID NO: 5063 - protein, 52 aa, Artificial Sequence
  Synthetic polypeptide
VLMRSDGLKVCGTSPFTHCLSCRHVKMCLLPLCPSTVIQTSLITCFCEVQEN

SEQ ID NO: 5064 - protein, 52 aa, Artificial Sequence
  Synthetic polypeptide
AANLENLPAFPQEVYIKLPLDPTLPLPGQENTSSLCASQLPARPWWMARSVP

SEQ ID NO: 5065 - protein, 52 aa, Artificial Sequence; identical to SEQ ID NO: 5064
  Synthetic polypeptide

SEQ ID NO: 5066 - protein, 52 aa, Artificial Sequence; identical to SEQ ID NO: 5064
  Synthetic polypeptide

SEQ ID NO: 5067 - protein, 52 aa, Artificial Sequence
  Synthetic polypeptide
AGAAEAGGGRGGGSVGGCCSAPPSAPSTRPASSCAGALLYQTEPTRSGSSSP

SEQ ID NO: 5068 - protein, 52 aa, Artificial Sequence; identical to SEQ ID NO: 5067
  Synthetic polypeptide

SEQ ID NO: 5069 - protein, 52 aa, Artificial Sequence; identical to SEQ ID NO: 5067
  Synthetic polypeptide

SEQ ID NO: 5070 - protein, 52 aa, Artificial Sequence; identical to SEQ ID NO: 5067
  Synthetic polypeptide

SEQ ID NO: 5071 - protein, 52 aa, Artificial Sequence
  Synthetic polypeptide
EAEAGGSLEPNSLSEARGLAVPWPQSWPWPSAACVPCLRILPKARVGDVDAG

SEQ ID NO: 5072 - protein, 52 aa, Artificial Sequence
  Synthetic polypeptide
REQWLTPVIPALWGAEAGGSLEVRSLRPAWPTWRVPGTWLEWRRAHHALYYR

SEQ ID NO: 5073 - protein, 52 aa, Artificial Sequence; identical to SEQ ID NO: 5072
  Synthetic polypeptide

SEQ ID NO: 5074 - protein, 52 aa, Artificial Sequence
  Synthetic polypeptide
EGTFVKSEHFKTTSQKVARKFWWKNVKMIVLICVIVFIIILFIVLFATGAFS

SEQ ID NO: 5075 - protein, 52 aa, Artificial Sequence; identical to SEQ ID NO: 5074
  Synthetic polypeptide

SEQ ID NO: 5076 - protein, 52 aa, Artificial Sequence
  Synthetic polypeptide
GRARWLTPVIPALWEADAGGSRGQEIKTILANMTLLSNSSETGTASGLVFIL

SEQ ID NO: 5077 - protein, 52 aa, Artificial Sequence
  Synthetic polypeptide
ICFVIPGGHIAGSLAVVTDAAHLLIDLTSFLLSLFSLWLSSKPPSKRLTFGW

SEQ ID NO: 5078 - protein, 52 aa, Artificial Sequence
  Synthetic polypeptide
PGRKPSLDTKSWRLDHGLPSIQNYEKEFCPTSLPSPISAALTQFGSSLWWEE

SEQ ID NO: 5079 - protein, 52 aa, Artificial Sequence; identical to SEQ ID NO: 5078
  Synthetic polypeptide

SEQ ID NO: 5080 - protein, 52 aa, Artificial Sequence; identical to SEQ ID NO: 5078
  Synthetic polypeptide

SEQ ID NO: 5081 - protein, 52 aa, Artificial Sequence
  Synthetic polypeptide
EVRSLSARQPPRLGSEERLCPAATPSGREVGGVSPPPGQPPRPGESWRSGMA

SEQ ID NO: 5082 - protein, 52 aa, Artificial Sequence
  Synthetic polypeptide
LNTTTSLRGGLERQWRGEIFSLETPSVWLPQRKQTVQDLEVLQCHLLIFWIN

SEQ ID NO: 5083 - protein, 52 aa, Artificial Sequence; identical to SEQ ID NO: 5082
  Synthetic polypeptide

SEQ ID NO: 5084 - protein, 52 aa, Artificial Sequence
  Synthetic polypeptide
NPSTLGGQASPSPSPKVLWWPWWARWAAESRPCSQPSWLRWTKWRGTWLSRA

SEQ ID NO: 5085 - protein, 52 aa, Artificial Sequence
  Synthetic polypeptide
EARKPSAWQPPRLRSEQRSDYNRGSTPTFYYSKCRFDCDPKGWNAGGERSTC

SEQ ID NO: 5086 - protein, 52 aa, Artificial Sequence; identical to SEQ ID NO: 5085
  Synthetic polypeptide

SEQ ID NO: 5087 - protein, 52 aa, Artificial Sequence
  Synthetic polypeptide
SWRHIKLCMQVRPRALPSCCHPRVDPSTGPWACPPTMATTATRCLSSTAPRQ

SEQ ID NO: 5088 - protein, 52 aa, Artificial Sequence; identical to SEQ ID NO: 5087
  Synthetic polypeptide

SEQ ID NO: 5089 - protein, 52 aa, Artificial Sequence; identical to SEQ ID NO: 5087
  Synthetic polypeptide

SEQ ID NO: 5090 - protein, 52 aa, Artificial Sequence; identical to SEQ ID NO: 5087
  Synthetic polypeptide

SEQ ID NO: 5091 - protein, 52 aa, Artificial Sequence
  Synthetic polypeptide
EQPGQHDEIPSLLKIQKISWTWWQPAQASQKMTLRLQVWKAALPCQVPKMMW

SEQ ID NO: 5092 - protein, 52 aa, Artificial Sequence; identical to SEQ ID NO: 5091
  Synthetic polypeptide

SEQ ID NO: 5093 - protein, 52 aa, Artificial Sequence; identical to SEQ ID NO: 5091
  Synthetic polypeptide

SEQ ID NO: 5094 - protein, 52 aa, Artificial Sequence; identical to SEQ ID NO: 5091
  Synthetic polypeptide

SEQ ID NO: 5095 - protein, 52 aa, Artificial Sequence
  Synthetic polypeptide
RPEFETSLANIVRPCVLKKKKKKRCYYIPRISENWGTLNIRSHISPHSRPCL

SEQ ID NO: 5096 - protein, 52 aa, Artificial Sequence
  Synthetic polypeptide
GVKIQDEPEILGMPEGIWPLESGSRISPRAWLSAFPCEGQASPPGELSGMGS

SEQ ID NO: 5097 - protein, 52 aa, Artificial Sequence; identical to SEQ ID NO: 5096
  Synthetic polypeptide

SEQ ID NO: 5098 - protein, 52 aa, Artificial Sequence; identical to SEQ ID NO: 5096
  Synthetic polypeptide

SEQ ID NO: 5099 - protein, 51 aa, Artificial Sequence
  Synthetic polypeptide
SHSLALALPSSFSTLPLQVVEFDTPSVLLSNDSSRFYAMFAAAENKVAVKG

SEQ ID NO: 5100 - protein, 51 aa, Artificial Sequence; identical to SEQ ID NO: 5099
  Synthetic polypeptide

SEQ ID NO: 5101 - protein, 51 aa, Artificial Sequence
  Synthetic polypeptide
ISLMRIDGFIRGFCFCFLLIFLLPPPCKKCLLPPSMILRPPQPCGTHYGTE

SEQ ID NO: 5102 - protein, 51 aa, Artificial Sequence; identical to SEQ ID NO: 5101
  Synthetic polypeptide

SEQ ID NO: 5103 - protein, 51 aa, Artificial Sequence; identical to SEQ ID NO: 5101
  Synthetic polypeptide

SEQ ID NO: 5104 - protein, 51 aa, Artificial Sequence; identical to SEQ ID NO: 5101
  Synthetic polypeptide

SEQ ID NO: 5105 - protein, 51 aa, Artificial Sequence
  Synthetic polypeptide
VTWGKLLNFLIPKVWAEEKASDQQWQWSCGGQKAKWTQRRGQQVSGNGAFG

SEQ ID NO: 5106 - protein, 51 aa, Artificial Sequence
  Synthetic polypeptide
LAFSGLQLLSTIARGGSVRGSAGHCPLQPAPSLGPLPTQESKRFVQWQSSI

SEQ ID NO: 5107 - protein, 51 aa, Artificial Sequence
  Synthetic polypeptide
GYLQSRSSSSWEPRPWPSWCSCLCSMAGTSCSSVPWSPREHGSPLGLPGDS

SEQ ID NO: 5108 - protein, 51 aa, Artificial Sequence
  Synthetic polypeptide
GRAWWFTPVIPALRRLRLYVRPMSFWGGSASALDIVVAYPQQNFHLGCQSS

SEQ ID NO: 5109 - protein, 51 aa, Artificial Sequence; identical to SEQ ID NO: 5108
  Synthetic polypeptide

SEQ ID NO: 5110 - protein, 51 aa, Artificial Sequence
  Synthetic polypeptide
CLPLPPDDVKPLRKPRIPMETFRKVGIPIIIALLSLASIIIVVVLIKVILD

SEQ ID NO: 5111 - protein, 51 aa, Artificial Sequence
  Synthetic polypeptide
FITRFDGFIMVLLSSHSSLSCQHVKKDMFAYSSSMIVILESFASPRLITAS

SEQ ID NO: 5112 - protein, 51 aa, Artificial Sequence
  Synthetic polypeptide
EALPPRITVRMTWEEPCEALSTVLGTREMEPCNHHDQEASNHQSSSKYFRK

SEQ ID NO: 5113 - protein, 51 aa, Artificial Sequence; identical to SEQ ID NO: 5112
  Synthetic polypeptide

SEQ ID NO: 5114 - protein, 51 aa, Artificial Sequence; identical to SEQ ID NO: 5112
  Synthetic polypeptide

SEQ ID NO: 5115 - protein, 51 aa, Artificial Sequence
  Synthetic polypeptide
VHVLCRDMDEGGNHHSQQTITRTENQTPHVLTHRWELNNENIWTQATEQHA

SEQ ID NO: 5116 - protein, 51 aa, Artificial Sequence; identical to SEQ ID NO: 5115
  Synthetic polypeptide

SEQ ID NO: 5117 - protein, 51 aa, Artificial Sequence; identical to SEQ ID NO: 5115
  Synthetic polypeptide

SEQ ID NO: 5118 - protein, 51 aa, Artificial Sequence; identical to SEQ ID NO: 5115
  Synthetic polypeptide

SEQ ID NO: 5119 - protein, 51 aa, Artificial Sequence; identical to SEQ ID NO: 5115
  Synthetic polypeptide

SEQ ID NO: 5120 - protein, 51 aa, Artificial Sequence
  Synthetic polypeptide
AQKSKTSLGDMGSALLPHQHTTRPVPRLPGLAVNPCAAAPGHAGEAPPALA

SEQ ID NO: 5121 - protein, 51 aa, Artificial Sequence; identical to SEQ ID NO: 5120
  Synthetic polypeptide

SEQ ID NO: 5122 - protein, 51 aa, Artificial Sequence; identical to SEQ ID NO: 5120
  Synthetic polypeptide

SEQ ID NO: 5123 - protein, 51 aa, Artificial Sequence; identical to SEQ ID NO: 5120
  Synthetic polypeptide

SEQ ID NO: 5124 - protein, 51 aa, Artificial Sequence; identical to SEQ ID NO: 5120
  Synthetic polypeptide

SEQ ID NO: 5125 - protein, 51 aa, Artificial Sequence; identical to SEQ ID NO: 5120
  Synthetic polypeptide

SEQ ID NO: 5126 - protein, 51 aa, Artificial Sequence; identical to SEQ ID NO: 5120
  Synthetic polypeptide

SEQ ID NO: 5127 - protein, 51 aa, Artificial Sequence; identical to SEQ ID NO: 5120
  Synthetic polypeptide

SEQ ID NO: 5128 - protein, 51 aa, Artificial Sequence; identical to SEQ ID NO: 5120
  Synthetic polypeptide

SEQ ID NO: 5129 - protein, 51 aa, Artificial Sequence; identical to SEQ ID NO: 5120
  Synthetic polypeptide

SEQ ID NO: 5130 - protein, 51 aa, Artificial Sequence; identical to SEQ ID NO: 5120
  Synthetic polypeptide

SEQ ID NO: 5131 - protein, 51 aa, Artificial Sequence
  Synthetic polypeptide
FRSNWGCHLHHSSNVQKLEQASMGPPQRALTRATSRIAEWLWPHRALVRWR

SEQ ID NO: 5132 - protein, 51 aa, Artificial Sequence; identical to SEQ ID NO: 5131
  Synthetic polypeptide

SEQ ID NO: 5133 - protein, 51 aa, Artificial Sequence; identical to SEQ ID NO: 5131
  Synthetic polypeptide

SEQ ID NO: 5134 - protein, 51 aa, Artificial Sequence
  Synthetic polypeptide
RDQHSVALRTNPAFFRFCVSGAWTTPSPTMSPCTCPCCWFSWRTPSCSKRQ

SEQ ID NO: 5135 - protein, 51 aa, Artificial Sequence; identical to SEQ ID NO: 5134
  Synthetic polypeptide

SEQ ID NO: 5136 - protein, 51 aa, Artificial Sequence; identical to SEQ ID NO: 5134
  Synthetic polypeptide

SEQ ID NO: 5137 - protein, 51 aa, Artificial Sequence; identical to SEQ ID NO: 5134
  Synthetic polypeptide

SEQ ID NO: 5138 - protein, 51 aa, Artificial Sequence
  Synthetic polypeptide
CQHFERPRREDHEPVMDDQRDLISNNEQLPMLGRRPGAPESPCRMPPSMAT

SEQ ID NO: 5139 - protein, 51 aa, Artificial Sequence
  Synthetic polypeptide
SMNIRGTWMKGIWELSVPLQLFCKFKFIPSALPGPDHPHAGGRSAQTLHLG

SEQ ID NO: 5140 - protein, 51 aa, Artificial Sequence; identical to SEQ ID NO: 5139
  Synthetic polypeptide

SEQ ID NO: 5141 - protein, 51 aa, Artificial Sequence; identical to SEQ ID NO: 5139
  Synthetic polypeptide

SEQ ID NO: 5142 - protein, 51 aa, Artificial Sequence; identical to SEQ ID NO: 5139
  Synthetic polypeptide

SEQ ID NO: 5143 - protein, 51 aa, Artificial Sequence; identical to SEQ ID NO: 5139
  Synthetic polypeptide

SEQ ID NO: 5144 - protein, 50 aa, Artificial Sequence
  Synthetic polypeptide
EHSLACHSSKAGLPFAILTSRHTPFQRGVFCNDESIKYPYKEDTIPYALL

SEQ ID NO: 5145 - protein, 50 aa, Artificial Sequence
  Synthetic polypeptide
SHLTFSLQNHDHACIACRIIYRSDEHHPPILPPKADLTIGLHGEWVSQRC

SEQ ID NO: 5146 - protein, 50 aa, Artificial Sequence
  Synthetic polypeptide
DVCFITLVWNQTHTVSKFPEMNDMLREKIIKWATDDIKSQLHLLWIYTAR

SEQ ID NO: 5147 - protein, 50 aa, Artificial Sequence
  Synthetic polypeptide
GRARWLTPVIPALWEAETGGSRACCAPTDCNPARGPSPGLWLLLAPGTQP

SEQ ID NO: 5148 - protein, 50 aa, Artificial Sequence; identical to SEQ ID NO: 5147
  Synthetic polypeptide

SEQ ID NO: 5149 - protein, 50 aa, Artificial Sequence; identical to SEQ ID NO: 5147
  Synthetic polypeptide

SEQ ID NO: 5150 - protein, 50 aa, Artificial Sequence
  Synthetic polypeptide
WFETRLNIKPGGTSLLQATNPKSEAGGTGDALPALHSGGLGAQPTQDPLL

SEQ ID NO: 5151 - protein, 50 aa, Artificial Sequence
  Synthetic polypeptide
ENPDLFPSSARHLLYGLGHVNYPPRTWFLLFTIWEMLPDCTLLLRGQYIP

SEQ ID NO: 5152 - protein, 50 aa, Artificial Sequence; identical to SEQ ID NO: 5151
  Synthetic polypeptide

SEQ ID NO: 5153 - protein, 50 aa, Artificial Sequence
  Synthetic polypeptide
VLALHLLCTTLGKSHGGLAWLSDRGGVPLPAGLLPHRHQLPAQQAHGPQE

SEQ ID NO: 5154 - protein, 50 aa, Artificial Sequence
  Synthetic polypeptide
PPLCSKFMFCSLWNSPRLTFLQFHNDSTKCHHEHHHGSHGQQHKPSIPAQ

SEQ ID NO: 5155 - protein, 50 aa, Artificial Sequence; identical to SEQ ID NO: 5154
  Synthetic polypeptide

SEQ ID NO: 5156 - protein, 50 aa, Artificial Sequence; identical to SEQ ID NO: 5154
  Synthetic polypeptide

SEQ ID NO: 5157 - protein, 50 aa, Artificial Sequence; identical to SEQ ID NO: 5154
  Synthetic polypeptide

SEQ ID NO: 5158 - protein, 50 aa, Artificial Sequence; identical to SEQ ID NO: 5154
  Synthetic polypeptide

SEQ ID NO: 5159 - protein, 50 aa, Artificial Sequence
  Synthetic polypeptide
VCAPPRRAHRALVLRRASTFDAVRGPPRRCPRVRASACRGDGDFCRSSGR

SEQ ID NO: 5160 - protein, 50 aa, Artificial Sequence
  Synthetic polypeptide
KRRVFLHKLSLPAAIHVRCDLLLLAFCQDCEASPAMWNSKFQWSCKEVHA

SEQ ID NO: 5161 - protein, 50 aa, Artificial Sequence; identical to SEQ ID NO: 5160
  Synthetic polypeptide

SEQ ID NO: 5162 - protein, 50 aa, Artificial Sequence; identical to SEQ ID NO: 5160
  Synthetic polypeptide

SEQ ID NO: 5163 - protein, 50 aa, Artificial Sequence
  Synthetic polypeptide
GYLQRSSSSWEPRPWPSWCSCLCSMAGTSCSSVPWSPREHGSPLGLPGDS

SEQ ID NO: 5164 - protein, 50 aa, Artificial Sequence
  Synthetic polypeptide
RQWKEPWTNDFEIYYCLHLVKTPKFCPSFNLEIIPSCILMVLLEVHLRNH

SEQ ID NO: 5165 - protein, 50 aa, Artificial Sequence; identical to SEQ ID NO: 5164
  Synthetic polypeptide

SEQ ID NO: 5166 - protein, 50 aa, Artificial Sequence; identical to SEQ ID NO: 5164
  Synthetic polypeptide

SEQ ID NO: 5167 - protein, 50 aa, Artificial Sequence; identical to SEQ ID NO: 5164
  Synthetic polypeptide

SEQ ID NO: 5168 - protein, 50 aa, Artificial Sequence; identical to SEQ ID NO: 5164
  Synthetic polypeptide

SEQ ID NO: 5169 - protein, 50 aa, Artificial Sequence; identical to SEQ ID NO: 5164
  Synthetic polypeptide

SEQ ID NO: 5170 - protein, 50 aa, Artificial Sequence; identical to SEQ ID NO: 5164
  Synthetic polypeptide

SEQ ID NO: 5171 - protein, 50 aa, Artificial Sequence; identical to SEQ ID NO: 5164
  Synthetic polypeptide

SEQ ID NO: 5172 - protein, 50 aa, Artificial Sequence; identical to SEQ ID NO: 5164
  Synthetic polypeptide

SEQ ID NO: 5173 - protein, 50 aa, Artificial Sequence; identical to SEQ ID NO: 5164
  Synthetic polypeptide

SEQ ID NO: 5174 - protein, 50 aa, Artificial Sequence
  Synthetic polypeptide
PGRVVHACNPSTLGCQGLFALFGEGSNSSSPKRCTDWRSRGQERCWDPGS

SEQ ID NO: 5175 - protein, 50 aa, Artificial Sequence; identical to SEQ ID NO: 5174
  Synthetic polypeptide

SEQ ID NO: 5176 - protein, 50 aa, Artificial Sequence; identical to SEQ ID NO: 5174
  Synthetic polypeptide

SEQ ID NO: 5177 - protein, 50 aa, Artificial Sequence; identical to SEQ ID NO: 5174
  Synthetic polypeptide

SEQ ID NO: 5178 - protein, 50 aa, Artificial Sequence; identical to SEQ ID NO: 5174
  Synthetic polypeptide

SEQ ID NO: 5179 - protein, 50 aa, Artificial Sequence; identical to SEQ ID NO: 5174
  Synthetic polypeptide

SEQ ID NO: 5180 - protein, 50 aa, Artificial Sequence; identical to SEQ ID NO: 5174
  Synthetic polypeptide

SEQ ID NO: 5181 - protein, 50 aa, Artificial Sequence
  Synthetic polypeptide
LGARCPHLPSRGGDIHTTAFDGSSKGIRLGQCHSRRSSGLHGREEPGRVP

SEQ ID NO: 5182 - protein, 50 aa, Artificial Sequence
  Synthetic polypeptide
SMNIRGTWMKGIWELSVPLQLFCKFKFIPSALPGPDHPHAGGSAQTLHLG

SEQ ID NO: 5183 - protein, 50 aa, Artificial Sequence; identical to SEQ ID NO: 5182
  Synthetic polypeptide

SEQ ID NO: 5184 - protein, 50 aa, Artificial Sequence; identical to SEQ ID NO: 5182
  Synthetic polypeptide

SEQ ID NO: 5185 - protein, 50 aa, Artificial Sequence
  Synthetic polypeptide
VYVLCRDMDEAGNHRSQQSIPRTKNQTLHVLTHRLWMGTWWCVAMPVCRR

SEQ ID NO: 5186 - protein, 50 aa, Artificial Sequence; identical to SEQ ID NO: 5185
  Synthetic polypeptide

SEQ ID NO: 5187 - protein, 50 aa, Artificial Sequence; identical to SEQ ID NO: 5185
  Synthetic polypeptide

SEQ ID NO: 5188 - protein, 50 aa, Artificial Sequence; identical to SEQ ID NO: 5185
  Synthetic polypeptide

SEQ ID NO: 5189 - protein, 50 aa, Artificial Sequence; identical to SEQ ID NO: 5185
  Synthetic polypeptide

SEQ ID NO: 5190 - protein, 50 aa, Artificial Sequence
  Synthetic polypeptide
LELTQISFNRYSITRSKVFNINDNGTITTSNSLDREISAWYNLSITATEK

SEQ ID NO: 5191 - protein, 49 aa, Artificial Sequence
  Synthetic polypeptide
VTSSGALAHACEQRRYVPFTQRSRCNMDTEFWGTYNVWEFSQTPDEYKA

SEQ ID NO: 5192 - protein, 49 aa, Artificial Sequence
  Synthetic polypeptide
TAEYVCLANPFSVKLLPQPLLLQSACLCSCTKAHFPDCRMAALHLYKKV

SEQ ID NO: 5193 - protein, 49 aa, Artificial Sequence; identical to SEQ ID NO: 5192
  Synthetic polypeptide

SEQ ID NO: 5194 - protein, 49 aa, Artificial Sequence; identical to SEQ ID NO: 5192
  Synthetic polypeptide

SEQ ID NO: 5195 - protein, 49 aa, Artificial Sequence
  Synthetic polypeptide
GAPLPGHRPVWESHGGLAWLSDRGGVPLPAGLLPHRHQLPAQQAHGPQE

SEQ ID NO: 5196 - protein, 49 aa, Artificial Sequence
  Synthetic polypeptide
SPWKNWPHILCTQSVYRVSGLWEHHRLWNLCLAKGSAGECWFCGPCSHR

SEQ ID NO: 5197 - protein, 49 aa, Artificial Sequence
  Synthetic polypeptide
TTSTPPGSSPLRTKLHPSGVLISEEVLAPCVPRRLERELRAGGLQGHGL

SEQ ID NO: 5198 - protein, 49 aa, Artificial Sequence; identical to SEQ ID NO: 5197
  Synthetic polypeptide

SEQ ID NO: 5199 - protein, 49 aa, Artificial Sequence; identical to SEQ ID NO: 5197
  Synthetic polypeptide

SEQ ID NO: 5200 - protein, 49 aa, Artificial Sequence; identical to SEQ ID NO: 5197
  Synthetic polypeptide

SEQ ID NO: 5201 - protein, 49 aa, Artificial Sequence; identical to SEQ ID NO: 5197
  Synthetic polypeptide

SEQ ID NO: 5202 - protein, 49 aa, Artificial Sequence
  Synthetic polypeptide
WCHDSDRGTSLGRSIPCPPALCSVRNIRLRPQVLRPTSPRNISPISNPA

SEQ ID NO: 5203 - protein, 49 aa, Artificial Sequence
  Synthetic polypeptide
PRKEFGHWNRDPEFPRGPGCQPSLARGRLLHLESFLVWAAERHGGAPGR

SEQ ID NO: 5204 - protein, 49 aa, Artificial Sequence
  Synthetic polypeptide
VEGGIMVPKDVHALILRVREPGNVLPDVQKGLRRCDTDSKWFTADIMSI

SEQ ID NO: 5205 - protein, 49 aa, Artificial Sequence
  Synthetic polypeptide
THKEFGHWNRDPEFPRGPGCQPSLARGRLLHLESFLVWAAERHGGAPGR

SEQ ID NO: 5206 - protein, 49 aa, Artificial Sequence
  Synthetic polypeptide
DVGSASALPPRLGCEEHLCPAATLSGRKLHGVMVNLPHNRVQICHQQVH

SEQ ID NO: 5207 - protein, 49 aa, Artificial Sequence; identical to SEQ ID NO: 5206
  Synthetic polypeptide

SEQ ID NO: 5208 - protein, 49 aa, Artificial Sequence
  Synthetic polypeptide
NQSVVTKARKWLLLGTRRERGIKEPFEVNRSFCILVWHTCQNSPATDSR

SEQ ID NO: 5209 - protein, 49 aa, Artificial Sequence; identical to SEQ ID NO: 5208
  Synthetic polypeptide

SEQ ID NO: 5210 - protein, 49 aa, Artificial Sequence; identical to SEQ ID NO: 5208
  Synthetic polypeptide

SEQ ID NO: 5211 - protein, 49 aa, Artificial Sequence
  Synthetic polypeptide
VQEFKTSLGNMVNPHLYKNLAREPKTCLQMSPACGQIGRQAQPFGEIRL

SEQ ID NO: 5212 - protein, 49 aa, Artificial Sequence; identical to SEQ ID NO: 5211
  Synthetic polypeptide

SEQ ID NO: 5213 - protein, 49 aa, Artificial Sequence; identical to SEQ ID NO: 5211
  Synthetic polypeptide

SEQ ID NO: 5214 - protein, 49 aa, Artificial Sequence; identical to SEQ ID NO: 5211
  Synthetic polypeptide

SEQ ID NO: 5215 - protein, 49 aa, Artificial Sequence; identical to SEQ ID NO: 5211
  Synthetic polypeptide

SEQ ID NO: 5216 - protein, 49 aa, Artificial Sequence; identical to SEQ ID NO: 5211
  Synthetic polypeptide

SEQ ID NO: 5217 - protein, 49 aa, Artificial Sequence
  Synthetic polypeptide
GHHSEGYGIIQLPGHHSEVASPPTMRCSRRSTRWLCWGRPTTLLPRRPP

SEQ ID NO: 5218 - protein, 49 aa, Artificial Sequence
  Synthetic polypeptide
GEGRAEREVSVGERRAEREMFPSERQLLHILNTWPQLGLHFEKKTQRER

SEQ ID NO: 5219 - protein, 49 aa, Artificial Sequence
  Synthetic polypeptide
GTTGEAADVGRPISEGPGAAWTSLQHHPTESQKVFPALYYLEYQRCDPG

SEQ ID NO: 5220 - protein, 49 aa, Artificial Sequence; identical to SEQ ID NO: 5219
  Synthetic polypeptide

SEQ ID NO: 5221 - protein, 49 aa, Artificial Sequence; identical to SEQ ID NO: 5219
  Synthetic polypeptide

SEQ ID NO: 5222 - protein, 49 aa, Artificial Sequence; identical to SEQ ID NO: 5219
  Synthetic polypeptide

SEQ ID NO: 5223 - protein, 49 aa, Artificial Sequence; identical to SEQ ID NO: 5219
  Synthetic polypeptide

SEQ ID NO: 5224 - protein, 49 aa, Artificial Sequence; identical to SEQ ID NO: 5219
  Synthetic polypeptide

SEQ ID NO: 5225 - protein, 49 aa, Artificial Sequence; identical to SEQ ID NO: 5219
  Synthetic polypeptide

SEQ ID NO: 5226 - protein, 49 aa, Artificial Sequence; identical to SEQ ID NO: 5219
  Synthetic polypeptide

SEQ ID NO: 5227 - protein, 49 aa, Artificial Sequence; identical to SEQ ID NO: 5219
  Synthetic polypeptide

SEQ ID NO: 5228 - protein, 49 aa, Artificial Sequence; identical to SEQ ID NO: 5219
  Synthetic polypeptide

SEQ ID NO: 5229 - protein, 49 aa, Artificial Sequence; identical to SEQ ID NO: 5219
  Synthetic polypeptide

SEQ ID NO: 5230 - protein, 49 aa, Artificial Sequence; identical to SEQ ID NO: 5217
  Synthetic polypeptide

SEQ ID NO: 5231 - protein, 49 aa, Artificial Sequence; identical to SEQ ID NO: 5217
  Synthetic polypeptide

SEQ ID NO: 5232 - protein, 49 aa, Artificial Sequence; identical to SEQ ID NO: 5217
  Synthetic polypeptide

SEQ ID NO: 5233 - protein, 49 aa, Artificial Sequence
  Synthetic polypeptide
SQLLRRLMQENGMGLPDAIATEQLHRQQQEKWSGQSQHLLQGAELQNQF

SEQ ID NO: 5234 - protein, 49 aa, Artificial Sequence; identical to SEQ ID NO: 5233
  Synthetic polypeptide

SEQ ID NO: 5235 - protein, 49 aa, Artificial Sequence; identical to SEQ ID NO: 5233
  Synthetic polypeptide

SEQ ID NO: 5236 - protein, 49 aa, Artificial Sequence; identical to SEQ ID NO: 5233
  Synthetic polypeptide

SEQ ID NO: 5237 - protein, 49 aa, Artificial Sequence; identical to SEQ ID NO: 5233
  Synthetic polypeptide

SEQ ID NO: 5238 - protein, 49 aa, Artificial Sequence
  Synthetic polypeptide
LGLWEVEVGGSPEPRSLRPAWATWRKPVKVEEMIVCGTCKVRWRELRIL

SEQ ID NO: 5239 - protein, 49 aa, Artificial Sequence; identical to SEQ ID NO: 5238
  Synthetic polypeptide

SEQ ID NO: 5240 - protein, 49 aa, Artificial Sequence; identical to SEQ ID NO: 5217
  Synthetic polypeptide

SEQ ID NO: 5241 - protein, 49 aa, Artificial Sequence
  Synthetic polypeptide
TCSLCDTSPFCPCRVEGAGKDGVPGRVMAATPSPHPDLWLQTILAGGGG

SEQ ID NO: 5242 - protein, 49 aa, Artificial Sequence; identical to SEQ ID NO: 5217
  Synthetic polypeptide

SEQ ID NO: 5243 - protein, 49 aa, Artificial Sequence
  Synthetic polypeptide
GAPLPSRDPVWESHGGLAWLSDRGGVPLPAGLLPHRHQLPAQQAHGPQE

SEQ ID NO: 5244 - protein, 49 aa, Artificial Sequence
  Synthetic polypeptide
YCCKDQRGRQRGGLFLPLHVLQRHQRLGLLVPLPLLPGSPAVVCLPTEW

SEQ ID NO: 5245 - protein, 49 aa, Artificial Sequence; identical to SEQ ID NO: 5244
  Synthetic polypeptide

SEQ ID NO: 5246 - protein, 49 aa, Artificial Sequence; identical to SEQ ID NO: 5244
  Synthetic polypeptide

SEQ ID NO: 5247 - protein, 49 aa, Artificial Sequence; identical to SEQ ID NO: 5244
  Synthetic polypeptide

SEQ ID NO: 5248 - protein, 49 aa, Artificial Sequence
  Synthetic polypeptide
SQHLLTEDARTEAGRSLKMLSPPRRMMMMMMTPLQRRKKQITPNQTVCP

SEQ ID NO: 5249 - protein, 49 aa, Artificial Sequence; identical to SEQ ID NO: 5248
  Synthetic polypeptide

SEQ ID NO: 5250 - protein, 49 aa, Artificial Sequence; identical to SEQ ID NO: 5248
  Synthetic polypeptide

SEQ ID NO: 5251 - protein, 49 aa, Artificial Sequence; identical to SEQ ID NO: 5248
  Synthetic polypeptide

SEQ ID NO: 5252 - protein, 49 aa, Artificial Sequence; identical to SEQ ID NO: 5248
  Synthetic polypeptide

SEQ ID NO: 5253 - protein, 49 aa, Artificial Sequence; identical to SEQ ID NO: 5248
  Synthetic polypeptide

SEQ ID NO: 5254 - protein, 49 aa, Artificial Sequence
  Synthetic polypeptide
GLPSHAELNPKWWSLCRPEQIPLLCRHHSLARYCSEPMAFQLDSCVNKW

SEQ ID NO: 5255 - protein, 49 aa, Artificial Sequence; identical to SEQ ID NO: 5254
  Synthetic polypeptide

SEQ ID NO: 5256 - protein, 49 aa, Artificial Sequence; identical to SEQ ID NO: 5254
  Synthetic polypeptide

SEQ ID NO: 5257 - protein, 49 aa, Artificial Sequence; identical to SEQ ID NO: 5254
  Synthetic polypeptide

SEQ ID NO: 5258 - protein, 49 aa, Artificial Sequence; identical to SEQ ID NO: 5254
  Synthetic polypeptide

SEQ ID NO: 5259 - protein, 48 aa, Artificial Sequence
  Synthetic polypeptide
LLKIKWKLHTAYRLQSSVASPPTMRCSRRSTRWLCWGRPTTLLPRRPP

SEQ ID NO: 5260 - protein, 48 aa, Artificial Sequence
  Synthetic polypeptide
QRPREGGQRSERAPWISLRGDDTGVLLPTPGEAQDADLKDVNVIPATA

SEQ ID NO: 5261 - protein, 48 aa, Artificial Sequence; identical to SEQ ID NO: 5260
  Synthetic polypeptide

SEQ ID NO: 5262 - protein, 48 aa, Artificial Sequence; identical to SEQ ID NO: 5260
  Synthetic polypeptide

SEQ ID NO: 5263 - protein, 48 aa, Artificial Sequence; identical to SEQ ID NO: 5260
  Synthetic polypeptide

SEQ ID NO: 5264 - protein, 48 aa, Artificial Sequence; identical to SEQ ID NO: 5260
  Synthetic polypeptide

SEQ ID NO: 5265 - protein, 48 aa, Artificial Sequence
  Synthetic polypeptide
ARNEENAGSNWGILMSEASHFTPLGPRITLWNQRASTRWSLGFSWHAD

SEQ ID NO: 5266 - protein, 48 aa, Artificial Sequence; identical to SEQ ID NO: 5265
  Synthetic polypeptide

SEQ ID NO: 5267 - protein, 48 aa, Artificial Sequence; identical to SEQ ID NO: 5265
  Synthetic polypeptide

SEQ ID NO: 5268 - protein, 48 aa, Artificial Sequence; identical to SEQ ID NO: 5265
  Synthetic polypeptide

SEQ ID NO: 5269 - protein, 48 aa, Artificial Sequence; identical to SEQ ID NO: 5265
  Synthetic polypeptide

SEQ ID NO: 5270 - protein, 48 aa, Artificial Sequence; identical to SEQ ID NO: 5265
  Synthetic polypeptide

SEQ ID NO: 5271 - protein, 48 aa, Artificial Sequence
  Synthetic polypeptide
PAVPSSCFRPPQQSSPSDIPVYASVCLSGSWFCSASPLEAAELLICGP

SEQ ID NO: 5272 - protein, 48 aa, Artificial Sequence; identical to SEQ ID NO: 5271
  Synthetic polypeptide

SEQ ID NO: 5273 - protein, 48 aa, Artificial Sequence; identical to SEQ ID NO: 5271
  Synthetic polypeptide

SEQ ID NO: 5274 - protein, 48 aa, Artificial Sequence; identical to SEQ ID NO: 5271
  Synthetic polypeptide

SEQ ID NO: 5275 - protein, 48 aa, Artificial Sequence
  Synthetic polypeptide
EDRLGPRVQDHQCGRSQPTSDHPELVQAGPQAVQDPSPLCDSLPLLSW

SEQ ID NO: 5276 - protein, 48 aa, Artificial Sequence; identical to SEQ ID NO: 5275
  Synthetic polypeptide

SEQ ID NO: 5277 - protein, 48 aa, Artificial Sequence; identical to SEQ ID NO: 5275
  Synthetic polypeptide

SEQ ID NO: 5278 - protein, 48 aa, Artificial Sequence; identical to SEQ ID NO: 5275
  Synthetic polypeptide

SEQ ID NO: 5279 - protein, 48 aa, Artificial Sequence; identical to SEQ ID NO: 5275
  Synthetic polypeptide

SEQ ID NO: 5280 - protein, 48 aa, Artificial Sequence; identical to SEQ ID NO: 5275
  Synthetic polypeptide

SEQ ID NO: 5281 - protein, 48 aa, Artificial Sequence; identical to SEQ ID NO: 5275
  Synthetic polypeptide

SEQ ID NO: 5282 - protein, 48 aa, Artificial Sequence; identical to SEQ ID NO: 5275
  Synthetic polypeptide

SEQ ID NO: 5283 - protein, 48 aa, Artificial Sequence; identical to SEQ ID NO: 5275
  Synthetic polypeptide

SEQ ID NO: 5284 - protein, 48 aa, Artificial Sequence; identical to SEQ ID NO: 5275
  Synthetic polypeptide

SEQ ID NO: 5285 - protein, 48 aa, Artificial Sequence
  Synthetic polypeptide
PPPLPPREQPPLTAIFLYLPESYKMALPHLPFLTLFRTQPACTQLVSL

SEQ ID NO: 5286 - protein, 48 aa, Artificial Sequence; identical to SEQ ID NO: 5285
  Synthetic polypeptide

SEQ ID NO: 5287 - protein, 48 aa, Artificial Sequence; identical to SEQ ID NO: 5285
  Synthetic polypeptide

SEQ ID NO: 5288 - protein, 48 aa, Artificial Sequence; identical to SEQ ID NO: 5285
  Synthetic polypeptide

SEQ ID NO: 5289 - protein, 48 aa, Artificial Sequence; identical to SEQ ID NO: 5285
  Synthetic polypeptide

SEQ ID NO: 5290 - protein, 48 aa, Artificial Sequence; identical to SEQ ID NO: 5285
  Synthetic polypeptide

SEQ ID NO: 5291 - protein, 48 aa, Artificial Sequence; identical to SEQ ID NO: 5285
  Synthetic polypeptide

SEQ ID NO: 5292 - protein, 48 aa, Artificial Sequence; identical to SEQ ID NO: 5285
  Synthetic polypeptide

SEQ ID NO: 5293 - protein, 48 aa, Artificial Sequence; identical to SEQ ID NO: 5285
  Synthetic polypeptide

SEQ ID NO: 5294 - protein, 48 aa, Artificial Sequence; identical to SEQ ID NO: 5285
  Synthetic polypeptide

SEQ ID NO: 5295 - protein, 48 aa, Artificial Sequence
  Synthetic polypeptide
DLMVLKRGSFPAQTLFLPAAIRVRCDLVLLAFRHDCEVSPATWNWPAA

SEQ ID NO: 5296 - protein, 48 aa, Artificial Sequence; identical to SEQ ID NO: 5295
  Synthetic polypeptide

SEQ ID NO: 5297 - protein, 48 aa, Artificial Sequence
  Synthetic polypeptide
SQLFGRLSLSTTMSTRRVTARVPGGGSPCRIPRACAPACLTPSRAPSA

SEQ ID NO: 5298 - protein, 48 aa, Artificial Sequence
  Synthetic polypeptide
MTLEDINSVSLKDRGQIHLPRIAGSTKRIKLCSSLNHLNSFEEVSSTW

SEQ ID NO: 5299 - protein, 48 aa, Artificial Sequence; identical to SEQ ID NO: 5298
  Synthetic polypeptide

SEQ ID NO: 5300 - protein, 48 aa, Artificial Sequence; identical to SEQ ID NO: 5298
  Synthetic polypeptide

SEQ ID NO: 5301 - protein, 48 aa, Artificial Sequence; identical to SEQ ID NO: 5298
  Synthetic polypeptide

SEQ ID NO: 5302 - protein, 48 aa, Artificial Sequence
  Synthetic polypeptide
TGRGGILTDILDPVCCSLIMTVDASPCFSGMLWSFGCKLAWMGSRFGT

SEQ ID NO: 5303 - protein, 48 aa, Artificial Sequence; identical to SEQ ID NO: 5302
  Synthetic polypeptide

SEQ ID NO: 5304 - protein, 48 aa, Artificial Sequence; identical to SEQ ID NO: 5302
  Synthetic polypeptide

SEQ ID NO: 5305 - protein, 48 aa, Artificial Sequence; identical to SEQ ID NO: 5302
  Synthetic polypeptide

SEQ ID NO: 5306 - protein, 48 aa, Artificial Sequence; identical to SEQ ID NO: 5302
  Synthetic polypeptide

SEQ ID NO: 5307 - protein, 48 aa, Artificial Sequence; identical to SEQ ID NO: 5302
  Synthetic polypeptide

SEQ ID NO: 5308 - protein, 48 aa, Artificial Sequence
  Synthetic polypeptide
VAPEFQYRRGGLRAAIWLEENGRTRRLRQRPLGAPLQQPVPVPERRPV

SEQ ID NO: 5309 - protein, 48 aa, Artificial Sequence; identical to SEQ ID NO: 5308
  Synthetic polypeptide

SEQ ID NO: 5310 - protein, 48 aa, Artificial Sequence; identical to SEQ ID NO: 5308
  Synthetic polypeptide

SEQ ID NO: 5311 - protein, 48 aa, Artificial Sequence; identical to SEQ ID NO: 5308
  Synthetic polypeptide

SEQ ID NO: 5312 - protein, 48 aa, Artificial Sequence; identical to SEQ ID NO: 5308
  Synthetic polypeptide

SEQ ID NO: 5313 - protein, 48 aa, Artificial Sequence
  Synthetic polypeptide
NKPDTERKILHNLTYMKLRKALDRGFTLQRKILIAVPEIAVGHLDLLP

SEQ ID NO: 5314 - protein, 48 aa, Artificial Sequence; identical to SEQ ID NO: 5313
  Synthetic polypeptide

SEQ ID NO: 5315 - protein, 48 aa, Artificial Sequence; identical to SEQ ID NO: 5313
  Synthetic polypeptide

SEQ ID NO: 5316 - protein, 48 aa, Artificial Sequence; identical to SEQ ID NO: 5313
  Synthetic polypeptide

SEQ ID NO: 5317 - protein, 48 aa, Artificial Sequence; identical to SEQ ID NO: 5313
  Synthetic polypeptide

SEQ ID NO: 5318 - protein, 47 aa, Artificial Sequence
  Synthetic polypeptide
LEMEIILGYPSRPGDSTPPTSRAQTCTPRGSTTSERSPCPCTDLSPR

SEQ ID NO: 5319 - protein, 47 aa, Artificial Sequence; identical to SEQ ID NO: 5318
  Synthetic polypeptide

SEQ ID NO: 5320 - protein, 47 aa, Artificial Sequence; identical to SEQ ID NO: 5318
  Synthetic polypeptide

SEQ ID NO: 5321 - protein, 47 aa, Artificial Sequence
  Synthetic polypeptide
PVPQLRILLLGPQESNNSTGTMWKVSALLFVLGSASLWVLAEGGEGV

SEQ ID NO: 5322 - protein, 47 aa, Artificial Sequence
  Synthetic polypeptide
HMHVVLAAWEAEMGRSLEPRNERLQLSHDCTTALLPGPLSESQFSPV

SEQ ID NO: 5323 - protein, 47 aa, Artificial Sequence; identical to SEQ ID NO: 5322
  Synthetic polypeptide

SEQ ID NO: 5324 - protein, 47 aa, Artificial Sequence; identical to SEQ ID NO: 5322
  Synthetic polypeptide

SEQ ID NO: 5325 - protein, 47 aa, Artificial Sequence
  Synthetic polypeptide
LPTKGSWCSRSSSSWEPRPWPSWCSCLCSMAGTSCSSVPWSPRGPSG

SEQ ID NO: 5326 - protein, 47 aa, Artificial Sequence; identical to SEQ ID NO: 5325
  Synthetic polypeptide

SEQ ID NO: 5327 - protein, 47 aa, Artificial Sequence; identical to SEQ ID NO: 5325
  Synthetic polypeptide

SEQ ID NO: 5328 - protein, 47 aa, Artificial Sequence; identical to SEQ ID NO: 5325
  Synthetic polypeptide

SEQ ID NO: 5329 - protein, 47 aa, Artificial Sequence; identical to SEQ ID NO: 5325
  Synthetic polypeptide

SEQ ID NO: 5330 - protein, 47 aa, Artificial Sequence; identical to SEQ ID NO: 5325
  Synthetic polypeptide

SEQ ID NO: 5331 - protein, 47 aa, Artificial Sequence; identical to SEQ ID NO: 5325
  Synthetic polypeptide

SEQ ID NO: 5332 - protein, 47 aa, Artificial Sequence; identical to SEQ ID NO: 5325
  Synthetic polypeptide

SEQ ID NO: 5333 - protein, 47 aa, Artificial Sequence
  Synthetic polypeptide
SQHFGRLRHEDCLSSEIQDQPGRHGKCPPATPAYHPACTTPAWPRCQ

SEQ ID NO: 5334 - protein, 47 aa, Artificial Sequence
  Synthetic polypeptide
DMPASPLPSAMIISFLKPPQSCFLYSLQNREHMKPHFFINYPTSAGN

SEQ ID NO: 5335 - protein, 47 aa, Artificial Sequence
  Synthetic polypeptide
NQSVVTKARKWLLLGTRRERGIKEPFEVNRSFCILVWHTCQNSPDSR

SEQ ID NO: 5336 - protein, 47 aa, Artificial Sequence; identical to SEQ ID NO: 5335
  Synthetic polypeptide

SEQ ID NO: 5337 - protein, 47 aa, Artificial Sequence; identical to SEQ ID NO: 5335
  Synthetic polypeptide

SEQ ID NO: 5338 - protein, 47 aa, Artificial Sequence
  Synthetic polypeptide
QTIIGGREKEEVWVLIHWLPYCKLPSGWLHCLAEALGSNLHVEVKGY

SEQ ID NO: 5339 - protein, 47 aa, Artificial Sequence
  Synthetic polypeptide
CPVLPDDSAESLCKKISKMVRTRCGSLTLDFLVPMMVGKEVKEDTQV

SEQ ID NO: 5340 - protein, 47 aa, Artificial Sequence
  Synthetic polypeptide
PAAPSGREVGGSAPRPASRPVREGGGGVSPPPGQPPRPGESWRSGMA

SEQ ID NO: 5341 - protein, 47 aa, Artificial Sequence
  Synthetic polypeptide
KREFSLHKLAAAHIRCYLLLLASHHDCEASLAMWNSKFQWSCKEVHA

SEQ ID NO: 5342 - protein, 47 aa, Artificial Sequence; identical to SEQ ID NO: 5341
  Synthetic polypeptide

SEQ ID NO: 5343 - protein, 47 aa, Artificial Sequence; identical to SEQ ID NO: 5341
  Synthetic polypeptide

SEQ ID NO: 5344 - protein, 47 aa, Artificial Sequence
  Synthetic polypeptide
ASLKCCPRHRSISAEAISGVPGGSTAEASPQKRNGHTTGRKLVVLDV

SEQ ID NO: 5345 - protein, 47 aa, Artificial Sequence; identical to SEQ ID NO: 5344
  Synthetic polypeptide

SEQ ID NO: 5346 - protein, 47 aa, Artificial Sequence; identical to SEQ ID NO: 5344
  Synthetic polypeptide

SEQ ID NO: 5347 - protein, 47 aa, Artificial Sequence; identical to SEQ ID NO: 5344
  Synthetic polypeptide

SEQ ID NO: 5348 - protein, 47 aa, Artificial Sequence; identical to SEQ ID NO: 5344
  Synthetic polypeptide

SEQ ID NO: 5349 - protein, 47 aa, Artificial Sequence; identical to SEQ ID NO: 5344
  Synthetic polypeptide

SEQ ID NO: 5350 - protein, 47 aa, Artificial Sequence
  Synthetic polypeptide
TQEAEVAAHFVAPSPLACWWLASWFCWFPWEWPSTCAAGGGEPGFVS

SEQ ID NO: 5351 - protein, 47 aa, Artificial Sequence; identical to SEQ ID NO: 5350
  Synthetic polypeptide

SEQ ID NO: 5352 - protein, 47 aa, Artificial Sequence; identical to SEQ ID NO: 5350
  Synthetic polypeptide

SEQ ID NO: 5353 - protein, 47 aa, Artificial Sequence
  Synthetic polypeptide
RRKALESERSPLGSARSRSPATLALTPRATRSRCPGATWREAASWAE

SEQ ID NO: 5354 - protein, 47 aa, Artificial Sequence; identical to SEQ ID NO: 5353
  Synthetic polypeptide

SEQ ID NO: 5355 - protein, 47 aa, Artificial Sequence; identical to SEQ ID NO: 5353
  Synthetic polypeptide

SEQ ID NO: 5356 - protein, 47 aa, Artificial Sequence; identical to SEQ ID NO: 5353
  Synthetic polypeptide

SEQ ID NO: 5357 - protein, 47 aa, Artificial Sequence
  Synthetic polypeptide
GAPLLGRNPVWEVRSVSARPPRLRSEETLCLATAPSEKRAKVGLQSW

SEQ ID NO: 5358 - protein, 47 aa, Artificial Sequence; identical to SEQ ID NO: 5357
  Synthetic polypeptide

SEQ ID NO: 5359 - protein, 47 aa, Artificial Sequence
  Synthetic polypeptide
SQHLLTEDARTEAGRSLKMLSPPRRMMMMMMTPLQRRKKQITPNQTP

SEQ ID NO: 5360 - protein, 47 aa, Artificial Sequence; identical to SEQ ID NO: 5359
  Synthetic polypeptide

SEQ ID NO: 5361 - protein, 47 aa, Artificial Sequence; identical to SEQ ID NO: 5359
  Synthetic polypeptide

SEQ ID NO: 5362 - protein, 47 aa, Artificial Sequence; identical to SEQ ID NO: 5359
  Synthetic polypeptide

SEQ ID NO: 5363 - protein, 47 aa, Artificial Sequence; identical to SEQ ID NO: 5359
  Synthetic polypeptide

SEQ ID NO: 5364 - protein, 47 aa, Artificial Sequence; identical to SEQ ID NO: 5359
  Synthetic polypeptide

SEQ ID NO: 5365 - protein, 47 aa, Artificial Sequence; identical to SEQ ID NO: 5359
  Synthetic polypeptide

SEQ ID NO: 5366 - protein, 47 aa, Artificial Sequence; identical to SEQ ID NO: 5359
  Synthetic polypeptide

SEQ ID NO: 5367 - protein, 47 aa, Artificial Sequence; identical to SEQ ID NO: 5359
  Synthetic polypeptide

SEQ ID NO: 5368 - protein, 47 aa, Artificial Sequence
  Synthetic polypeptide
NRNDMTCPLHLRKYLGDQVREHHRLWNLCLAKGSAGECWFCGPCSHR

SEQ ID NO: 5369 - protein, 47 aa, Artificial Sequence
  Synthetic polypeptide
PSTWEHHRLWNLCLAKGSAGECWFCGPCSHRLDCDGLHHSCGSPLLC

SEQ ID NO: 5370 - protein, 47 aa, Artificial Sequence; identical to SEQ ID NO: 5369
  Synthetic polypeptide

SEQ ID NO: 5371 - protein, 47 aa, Artificial Sequence; identical to SEQ ID NO: 5369
  Synthetic polypeptide

SEQ ID NO: 5372 - protein, 47 aa, Artificial Sequence
  Synthetic polypeptide
LQAPLEELKPREGNGSSTPQRPSPDGASEPGGLQDNLKSSRQTSEPW

SEQ ID NO: 5373 - protein, 47 aa, Artificial Sequence; identical to SEQ ID NO: 5372
  Synthetic polypeptide

SEQ ID NO: 5374 - protein, 47 aa, Artificial Sequence; identical to SEQ ID NO: 5372
  Synthetic polypeptide

SEQ ID NO: 5375 - protein, 46 aa, Artificial Sequence
  Synthetic polypeptide
FQHFGGLRRQRPGNSVSLRPSRLIRSSRVRGRMSTATSTHRGRITN

SEQ ID NO: 5376 - protein, 46 aa, Artificial Sequence; identical to SEQ ID NO: 5375
  Synthetic polypeptide

SEQ ID NO: 5377 - protein, 46 aa, Artificial Sequence; identical to SEQ ID NO: 5375
  Synthetic polypeptide

SEQ ID NO: 5378 - protein, 46 aa, Artificial Sequence
  Synthetic polypeptide
RKEGPALFLLTFVLPAPFYLQARNRGQADFHGPRTHRAQGTRHPCF

SEQ ID NO: 5379 - protein, 46 aa, Artificial Sequence; identical to SEQ ID NO: 5378
  Synthetic polypeptide

SEQ ID NO: 5380 - protein, 46 aa, Artificial Sequence
  Synthetic polypeptide
ELGCTAGVPSSLCTLPMESYLPAAAPLHTSLHWSFWDTISRSALDW

SEQ ID NO: 5381 - protein, 46 aa, Artificial Sequence; identical to SEQ ID NO: 5380
  Synthetic polypeptide

SEQ ID NO: 5382 - protein, 46 aa, Artificial Sequence; identical to SEQ ID NO: 5380
  Synthetic polypeptide

SEQ ID NO: 5383 - protein, 46 aa, Artificial Sequence
  Synthetic polypeptide
GRAPSGSACDPALWEAEAGGSLGARSLRAAWATWAEQDILFLLRSP

SEQ ID NO: 5384 - protein, 46 aa, Artificial Sequence; identical to SEQ ID NO: 5383
  Synthetic polypeptide

SEQ ID NO: 5385 - protein, 46 aa, Artificial Sequence
  Synthetic polypeptide
MGKQCHLSETVSPSVHGADNTSPSGWRSTSTTPCWPPCLSCWASDS

SEQ ID NO: 5386 - protein, 46 aa, Artificial Sequence; identical to SEQ ID NO: 5385
  Synthetic polypeptide

SEQ ID NO: 5387 - protein, 46 aa, Artificial Sequence; identical to SEQ ID NO: 5385
  Synthetic polypeptide

SEQ ID NO: 5388 - protein, 46 aa, Artificial Sequence; identical to SEQ ID NO: 5385
  Synthetic polypeptide

SEQ ID NO: 5389 - protein, 46 aa, Artificial Sequence; identical to SEQ ID NO: 5385
  Synthetic polypeptide

SEQ ID NO: 5390 - protein, 46 aa, Artificial Sequence; identical to SEQ ID NO: 5385
  Synthetic polypeptide

SEQ ID NO: 5391 - protein, 46 aa, Artificial Sequence; identical to SEQ ID NO: 5385
  Synthetic polypeptide

SEQ ID NO: 5392 - protein, 46 aa, Artificial Sequence; identical to SEQ ID NO: 5385
  Synthetic polypeptide

SEQ ID NO: 5393 - protein, 46 aa, Artificial Sequence; identical to SEQ ID NO: 5385
  Synthetic polypeptide

SEQ ID NO: 5394 - protein, 46 aa, Artificial Sequence
  Synthetic polypeptide
EAEAADHEEPRMCEFKCYPRCEASSGAPWSCRATCCHLFLDCTSPW

SEQ ID NO: 5395 - protein, 46 aa, Artificial Sequence; identical to SEQ ID NO: 5394
  Synthetic polypeptide

SEQ ID NO: 5396 - protein, 46 aa, Artificial Sequence
  Synthetic polypeptide
GQEFETSLANMERRSLKERNPLKIFPSKRILRRHKRDWVVAPISVP

SEQ ID NO: 5397 - protein, 46 aa, Artificial Sequence
  Synthetic polypeptide
TFGISPACTHSILPLCEEGFSFAFHHDCKFPEASQPCRTAAKGSFH

SEQ ID NO: 5398 - protein, 46 aa, Artificial Sequence; identical to SEQ ID NO: 5397
  Synthetic polypeptide

SEQ ID NO: 5399 - protein, 46 aa, Artificial Sequence; identical to SEQ ID NO: 5397
  Synthetic polypeptide

SEQ ID NO: 5400 - protein, 46 aa, Artificial Sequence
  Synthetic polypeptide
LCELGQFLNVSGPFHKMGTITPASQLSAPLLPPSGSLCAPTVRPPS

SEQ ID NO: 5401 - protein, 46 aa, Artificial Sequence
  Synthetic polypeptide
LSKKTLVKCVPLSLGLSLQNYNDGCRAPLQWRHCQPSGHEGESDFN

SEQ ID NO: 5402 - protein, 46 aa, Artificial Sequence
  Synthetic polypeptide
GLPSHAELSWPTSSSTCAPSLWASCPTTWLTASTARPSWRPASRWR

SEQ ID NO: 5403 - protein, 46 aa, Artificial Sequence; identical to SEQ ID NO: 5402
  Synthetic polypeptide

SEQ ID NO: 5404 - protein, 46 aa, Artificial Sequence; identical to SEQ ID NO: 5402
  Synthetic polypeptide

SEQ ID NO: 5405 - protein, 46 aa, Artificial Sequence; identical to SEQ ID NO: 5402
  Synthetic polypeptide

SEQ ID NO: 5406 - protein, 46 aa, Artificial Sequence
  Synthetic polypeptide
VSRGLMGLSGVSTFASSSFFSCRCQCKKCLVPPTMILRPPQPCGTG

SEQ ID NO: 5407 - protein, 46 aa, Artificial Sequence; identical to SEQ ID NO: 5406
  Synthetic polypeptide

SEQ ID NO: 5408 - protein, 46 aa, Artificial Sequence
  Synthetic polypeptide
SQDFGSLRQADHLKSGVRDQPDLHDSSSTAWKRETKQLFQNSFSWD

SEQ ID NO: 5409 - protein, 46 aa, Artificial Sequence
  Synthetic polypeptide
YDLPSAPKKVLRRSSKGTSSALESLSRQRECWRMLVLWALLSSSGL

SEQ ID NO: 5410 - protein, 46 aa, Artificial Sequence; identical to SEQ ID NO: 5409
  Synthetic polypeptide

SEQ ID NO: 5411 - protein, 46 aa, Artificial Sequence; identical to SEQ ID NO: 5409
  Synthetic polypeptide

SEQ ID NO: 5412 - protein, 46 aa, Artificial Sequence
  Synthetic polypeptide
SQHSGRLRRMDHLRSSCQNQANSARKSKFGFRSTGTSQISWPFPHS

SEQ ID NO: 5413 - protein, 46 aa, Artificial Sequence; identical to SEQ ID NO: 5412
  Synthetic polypeptide

SEQ ID NO: 5414 - protein, 46 aa, Artificial Sequence; identical to SEQ ID NO: 5412
  Synthetic polypeptide

SEQ ID NO: 5415 - protein, 46 aa, Artificial Sequence; identical to SEQ ID NO: 5412
  Synthetic polypeptide

SEQ ID NO: 5416 - protein, 46 aa, Artificial Sequence; identical to SEQ ID NO: 5412
  Synthetic polypeptide

SEQ ID NO: 5417 - protein, 45 aa, Artificial Sequence
  Synthetic polypeptide
PCLLHFPLFLCRWWSLTPHRSFCPTTVPDSMPCLLLQRTRSLSRA

SEQ ID NO: 5418 - protein, 45 aa, Artificial Sequence; identical to SEQ ID NO: 5417
  Synthetic polypeptide

SEQ ID NO: 5419 - protein, 45 aa, Artificial Sequence
  Synthetic polypeptide
TFYWTQPHLCGYLLPGAVFMLQWQPETAQPTKPTTLTIQPFPQKK

SEQ ID NO: 5420 - protein, 45 aa, Artificial Sequence; identical to SEQ ID NO: 5419
  Synthetic polypeptide

SEQ ID NO: 5421 - protein, 45 aa, Artificial Sequence; identical to SEQ ID NO: 5419
  Synthetic polypeptide

SEQ ID NO: 5422 - protein, 45 aa, Artificial Sequence; identical to SEQ ID NO: 5419
  Synthetic polypeptide

SEQ ID NO: 5423 - protein, 45 aa, Artificial Sequence
  Synthetic polypeptide
FQHFGGLRRRPGNSVSLRPSRLIRSSRVRGRMSTATSTHRGRITN

SEQ ID NO: 5424 - protein, 45 aa, Artificial Sequence; identical to SEQ ID NO: 5423
  Synthetic polypeptide

SEQ ID NO: 5425 - protein, 45 aa, Artificial Sequence; identical to SEQ ID NO: 5423
  Synthetic polypeptide

SEQ ID NO: 5426 - protein, 45 aa, Artificial Sequence; identical to SEQ ID NO: 5423
  Synthetic polypeptide

SEQ ID NO: 5427 - protein, 45 aa, Artificial Sequence; identical to SEQ ID NO: 5423
  Synthetic polypeptide

SEQ ID NO: 5428 - protein, 45 aa, Artificial Sequence
  Synthetic polypeptide
MGTVAHACNPSTLGGRGGRIMRSRDRDHPGQHGLAHTAPRALTSQ

SEQ ID NO: 5429 - protein, 45 aa, Artificial Sequence; identical to SEQ ID NO: 5428
  Synthetic polypeptide

SEQ ID NO: 5430 - protein, 45 aa, Artificial Sequence; identical to SEQ ID NO: 5428
  Synthetic polypeptide

SEQ ID NO: 5431 - protein, 45 aa, Artificial Sequence
  Synthetic polypeptide
VHVLCRDMDEGGNHHSQQTITRTENQTPHVLTHSHRTACLTSSSG

SEQ ID NO: 5432 - protein, 45 aa, Artificial Sequence; identical to SEQ ID NO: 5431
  Synthetic polypeptide

SEQ ID NO: 5433 - protein, 45 aa, Artificial Sequence; identical to SEQ ID NO: 5431
  Synthetic polypeptide

SEQ ID NO: 5434 - protein, 45 aa, Artificial Sequence; identical to SEQ ID NO: 5431
  Synthetic polypeptide

SEQ ID NO: 5435 - protein, 45 aa, Artificial Sequence; identical to SEQ ID NO: 5431
  Synthetic polypeptide

SEQ ID NO: 5436 - protein, 45 aa, Artificial Sequence
  Synthetic polypeptide
SSSLLHSHQRHECLHVIATSGSYPIWSKMESVPKHVWEAGVHREQ

SEQ ID NO: 5437 - protein, 45 aa, Artificial Sequence; identical to SEQ ID NO: 5436
  Synthetic polypeptide

SEQ ID NO: 5438 - protein, 45 aa, Artificial Sequence; identical to SEQ ID NO: 5436
  Synthetic polypeptide

SEQ ID NO: 5439 - protein, 45 aa, Artificial Sequence
  Synthetic polypeptide
YLPPSFAVKLQWDYRCKTLGTKPGTGVASTGPSVPSGTSPVLPRH

SEQ ID NO: 5440 - protein, 45 aa, Artificial Sequence; identical to SEQ ID NO: 5439
  Synthetic polypeptide

SEQ ID NO: 5441 - protein, 45 aa, Artificial Sequence; identical to SEQ ID NO: 5439
  Synthetic polypeptide

SEQ ID NO: 5442 - protein, 45 aa, Artificial Sequence; identical to SEQ ID NO: 5439
  Synthetic polypeptide

SEQ ID NO: 5443 - protein, 45 aa, Artificial Sequence
  Synthetic polypeptide
TWISFFSVLPPCEEGFVCFPFCHGYKFPEASSALQNCLSIREADL

SEQ ID NO: 5444 - protein, 45 aa, Artificial Sequence; identical to SEQ ID NO: 5443
  Synthetic polypeptide

SEQ ID NO: 5445 - protein, 45 aa, Artificial Sequence; identical to SEQ ID NO: 5443
  Synthetic polypeptide

SEQ ID NO: 5446 - protein, 45 aa, Artificial Sequence
  Synthetic polypeptide
GASLPGRPSSEMWGAPLPRRPVWDVRSASAQPRPRLGESWRSGMA

SEQ ID NO: 5447 - protein, 45 aa, Artificial Sequence
  Synthetic polypeptide
PGAVAHACNPSTLGGRGRQITRSRDRDHPGQHGLAHTAPRALTSQ

SEQ ID NO: 5448 - protein, 45 aa, Artificial Sequence; identical to SEQ ID NO: 5447
  Synthetic polypeptide

SEQ ID NO: 5449 - protein, 45 aa, Artificial Sequence; identical to SEQ ID NO: 5447
  Synthetic polypeptide

SEQ ID NO: 5450 - protein, 45 aa, Artificial Sequence
  Synthetic polypeptide
KYRQLPGSGALSSSQDEGRLGKTLTPHTAIWSCCRIHLCGPFSSF

SEQ ID NO: 5451 - protein, 45 aa, Artificial Sequence; identical to SEQ ID NO: 5450
  Synthetic polypeptide

SEQ ID NO: 5452 - protein, 45 aa, Artificial Sequence
  Synthetic polypeptide
KDEFMSFVGTWMKLETIVLSKVSQGQKTKHCMFSLIDSGWAHGGA

SEQ ID NO: 5453 - protein, 45 aa, Artificial Sequence; identical to SEQ ID NO: 5452
  Synthetic polypeptide

SEQ ID NO: 5454 - protein, 45 aa, Artificial Sequence; identical to SEQ ID NO: 5452
  Synthetic polypeptide

SEQ ID NO: 5455 - protein, 45 aa, Artificial Sequence; identical to SEQ ID NO: 5452
  Synthetic polypeptide

SEQ ID NO: 5456 - protein, 45 aa, Artificial Sequence; identical to SEQ ID NO: 5452
  Synthetic polypeptide

SEQ ID NO: 5457 - protein, 44 aa, Artificial Sequence
  Synthetic polypeptide
IVCVALGKPLPLSGSQFPHLLNGDNNAYLLGRRFVDLIRPVPRG

SEQ ID NO: 5458 - protein, 44 aa, Artificial Sequence
  Synthetic polypeptide
AEVRFCFWRLHTQVPNSLRRAVQLWLLSHITCIFASLAGCSFSL

SEQ ID NO: 5459 - protein, 44 aa, Artificial Sequence; identical to SEQ ID NO: 5458
  Synthetic polypeptide

SEQ ID NO: 5460 - protein, 44 aa, Artificial Sequence
  Synthetic polypeptide
KNCDIGIFSQVFKKCKIPTFAKARKLDSLNAQQYSHKLEMLRTS

SEQ ID NO: 5461 - protein, 44 aa, Artificial Sequence; identical to SEQ ID NO: 5460
  Synthetic polypeptide

SEQ ID NO: 5462 - protein, 44 aa, Artificial Sequence; identical to SEQ ID NO: 5460
  Synthetic polypeptide

SEQ ID NO: 5463 - protein, 44 aa, Artificial Sequence; identical to SEQ ID NO: 5460
  Synthetic polypeptide

SEQ ID NO: 5464 - protein, 44 aa, Artificial Sequence
  Synthetic polypeptide
GRAQQLTPVIRALWKAEKRRTQCCGRYAWTPVTCSLSLMTCSTF

SEQ ID NO: 5465 - protein, 44 aa, Artificial Sequence
  Synthetic polypeptide
RINPHSQQRGWKGFLPTYHGNQAIKLQMVLQLEPPTMASSAGTP

SEQ ID NO: 5466 - protein, 44 aa, Artificial Sequence
  Synthetic polypeptide
ISAWHTEPRMCEFKCYPRCEASSGAPWSCRATCCHLFLDCTSPW

SEQ ID NO: 5467 - protein, 44 aa, Artificial Sequence; identical to SEQ ID NO: 5466
  Synthetic polypeptide

SEQ ID NO: 5468 - protein, 44 aa, Artificial Sequence
  Synthetic polypeptide
QCKGSLSGEQHSHRHPAAGRAGGGPHTRRAGHTQPCPPEPSALS

SEQ ID NO: 5469 - protein, 44 aa, Artificial Sequence
  Synthetic polypeptide
FETSLANTGDRLGQRRNPGVRRPIGPPAAERSFLQHGQRRRLGV

SEQ ID NO: 5470 - protein, 44 aa, Artificial Sequence; identical to SEQ ID NO: 5469
  Synthetic polypeptide

SEQ ID NO: 5471 - protein, 44 aa, Artificial Sequence; identical to SEQ ID NO: 5469
  Synthetic polypeptide

SEQ ID NO: 5472 - protein, 44 aa, Artificial Sequence; identical to SEQ ID NO: 5469
  Synthetic polypeptide

SEQ ID NO: 5473 - protein, 44 aa, Artificial Sequence; identical to SEQ ID NO: 5469
  Synthetic polypeptide

SEQ ID NO: 5474 - protein, 44 aa, Artificial Sequence; identical to SEQ ID NO: 5469
  Synthetic polypeptide

SEQ ID NO: 5475 - protein, 44 aa, Artificial Sequence; identical to SEQ ID NO: 5469
  Synthetic polypeptide

SEQ ID NO: 5476 - protein, 44 aa, Artificial Sequence
  Synthetic polypeptide
GRAGWFMPVIPALWDAKDYLHSLGKARTAQVQKDARIGEAEAKR

SEQ ID NO: 5477 - protein, 44 aa, Artificial Sequence
  Synthetic polypeptide
PGRVVHACNPSTLGCQGLFALFGEGSNSSSPKRCTDWRSRGQER

SEQ ID NO: 5478 - protein, 44 aa, Artificial Sequence
  Synthetic polypeptide
ISCRVLSEKWKEVLKDLQNRIMRQRKERNRQSDLYLHRPVHSHE

SEQ ID NO: 5479 - protein, 44 aa, Artificial Sequence; identical to SEQ ID NO: 5478
  Synthetic polypeptide

SEQ ID NO: 5480 - protein, 44 aa, Artificial Sequence; identical to SEQ ID NO: 5478
  Synthetic polypeptide

SEQ ID NO: 5481 - protein, 44 aa, Artificial Sequence; identical to SEQ ID NO: 5478
  Synthetic polypeptide

SEQ ID NO: 5482 - protein, 44 aa, Artificial Sequence; identical to SEQ ID NO: 5478
  Synthetic polypeptide

SEQ ID NO: 5483 - protein, 44 aa, Artificial Sequence; identical to SEQ ID NO: 5478
  Synthetic polypeptide

SEQ ID NO: 5484 - protein, 44 aa, Artificial Sequence
  Synthetic polypeptide
LWDLEADACACPGNPDSCLWVILPVWVQRGCCQLPSTAHATILQ

SEQ ID NO: 5485 - protein, 44 aa, Artificial Sequence; identical to SEQ ID NO: 5484
  Synthetic polypeptide

SEQ ID NO: 5486 - protein, 44 aa, Artificial Sequence; identical to SEQ ID NO: 5484
  Synthetic polypeptide

SEQ ID NO: 5487 - protein, 44 aa, Artificial Sequence; identical to SEQ ID NO: 5484
  Synthetic polypeptide

SEQ ID NO: 5488 - protein, 44 aa, Artificial Sequence; identical to SEQ ID NO: 5484
  Synthetic polypeptide

SEQ ID NO: 5489 - protein, 44 aa, Artificial Sequence; identical to SEQ ID NO: 5484
  Synthetic polypeptide

SEQ ID NO: 5490 - protein, 44 aa, Artificial Sequence; identical to SEQ ID NO: 5484
  Synthetic polypeptide

SEQ ID NO: 5491 - protein, 44 aa, Artificial Sequence; identical to SEQ ID NO: 5484
  Synthetic polypeptide

SEQ ID NO: 5492 - protein, 44 aa, Artificial Sequence; identical to SEQ ID NO: 5484
  Synthetic polypeptide

SEQ ID NO: 5493 - protein, 44 aa, Artificial Sequence
  Synthetic polypeptide
SMNIRGTWMKGIWELSVPLQLFCKFKFIPSALPGPDHPHAGGGR

SEQ ID NO: 5494 - protein, 44 aa, Artificial Sequence; identical to SEQ ID NO: 5493
  Synthetic polypeptide

SEQ ID NO: 5495 - protein, 44 aa, Artificial Sequence
  Synthetic polypeptide
AFTFTHHSPTYPGQLPVLKPSFLMASTASRPSAPCVSPSSRTTC

SEQ ID NO: 5496 - protein, 44 aa, Artificial Sequence; identical to SEQ ID NO: 5495
  Synthetic polypeptide

SEQ ID NO: 5497 - protein, 44 aa, Artificial Sequence; identical to SEQ ID NO: 5495
  Synthetic polypeptide

SEQ ID NO: 5498 - protein, 44 aa, Artificial Sequence
  Synthetic polypeptide
ALRWRQPRKHTQALLLATHASCVMGSKPLTFRSSISSHHPGERA

SEQ ID NO: 5499 - protein, 44 aa, Artificial Sequence
  Synthetic polypeptide
KCCGVENRLIPTELRREALALQGSLEFDDAGGEGNYTRCDQPRG

SEQ ID NO: 5500 - protein, 44 aa, Artificial Sequence
  Synthetic polypeptide
HLTQCLHTFIFPITLAEVVLRPHSYPSKKTGLTLLAAASIAYIS

SEQ ID NO: 5501 - protein, 44 aa, Artificial Sequence; identical to SEQ ID NO: 5500
  Synthetic polypeptide

SEQ ID NO: 5502 - protein, 44 aa, Artificial Sequence
  Synthetic polypeptide
SMSHLKQSHPGKVCFQARPRTRKSDLGCGAREKMNLQTDQDPSW

SEQ ID NO: 5503 - protein, 44 aa, Artificial Sequence; identical to SEQ ID NO: 5502
  Synthetic polypeptide

SEQ ID NO: 5504 - protein, 44 aa, Artificial Sequence; identical to SEQ ID NO: 5502
  Synthetic polypeptide

SEQ ID NO: 5505 - protein, 44 aa, Artificial Sequence; identical to SEQ ID NO: 5502
  Synthetic polypeptide

SEQ ID NO: 5506 - protein, 44 aa, Artificial Sequence; identical to SEQ ID NO: 5502
  Synthetic polypeptide

SEQ ID NO: 5507 - protein, 44 aa, Artificial Sequence; identical to SEQ ID NO: 5502
  Synthetic polypeptide

SEQ ID NO: 5508 - protein, 44 aa, Artificial Sequence; identical to SEQ ID NO: 5502
  Synthetic polypeptide

SEQ ID NO: 5509 - protein, 44 aa, Artificial Sequence; identical to SEQ ID NO: 5502
  Synthetic polypeptide

SEQ ID NO: 5510 - protein, 44 aa, Artificial Sequence; identical to SEQ ID NO: 5502
  Synthetic polypeptide

SEQ ID NO: 5511 - protein, 44 aa, Artificial Sequence; identical to SEQ ID NO: 5502
  Synthetic polypeptide

SEQ ID NO: 5512 - protein, 43 aa, Artificial Sequence
  Synthetic polypeptide
QHFERQRQKDPLRPGVGEQPGQHSKIPLLKKVFQNQAFAEGPG

SEQ ID NO: 5513 - protein, 43 aa, Artificial Sequence; identical to SEQ ID NO: 5512
  Synthetic polypeptide

SEQ ID NO: 5514 - protein, 43 aa, Artificial Sequence; identical to SEQ ID NO: 5512
  Synthetic polypeptide

SEQ ID NO: 5515 - protein, 43 aa, Artificial Sequence; identical to SEQ ID NO: 5512
  Synthetic polypeptide

SEQ ID NO: 5516 - protein, 43 aa, Artificial Sequence; identical to SEQ ID NO: 5512
  Synthetic polypeptide

SEQ ID NO: 5517 - protein, 43 aa, Artificial Sequence
  Synthetic polypeptide
PGAVAHACNPSTLGGRGGRITRSGDRDHVNIGLCPSVCSLLEF

SEQ ID NO: 5518 - protein, 43 aa, Artificial Sequence; identical to SEQ ID NO: 5517
  Synthetic polypeptide

SEQ ID NO: 5519 - protein, 43 aa, Artificial Sequence; identical to SEQ ID NO: 5517
  Synthetic polypeptide

SEQ ID NO: 5520 - protein, 43 aa, Artificial Sequence
  Synthetic polypeptide
GYLQSRSSSSWEPRPWPSWCSCLCSMAGTSCSSVPWSPRGPSG

SEQ ID NO: 5521 - protein, 43 aa, Artificial Sequence; identical to SEQ ID NO: 5520
  Synthetic polypeptide

SEQ ID NO: 5522 - protein, 43 aa, Artificial Sequence; identical to SEQ ID NO: 5520
  Synthetic polypeptide

SEQ ID NO: 5523 - protein, 43 aa, Artificial Sequence; identical to SEQ ID NO: 5520
  Synthetic polypeptide

SEQ ID NO: 5524 - protein, 43 aa, Artificial Sequence; identical to SEQ ID NO: 5520
  Synthetic polypeptide

SEQ ID NO: 5525 - protein, 43 aa, Artificial Sequence; identical to SEQ ID NO: 5520
  Synthetic polypeptide

SEQ ID NO: 5526 - protein, 43 aa, Artificial Sequence; identical to SEQ ID NO: 5520
  Synthetic polypeptide

SEQ ID NO: 5527 - protein, 43 aa, Artificial Sequence; identical to SEQ ID NO: 5520
  Synthetic polypeptide

SEQ ID NO: 5528 - protein, 43 aa, Artificial Sequence
  Synthetic polypeptide
STRRSAQSGAGRPLLCHSLLLIQAPVGVFRWPGNLSAQPVLSP

SEQ ID NO: 5529 - protein, 43 aa, Artificial Sequence; identical to SEQ ID NO: 5528
  Synthetic polypeptide

SEQ ID NO: 5530 - protein, 43 aa, Artificial Sequence; identical to SEQ ID NO: 5528
  Synthetic polypeptide

SEQ ID NO: 5531 - protein, 43 aa, Artificial Sequence
  Synthetic polypeptide
WSPKMSTPSSSESVNLGMCCLTYKRDSADVTPTVNGSRPTSCP

SEQ ID NO: 5532 - protein, 43 aa, Artificial Sequence; identical to SEQ ID NO: 5531
  Synthetic polypeptide

SEQ ID NO: 5533 - protein, 43 aa, Artificial Sequence; identical to SEQ ID NO: 5531
  Synthetic polypeptide

SEQ ID NO: 5534 - protein, 43 aa, Artificial Sequence
  Synthetic polypeptide
CLPGRVMSELETACGKPMRHKTSSSSLRMGAYVFIGVGAVTML

SEQ ID NO: 5535 - protein, 43 aa, Artificial Sequence
  Synthetic polypeptide
NYVDTQGIWPLESGSRISPRAWLSAFPCEGQASPPGELSGMGS

SEQ ID NO: 5536 - protein, 43 aa, Artificial Sequence; identical to SEQ ID NO: 5535
  Synthetic polypeptide

SEQ ID NO: 5537 - protein, 43 aa, Artificial Sequence; identical to SEQ ID NO: 5535
  Synthetic polypeptide

SEQ ID NO: 5538 - protein, 43 aa, Artificial Sequence
  Synthetic polypeptide
ATYKGLLVQQIIFFLGTTALAFLVLMPVLHGRNLLLFRSLESS

SEQ ID NO: 5539 - protein, 43 aa, Artificial Sequence
  Synthetic polypeptide
PGTVAHADNPCNHFGRPRSGDCLTLGVQDQPGQHAYKCKESRT

SEQ ID NO: 5540 - protein, 43 aa, Artificial Sequence; identical to SEQ ID NO: 5539
  Synthetic polypeptide

SEQ ID NO: 5541 - protein, 43 aa, Artificial Sequence
  Synthetic polypeptide
THTLSNVGGKDSYLPTTATRPSNSKWSCNWSLRQWLLLLGPLR

SEQ ID NO: 5542 - protein, 43 aa, Artificial Sequence
  Synthetic polypeptide
PPRILRILNFNPAFQIFRKVHLSSLSTSRRHRRRWLENSGGRT

SEQ ID NO: 5543 - protein, 43 aa, Artificial Sequence; identical to SEQ ID NO: 5542
  Synthetic polypeptide

SEQ ID NO: 5544 - protein, 43 aa, Artificial Sequence
  Synthetic polypeptide
SQLLRRLMQENGMGLPDAIATEQLHRQQQEKWSGQSQHLLQGA

SEQ ID NO: 5545 - protein, 43 aa, Artificial Sequence
  Synthetic polypeptide
GHSQEESPHWTPNLGALIMDFPASRTMRRSSVQHLFHHRSRRL

SEQ ID NO: 5546 - protein, 43 aa, Artificial Sequence; identical to SEQ ID NO: 5545
  Synthetic polypeptide

SEQ ID NO: 5547 - protein, 43 aa, Artificial Sequence; identical to SEQ ID NO: 5545
  Synthetic polypeptide

SEQ ID NO: 5548 - protein, 43 aa, Artificial Sequence
  Synthetic polypeptide
ETWPCLEMFRLSQYGGRCYWHLMASTASRPSAPCVSPSSRTTC

SEQ ID NO: 5549 - protein, 43 aa, Artificial Sequence; identical to SEQ ID NO: 5548
  Synthetic polypeptide

SEQ ID NO: 5550 - protein, 43 aa, Artificial Sequence; identical to SEQ ID NO: 5548
  Synthetic polypeptide

SEQ ID NO: 5551 - protein, 43 aa, Artificial Sequence
  Synthetic polypeptide
AGHGGSRLYSQHFGRARRADHEVRRSRPSWLTRNANGLHYSDC

SEQ ID NO: 5552 - protein, 43 aa, Artificial Sequence; identical to SEQ ID NO: 5551
  Synthetic polypeptide

SEQ ID NO: 5553 - protein, 43 aa, Artificial Sequence; identical to SEQ ID NO: 5551
  Synthetic polypeptide

SEQ ID NO: 5554 - protein, 43 aa, Artificial Sequence; identical to SEQ ID NO: 5551
  Synthetic polypeptide

SEQ ID NO: 5555 - protein, 43 aa, Artificial Sequence; identical to SEQ ID NO: 5551
  Synthetic polypeptide

SEQ ID NO: 5556 - protein, 43 aa, Artificial Sequence
  Synthetic polypeptide
SLWTPGSNPGFALKASCDCGRGGGRPLCCLLGHTAHLSYEEKG

SEQ ID NO: 5557 - protein, 43 aa, Artificial Sequence; identical to SEQ ID NO: 5556
  Synthetic polypeptide

SEQ ID NO: 5558 - protein, 43 aa, Artificial Sequence
  Synthetic polypeptide
QTQICWHLDLGLPSLQNYNDGCRAPLQWRHCQPSGHEGESDFN

SEQ ID NO: 5559 - protein, 43 aa, Artificial Sequence
  Synthetic polypeptide
GPKGSPAWWSLSSSPCTTTSSTPGPSGTSSTPSRIPCRGLSAH

SEQ ID NO: 5560 - protein, 43 aa, Artificial Sequence; identical to SEQ ID NO: 5559
  Synthetic polypeptide

SEQ ID NO: 5561 - protein, 43 aa, Artificial Sequence; identical to SEQ ID NO: 5559
  Synthetic polypeptide

SEQ ID NO: 5562 - protein, 43 aa, Artificial Sequence; identical to SEQ ID NO: 5559
  Synthetic polypeptide

SEQ ID NO: 5563 - protein, 43 aa, Artificial Sequence
  Synthetic polypeptide
EKIAEDGGMHLLSQLLQRLRCKSTALMRTDFQVLRKQSKEKGS

SEQ ID NO: 5564 - protein, 43 aa, Artificial Sequence; identical to SEQ ID NO: 5563
  Synthetic polypeptide

SEQ ID NO: 5565 - protein, 43 aa, Artificial Sequence
  Synthetic polypeptide
ICLRPPNCALTNSRDGQSILDRYHQRSHFQCQPPHRFRCQLVG

SEQ ID NO: 5566 - protein, 43 aa, Artificial Sequence; identical to SEQ ID NO: 5565
  Synthetic polypeptide

SEQ ID NO: 5567 - protein, 43 aa, Artificial Sequence; identical to SEQ ID NO: 5565
  Synthetic polypeptide

SEQ ID NO: 5568 - protein, 43 aa, Artificial Sequence; identical to SEQ ID NO: 5565
  Synthetic polypeptide

SEQ ID NO: 5569 - protein, 43 aa, Artificial Sequence; identical to SEQ ID NO: 5565
  Synthetic polypeptide

SEQ ID NO: 5570 - protein, 43 aa, Artificial Sequence; identical to SEQ ID NO: 5565
  Synthetic polypeptide

SEQ ID NO: 5571 - protein, 43 aa, Artificial Sequence; identical to SEQ ID NO: 5565
  Synthetic polypeptide

SEQ ID NO: 5572 - protein, 43 aa, Artificial Sequence; identical to SEQ ID NO: 5565
  Synthetic polypeptide

SEQ ID NO: 5573 - protein, 43 aa, Artificial Sequence
  Synthetic polypeptide
GQKIETILANMQYPGDHALPAVHHGQHPAAPGHHHHPLHRSGH

SEQ ID NO: 5574 - protein, 43 aa, Artificial Sequence; identical to SEQ ID NO: 5573
  Synthetic polypeptide

SEQ ID NO: 5575 - protein, 43 aa, Artificial Sequence; identical to SEQ ID NO: 5573
  Synthetic polypeptide

SEQ ID NO: 5576 - protein, 43 aa, Artificial Sequence; identical to SEQ ID NO: 5573
  Synthetic polypeptide

SEQ ID NO: 5577 - protein, 43 aa, Artificial Sequence; identical to SEQ ID NO: 5573
  Synthetic polypeptide

SEQ ID NO: 5578 - protein, 43 aa, Artificial Sequence
  Synthetic polypeptide
MSMRGKAEKEKTGDEAWEGPTSTSHGLRQSTRASSWRMTTRSY

SEQ ID NO: 5579 - protein, 43 aa, Artificial Sequence; identical to SEQ ID NO: 5578
  Synthetic polypeptide

SEQ ID NO: 5580 - protein, 43 aa, Artificial Sequence; identical to SEQ ID NO: 5578
  Synthetic polypeptide

SEQ ID NO: 5581 - protein, 43 aa, Artificial Sequence; identical to SEQ ID NO: 5578
  Synthetic polypeptide

SEQ ID NO: 5582 - protein, 43 aa, Artificial Sequence
  Synthetic polypeptide
YDLPSAPKKVLRRSSKGTSSALESLSRQRECWRMLVLWALLSS

SEQ ID NO: 5583 - protein, 43 aa, Artificial Sequence
  Synthetic polypeptide
NQALCLTFTSYNLVHGNIIGSGIFVSPKGVLENAGSVGLALIV

SEQ ID NO: 5584 - protein, 42 aa, Artificial Sequence
  Synthetic polypeptide
GSVNDYTRKSARPWVPGPVDAQGPSIIDGEPGGRRPLPMPAQ

SEQ ID NO: 5585 - protein, 42 aa, Artificial Sequence; identical to SEQ ID NO: 5584
  Synthetic polypeptide

SEQ ID NO: 5586 - protein, 42 aa, Artificial Sequence; identical to SEQ ID NO: 5584
  Synthetic polypeptide

SEQ ID NO: 5587 - protein, 42 aa, Artificial Sequence
  Synthetic polypeptide
GRARWLTPVIPALWEADAGGSRGTASGLVFILRPEQSTCTWY

SEQ ID NO: 5588 - protein, 42 aa, Artificial Sequence
  Synthetic polypeptide
FFEHTRRSPTSSRGVPSTCYVLSPEVSMTTSLFQVYVLLAME

SEQ ID NO: 5589 - protein, 42 aa, Artificial Sequence; identical to SEQ ID NO: 5588
  Synthetic polypeptide

SEQ ID NO: 5590 - protein, 42 aa, Artificial Sequence; identical to SEQ ID NO: 5588
  Synthetic polypeptide

SEQ ID NO: 5591 - protein, 42 aa, Artificial Sequence; identical to SEQ ID NO: 5588
  Synthetic polypeptide

SEQ ID NO: 5592 - protein, 42 aa, Artificial Sequence; identical to SEQ ID NO: 5588
  Synthetic polypeptide

SEQ ID NO: 5593 - protein, 42 aa, Artificial Sequence
  Synthetic polypeptide
WKTIKMFIRAGRVNKLRHISTVEYSADGSTESKKLGKEISNM

SEQ ID NO: 5594 - protein, 42 aa, Artificial Sequence; identical to SEQ ID NO: 5593
  Synthetic polypeptide

SEQ ID NO: 5595 - protein, 42 aa, Artificial Sequence
  Synthetic polypeptide
FYKCLEIPPSLFSFLPTCEEGASFPFDHDFTVCPVFCRQTRR

SEQ ID NO: 5596 - protein, 42 aa, Artificial Sequence; identical to SEQ ID NO: 5595
  Synthetic polypeptide

SEQ ID NO: 5597 - protein, 42 aa, Artificial Sequence; identical to SEQ ID NO: 5595
  Synthetic polypeptide

SEQ ID NO: 5598 - protein, 42 aa, Artificial Sequence; identical to SEQ ID NO: 5595
  Synthetic polypeptide

SEQ ID NO: 5599 - protein, 42 aa, Artificial Sequence; identical to SEQ ID NO: 5595
  Synthetic polypeptide

SEQ ID NO: 5600 - protein, 42 aa, Artificial Sequence
  Synthetic polypeptide
GGLTSAMPGLLTLGHYGFGRFRTEAQSFTFNLYGSRRPVNNF

SEQ ID NO: 5601 - protein, 42 aa, Artificial Sequence; identical to SEQ ID NO: 5600
  Synthetic polypeptide

SEQ ID NO: 5602 - protein, 42 aa, Artificial Sequence; identical to SEQ ID NO: 5600
  Synthetic polypeptide

SEQ ID NO: 5603 - protein, 42 aa, Artificial Sequence; identical to SEQ ID NO: 5600
  Synthetic polypeptide

SEQ ID NO: 5604 - protein, 42 aa, Artificial Sequence; identical to SEQ ID NO: 5600
  Synthetic polypeptide

SEQ ID NO: 5605 - protein, 42 aa, Artificial Sequence; identical to SEQ ID NO: 5600
  Synthetic polypeptide

SEQ ID NO: 5606 - protein, 42 aa, Artificial Sequence
  Synthetic polypeptide
VFFSAQALSWPAAIHVRYDLLLLAFTMIVRLPQPRGTFQEEA

SEQ ID NO: 5607 - protein, 42 aa, Artificial Sequence
  Synthetic polypeptide
SQHFGRPSSLWTLTRSWWRSCRPKSSCGWCWWPWVQGCCCWG

SEQ ID NO: 5608 - protein, 42 aa, Artificial Sequence; identical to SEQ ID NO: 5607
  Synthetic polypeptide

SEQ ID NO: 5609 - protein, 42 aa, Artificial Sequence
  Synthetic polypeptide
GQEFKTSLANPVSTKNKKFCRAWWRAPVIPATREAEEPQRTH

SEQ ID NO: 5610 - protein, 42 aa, Artificial Sequence; identical to SEQ ID NO: 5609
  Synthetic polypeptide

SEQ ID NO: 5611 - protein, 42 aa, Artificial Sequence; identical to SEQ ID NO: 5609
  Synthetic polypeptide

SEQ ID NO: 5612 - protein, 42 aa, Artificial Sequence; identical to SEQ ID NO: 5609
  Synthetic polypeptide

SEQ ID NO: 5613 - protein, 42 aa, Artificial Sequence; identical to SEQ ID NO: 5609
  Synthetic polypeptide

SEQ ID NO: 5614 - protein, 42 aa, Artificial Sequence; identical to SEQ ID NO: 5609
  Synthetic polypeptide

SEQ ID NO: 5615 - protein, 42 aa, Artificial Sequence; identical to SEQ ID NO: 5609
  Synthetic polypeptide

SEQ ID NO: 5616 - protein, 42 aa, Artificial Sequence; identical to SEQ ID NO: 5609
  Synthetic polypeptide

SEQ ID NO: 5617 - protein, 42 aa, Artificial Sequence; identical to SEQ ID NO: 5609
  Synthetic polypeptide

SEQ ID NO: 5618 - protein, 42 aa, Artificial Sequence; identical to SEQ ID NO: 5609
  Synthetic polypeptide

SEQ ID NO: 5619 - protein, 42 aa, Artificial Sequence
  Synthetic polypeptide
GGPGGVSQSYGDFPSGVPGLRLSSHRAEPNPLPAFITLYPSK

SEQ ID NO: 5620 - protein, 42 aa, Artificial Sequence
  Synthetic polypeptide
GYLQRSSSSWEPRPWPSWCSCLCSMAGTSCSSVPWSPRGPSG

SEQ ID NO: 5621 - protein, 42 aa, Artificial Sequence; identical to SEQ ID NO: 5620
  Synthetic polypeptide

SEQ ID NO: 5622 - protein, 42 aa, Artificial Sequence; identical to SEQ ID NO: 5620
  Synthetic polypeptide

SEQ ID NO: 5623 - protein, 42 aa, Artificial Sequence; identical to SEQ ID NO: 5620
  Synthetic polypeptide

SEQ ID NO: 5624 - protein, 42 aa, Artificial Sequence; identical to SEQ ID NO: 5620
  Synthetic polypeptide

SEQ ID NO: 5625 - protein, 42 aa, Artificial Sequence; identical to SEQ ID NO: 5620
  Synthetic polypeptide

SEQ ID NO: 5626 - protein, 42 aa, Artificial Sequence; identical to SEQ ID NO: 5620
  Synthetic polypeptide

SEQ ID NO: 5627 - protein, 42 aa, Artificial Sequence; identical to SEQ ID NO: 5620
  Synthetic polypeptide

SEQ ID NO: 5628 - protein, 42 aa, Artificial Sequence
  Synthetic polypeptide
NKRGHKQMEEHSMLMDRKNQYCENGHTAQGSCSQCRNRICCC

SEQ ID NO: 5629 - protein, 42 aa, Artificial Sequence; identical to SEQ ID NO: 5628
  Synthetic polypeptide

SEQ ID NO: 5630 - protein, 42 aa, Artificial Sequence; identical to SEQ ID NO: 5628
  Synthetic polypeptide

SEQ ID NO: 5631 - protein, 42 aa, Artificial Sequence; identical to SEQ ID NO: 5628
  Synthetic polypeptide

SEQ ID NO: 5632 - protein, 42 aa, Artificial Sequence; identical to SEQ ID NO: 5628
  Synthetic polypeptide

SEQ ID NO: 5633 - protein, 42 aa, Artificial Sequence; identical to SEQ ID NO: 5628
  Synthetic polypeptide

SEQ ID NO: 5634 - protein, 42 aa, Artificial Sequence; identical to SEQ ID NO: 5628
  Synthetic polypeptide

SEQ ID NO: 5635 - protein, 42 aa, Artificial Sequence; identical to SEQ ID NO: 5628
  Synthetic polypeptide

SEQ ID NO: 5636 - protein, 42 aa, Artificial Sequence
  Synthetic polypeptide
PGTVAHACNPSTSGGRGKQIIWGQEFETSLDNMGIFRPAGHS

SEQ ID NO: 5637 - protein, 42 aa, Artificial Sequence; identical to SEQ ID NO: 5636
  Synthetic polypeptide

SEQ ID NO: 5638 - protein, 42 aa, Artificial Sequence; identical to SEQ ID NO: 5636
  Synthetic polypeptide

SEQ ID NO: 5639 - protein, 42 aa, Artificial Sequence
  Synthetic polypeptide
GPGMVISNTLSRLHVGIWSHGELHQEDISPDPAGRRGLQPGW

SEQ ID NO: 5640 - protein, 42 aa, Artificial Sequence; identical to SEQ ID NO: 5639
  Synthetic polypeptide

SEQ ID NO: 5641 - protein, 42 aa, Artificial Sequence; identical to SEQ ID NO: 5639
  Synthetic polypeptide

SEQ ID NO: 5642 - protein, 42 aa, Artificial Sequence
  Synthetic polypeptide
KVPFMRNGPSPDMKPPRTLILDFSASKTFHRKPEKVRNHQRR

SEQ ID NO: 5643 - protein, 42 aa, Artificial Sequence; identical to SEQ ID NO: 5642
  Synthetic polypeptide

SEQ ID NO: 5644 - protein, 42 aa, Artificial Sequence; identical to SEQ ID NO: 5642
  Synthetic polypeptide

SEQ ID NO: 5645 - protein, 42 aa, Artificial Sequence; identical to SEQ ID NO: 5642
  Synthetic polypeptide

SEQ ID NO: 5646 - protein, 42 aa, Artificial Sequence; identical to SEQ ID NO: 5642
  Synthetic polypeptide

SEQ ID NO: 5647 - protein, 42 aa, Artificial Sequence; identical to SEQ ID NO: 5642
  Synthetic polypeptide

SEQ ID NO: 5648 - protein, 42 aa, Artificial Sequence; identical to SEQ ID NO: 5642
  Synthetic polypeptide

SEQ ID NO: 5649 - protein, 42 aa, Artificial Sequence; identical to SEQ ID NO: 5642
  Synthetic polypeptide

SEQ ID NO: 5650 - protein, 42 aa, Artificial Sequence
  Synthetic polypeptide
NLKNIMLSERSQTQKAMYHGIPFMSNVQNRCEKLACDVWISA

SEQ ID NO: 5651 - protein, 42 aa, Artificial Sequence; identical to SEQ ID NO: 5650
  Synthetic polypeptide

SEQ ID NO: 5652 - protein, 42 aa, Artificial Sequence; identical to SEQ ID NO: 5650
  Synthetic polypeptide

SEQ ID NO: 5653 - protein, 42 aa, Artificial Sequence; identical to SEQ ID NO: 5650
  Synthetic polypeptide

SEQ ID NO: 5654 - protein, 42 aa, Artificial Sequence; identical to SEQ ID NO: 5650
  Synthetic polypeptide

SEQ ID NO: 5655 - protein, 42 aa, Artificial Sequence
  Synthetic polypeptide
KYKKLARFPWGSASGSVSEWGWLWGLRILCRPSARPSRACSA

SEQ ID NO: 5656 - protein, 42 aa, Artificial Sequence; identical to SEQ ID NO: 5655
  Synthetic polypeptide

SEQ ID NO: 5657 - protein, 42 aa, Artificial Sequence; identical to SEQ ID NO: 5655
  Synthetic polypeptide

SEQ ID NO: 5658 - protein, 42 aa, Artificial Sequence
  Synthetic polypeptide
SQHLLTEDARTEAGRSLKMLSPPRRMMMMMMTPLQRRKKQIT

SEQ ID NO: 5659 - protein, 42 aa, Artificial Sequence
  Synthetic polypeptide
SGAVAHACNPSTLGGRGRRIMRNTWTSVSLSNRIHLVILTQD

SEQ ID NO: 5660 - protein, 42 aa, Artificial Sequence
  Synthetic polypeptide
SSGNFRATNQIPNLSTRSVRGCARGVARGALPVERCRRDQLD

SEQ ID NO: 5661 - protein, 42 aa, Artificial Sequence; identical to SEQ ID NO: 5660
  Synthetic polypeptide

SEQ ID NO: 5662 - protein, 42 aa, Artificial Sequence; identical to SEQ ID NO: 5660
  Synthetic polypeptide

SEQ ID NO: 5663 - protein, 42 aa, Artificial Sequence; identical to SEQ ID NO: 5660
  Synthetic polypeptide

SEQ ID NO: 5664 - protein, 42 aa, Artificial Sequence; identical to SEQ ID NO: 5660
  Synthetic polypeptide

SEQ ID NO: 5665 - protein, 42 aa, Artificial Sequence; identical to SEQ ID NO: 5660
  Synthetic polypeptide

SEQ ID NO: 5666 - protein, 42 aa, Artificial Sequence; identical to SEQ ID NO: 5660
  Synthetic polypeptide

SEQ ID NO: 5667 - protein, 42 aa, Artificial Sequence; identical to SEQ ID NO: 5660
  Synthetic polypeptide

SEQ ID NO: 5668 - protein, 42 aa, Artificial Sequence; identical to SEQ ID NO: 5660
  Synthetic polypeptide

SEQ ID NO: 5669 - protein, 41 aa, Artificial Sequence
  Synthetic polypeptide
ERESELESQTDQGLNPLSYLLSYLGEVTEFSDPQGVGRRKS

SEQ ID NO: 5670 - protein, 41 aa, Artificial Sequence; identical to SEQ ID NO: 5669
  Synthetic polypeptide

SEQ ID NO: 5671 - protein, 41 aa, Artificial Sequence; identical to SEQ ID NO: 5669
  Synthetic polypeptide

SEQ ID NO: 5672 - protein, 41 aa, Artificial Sequence; identical to SEQ ID NO: 5669
  Synthetic polypeptide

SEQ ID NO: 5673 - protein, 41 aa, Artificial Sequence; identical to SEQ ID NO: 5669
  Synthetic polypeptide

SEQ ID NO: 5674 - protein, 41 aa, Artificial Sequence; identical to SEQ ID NO: 5669
  Synthetic polypeptide

SEQ ID NO: 5675 - protein, 41 aa, Artificial Sequence; identical to SEQ ID NO: 5669
  Synthetic polypeptide

SEQ ID NO: 5676 - protein, 41 aa, Artificial Sequence; identical to SEQ ID NO: 5669
  Synthetic polypeptide

SEQ ID NO: 5677 - protein, 41 aa, Artificial Sequence; identical to SEQ ID NO: 5669
  Synthetic polypeptide

SEQ ID NO: 5678 - protein, 41 aa, Artificial Sequence; identical to SEQ ID NO: 5669
  Synthetic polypeptide

SEQ ID NO: 5679 - protein, 41 aa, Artificial Sequence; identical to SEQ ID NO: 5669
  Synthetic polypeptide

SEQ ID NO: 5680 - protein, 41 aa, Artificial Sequence; identical to SEQ ID NO: 5669
  Synthetic polypeptide

SEQ ID NO: 5681 - protein, 41 aa, Artificial Sequence; identical to SEQ ID NO: 5669
  Synthetic polypeptide

SEQ ID NO: 5682 - protein, 41 aa, Artificial Sequence; identical to SEQ ID NO: 5669
  Synthetic polypeptide

SEQ ID NO: 5683 - protein, 41 aa, Artificial Sequence; identical to SEQ ID NO: 5669
  Synthetic polypeptide

SEQ ID NO: 5684 - protein, 41 aa, Artificial Sequence; identical to SEQ ID NO: 5669
  Synthetic polypeptide

SEQ ID NO: 5685 - protein, 41 aa, Artificial Sequence
  Synthetic polypeptide
SQHFGRPRQLGHEVISRKKRMAKYEKAEIKEMGEMHRELNA

SEQ ID NO: 5686 - protein, 41 aa, Artificial Sequence; identical to SEQ ID NO: 5685
  Synthetic polypeptide

SEQ ID NO: 5687 - protein, 41 aa, Artificial Sequence; identical to SEQ ID NO: 5685
  Synthetic polypeptide

SEQ ID NO: 5688 - protein, 41 aa, Artificial Sequence
  Synthetic polypeptide
VFSPHTKGQHLSDATLAAVWHCELGHWLCPGPEARRLHQSQ

SEQ ID NO: 5689 - protein, 41 aa, Artificial Sequence; identical to SEQ ID NO: 5688
  Synthetic polypeptide

SEQ ID NO: 5690 - protein, 41 aa, Artificial Sequence; identical to SEQ ID NO: 5688
  Synthetic polypeptide

SEQ ID NO: 5691 - protein, 41 aa, Artificial Sequence
  Synthetic polypeptide
NVTSLNLQLENLRMKLPKPHAECHQVWQHDRGPCDAPAPEC

SEQ ID NO: 5692 - protein, 41 aa, Artificial Sequence
  Synthetic polypeptide
SLILKIFLFVVPYLTIFRSNLFMSSGLGKGEWLCGEPFLGI

SEQ ID NO: 5693 - protein, 41 aa, Artificial Sequence; identical to SEQ ID NO: 5692
  Synthetic polypeptide

SEQ ID NO: 5694 - protein, 41 aa, Artificial Sequence; identical to SEQ ID NO: 5692
  Synthetic polypeptide

SEQ ID NO: 5695 - protein, 41 aa, Artificial Sequence; identical to SEQ ID NO: 5692
  Synthetic polypeptide

SEQ ID NO: 5696 - protein, 41 aa, Artificial Sequence; identical to SEQ ID NO: 5692
  Synthetic polypeptide

SEQ ID NO: 5697 - protein, 41 aa, Artificial Sequence
  Synthetic polypeptide
NPVSTKNTKISPVCWHTPVIPATWEAEARELLDPRRRRRRP

SEQ ID NO: 5698 - protein, 41 aa, Artificial Sequence; identical to SEQ ID NO: 5697
  Synthetic polypeptide

SEQ ID NO: 5699 - protein, 41 aa, Artificial Sequence; identical to SEQ ID NO: 5697
  Synthetic polypeptide

SEQ ID NO: 5700 - protein, 41 aa, Artificial Sequence; identical to SEQ ID NO: 5697
  Synthetic polypeptide

SEQ ID NO: 5701 - protein, 41 aa, Artificial Sequence; identical to SEQ ID NO: 5697
  Synthetic polypeptide

SEQ ID NO: 5702 - protein, 41 aa, Artificial Sequence; identical to SEQ ID NO: 5697
  Synthetic polypeptide

SEQ ID NO: 5703 - protein, 41 aa, Artificial Sequence; identical to SEQ ID NO: 5697
  Synthetic polypeptide

SEQ ID NO: 5704 - protein, 41 aa, Artificial Sequence
  Synthetic polypeptide
YYLQIIGWFIKSSNEATNITPKHNMKAFLDELKAENIKKFL

SEQ ID NO: 5705 - protein, 41 aa, Artificial Sequence
  Synthetic polypeptide
ETSAYDLRSSDRPAQETSHQFQIRPKCDCERYFHVFGWSDS

SEQ ID NO: 5706 - protein, 41 aa, Artificial Sequence
  Synthetic polypeptide
LSYIKHGQMLKARGRLCSSAQLQQDPRRELRVMASPLSQEV

SEQ ID NO: 5707 - protein, 41 aa, Artificial Sequence
  Synthetic polypeptide
AALSVANQDSRIIWVVVGRPVSHAGLRIGIGILTTSRRSVG

SEQ ID NO: 5708 - protein, 41 aa, Artificial Sequence
  Synthetic polypeptide
DSLIQTSSGVGQSLVQILTPPLINEKLLRLLCHEKATLQFS

SEQ ID NO: 5709 - protein, 41 aa, Artificial Sequence; identical to SEQ ID NO: 5708
  Synthetic polypeptide

SEQ ID NO: 5710 - protein, 41 aa, Artificial Sequence
  Synthetic polypeptide
AVKRKAITIMDEYVLYYYSNLSVPIGRFQNRVHLMGDILCN

SEQ ID NO: 5711 - protein, 41 aa, Artificial Sequence
  Synthetic polypeptide
VGVEVFLWASPDCRDQGRNSLCPGHLQAPVRRRVLPAMPSQ

SEQ ID NO: 5712 - protein, 41 aa, Artificial Sequence; identical to SEQ ID NO: 5711
  Synthetic polypeptide

SEQ ID NO: 5713 - protein, 41 aa, Artificial Sequence
  Synthetic polypeptide
ADPNVTYGLQLIMNLYWLINCNKVGMPRCLGNSSPSRGPLS

SEQ ID NO: 5714 - protein, 41 aa, Artificial Sequence; identical to SEQ ID NO: 5713
  Synthetic polypeptide

SEQ ID NO: 5715 - protein, 41 aa, Artificial Sequence; identical to SEQ ID NO: 5713
  Synthetic polypeptide

SEQ ID NO: 5716 - protein, 41 aa, Artificial Sequence; identical to SEQ ID NO: 5713
  Synthetic polypeptide

SEQ ID NO: 5717 - protein, 41 aa, Artificial Sequence; identical to SEQ ID NO: 5713
  Synthetic polypeptide

SEQ ID NO: 5718 - protein, 41 aa, Artificial Sequence; identical to SEQ ID NO: 5713
  Synthetic polypeptide

SEQ ID NO: 5719 - protein, 41 aa, Artificial Sequence; identical to SEQ ID NO: 5713
  Synthetic polypeptide

SEQ ID NO: 5720 - protein, 41 aa, Artificial Sequence; identical to SEQ ID NO: 5713
  Synthetic polypeptide

SEQ ID NO: 5721 - protein, 41 aa, Artificial Sequence
  Synthetic polypeptide
WITPPGFQCWPLHSLDFWREAPRSHGLDHAHFCCPVHIWRS

SEQ ID NO: 5722 - protein, 41 aa, Artificial Sequence; identical to SEQ ID NO: 5721
  Synthetic polypeptide

SEQ ID NO: 5723 - protein, 41 aa, Artificial Sequence; identical to SEQ ID NO: 5721
  Synthetic polypeptide

SEQ ID NO: 5724 - protein, 41 aa, Artificial Sequence; identical to SEQ ID NO: 5721
  Synthetic polypeptide

SEQ ID NO: 5725 - protein, 41 aa, Artificial Sequence
  Synthetic polypeptide
AGRGGSCLSSQHFGRPRWANHLRKCILQQRPIPAPGGPKEE

SEQ ID NO: 5726 - protein, 41 aa, Artificial Sequence; identical to SEQ ID NO: 5725
  Synthetic polypeptide

SEQ ID NO: 5727 - protein, 41 aa, Artificial Sequence; identical to SEQ ID NO: 5725
  Synthetic polypeptide

SEQ ID NO: 5728 - protein, 41 aa, Artificial Sequence; identical to SEQ ID NO: 5725
  Synthetic polypeptide

SEQ ID NO: 5729 - protein, 41 aa, Artificial Sequence
  Synthetic polypeptide
PPGRGPWRLGSTVWIKRKAQHPGTDRTHWSPRTRPDSPSHP

SEQ ID NO: 5730 - protein, 41 aa, Artificial Sequence; identical to SEQ ID NO: 5729
  Synthetic polypeptide

SEQ ID NO: 5731 - protein, 41 aa, Artificial Sequence; identical to SEQ ID NO: 5729
  Synthetic polypeptide

SEQ ID NO: 5732 - protein, 41 aa, Artificial Sequence; identical to SEQ ID NO: 5729
  Synthetic polypeptide

SEQ ID NO: 5733 - protein, 41 aa, Artificial Sequence; identical to SEQ ID NO: 5729
  Synthetic polypeptide

SEQ ID NO: 5734 - protein, 41 aa, Artificial Sequence; identical to SEQ ID NO: 5729
  Synthetic polypeptide

SEQ ID NO: 5735 - protein, 41 aa, Artificial Sequence
  Synthetic polypeptide
SQHFGKPRRVDHLRSGVQDQPGQHDFDLIRMQTPKNHVLLL

SEQ ID NO: 5736 - protein, 41 aa, Artificial Sequence; identical to SEQ ID NO: 5735
  Synthetic polypeptide

SEQ ID NO: 5737 - protein, 40 aa, Artificial Sequence
  Synthetic polypeptide
SQHFGRPRQVDHEVKRSRPSWPTWLRDSGPRTGHICTPAL

SEQ ID NO: 5738 - protein, 40 aa, Artificial Sequence
  Synthetic polypeptide
YCRSHGGLAWLSDRGGVPLPAGLLPHRHQLPAQQAHGPQE

SEQ ID NO: 5739 - protein, 40 aa, Artificial Sequence
  Synthetic polypeptide
SEASLKMKSRAKGEESFRGRWTIEEGNCDNWRGKENLYCL

SEQ ID NO: 5740 - protein, 40 aa, Artificial Sequence; identical to SEQ ID NO: 5739
  Synthetic polypeptide

SEQ ID NO: 5741 - protein, 40 aa, Artificial Sequence; identical to SEQ ID NO: 5739
  Synthetic polypeptide

SEQ ID NO: 5742 - protein, 40 aa, Artificial Sequence; identical to SEQ ID NO: 5739
  Synthetic polypeptide

SEQ ID NO: 5743 - protein, 40 aa, Artificial Sequence; identical to SEQ ID NO: 5739
  Synthetic polypeptide

SEQ ID NO: 5744 - protein, 40 aa, Artificial Sequence
  Synthetic polypeptide
EVGLYASCLVVFDLENIFVRCPIFNDLQIKSFYELRTWKR

SEQ ID NO: 5745 - protein, 40 aa, Artificial Sequence; identical to SEQ ID NO: 5744
  Synthetic polypeptide

SEQ ID NO: 5746 - protein, 40 aa, Artificial Sequence; identical to SEQ ID NO: 5744
  Synthetic polypeptide

SEQ ID NO: 5747 - protein, 40 aa, Artificial Sequence; identical to SEQ ID NO: 5744
  Synthetic polypeptide

SEQ ID NO: 5748 - protein, 40 aa, Artificial Sequence; identical to SEQ ID NO: 5744
  Synthetic polypeptide

SEQ ID NO: 5749 - protein, 40 aa, Artificial Sequence
  Synthetic polypeptide
PRVIRQPWPPEVPGLQTDSRSLSAQCRPWWMMTPTTPRLW

SEQ ID NO: 5750 - protein, 40 aa, Artificial Sequence; identical to SEQ ID NO: 5749
  Synthetic polypeptide

SEQ ID NO: 5751 - protein, 40 aa, Artificial Sequence; identical to SEQ ID NO: 5749
  Synthetic polypeptide

SEQ ID NO: 5752 - protein, 40 aa, Artificial Sequence; identical to SEQ ID NO: 5749
  Synthetic polypeptide

SEQ ID NO: 5753 - protein, 40 aa, Artificial Sequence; identical to SEQ ID NO: 5749
  Synthetic polypeptide

SEQ ID NO: 5754 - protein, 40 aa, Artificial Sequence; identical to SEQ ID NO: 5749
  Synthetic polypeptide

SEQ ID NO: 5755 - protein, 40 aa, Artificial Sequence; identical to SEQ ID NO: 5749
  Synthetic polypeptide

SEQ ID NO: 5756 - protein, 40 aa, Artificial Sequence; identical to SEQ ID NO: 5749
  Synthetic polypeptide

SEQ ID NO: 5757 - protein, 40 aa, Artificial Sequence; identical to SEQ ID NO: 5749
  Synthetic polypeptide

SEQ ID NO: 5758 - protein, 40 aa, Artificial Sequence; identical to SEQ ID NO: 5749
  Synthetic polypeptide

SEQ ID NO: 5759 - protein, 40 aa, Artificial Sequence
  Synthetic polypeptide
SSFPNPSSFKVPVSVLAQRHTSQTAGWPPCTFIRSFTFSP

SEQ ID NO: 5760 - protein, 40 aa, Artificial Sequence; identical to SEQ ID NO: 5759
  Synthetic polypeptide

SEQ ID NO: 5761 - protein, 40 aa, Artificial Sequence
  Synthetic polypeptide
IPVLTLPLLSGLEQVTESLSALVTLFYDEDNIICKLLGGL

SEQ ID NO: 5762 - protein, 40 aa, Artificial Sequence; identical to SEQ ID NO: 5761
  Synthetic polypeptide

SEQ ID NO: 5763 - protein, 40 aa, Artificial Sequence; identical to SEQ ID NO: 5761
  Synthetic polypeptide

SEQ ID NO: 5764 - protein, 40 aa, Artificial Sequence; identical to SEQ ID NO: 5761
  Synthetic polypeptide

SEQ ID NO: 5765 - protein, 40 aa, Artificial Sequence; identical to SEQ ID NO: 5761
  Synthetic polypeptide

SEQ ID NO: 5766 - protein, 40 aa, Artificial Sequence
  Synthetic polypeptide
IKRQRESYALAGETHLDYQGEAIDYFYSTRKRLRKHCASP

SEQ ID NO: 5767 - protein, 40 aa, Artificial Sequence; identical to SEQ ID NO: 5766
  Synthetic polypeptide

SEQ ID NO: 5768 - protein, 40 aa, Artificial Sequence; identical to SEQ ID NO: 5766
  Synthetic polypeptide

SEQ ID NO: 5769 - protein, 40 aa, Artificial Sequence; identical to SEQ ID NO: 5766
  Synthetic polypeptide

SEQ ID NO: 5770 - protein, 40 aa, Artificial Sequence; identical to SEQ ID NO: 5766
  Synthetic polypeptide

SEQ ID NO: 5771 - protein, 40 aa, Artificial Sequence
  Synthetic polypeptide
GAPLPGRDPVWEVRSVSAQPPRLRREETLRPATAPSQKNQ

SEQ ID NO: 5772 - protein, 40 aa, Artificial Sequence
  Synthetic polypeptide
PQKGIWPLESGSRISPRAWLSAFPCEGQASPPGELSGMGS

SEQ ID NO: 5773 - protein, 40 aa, Artificial Sequence; identical to SEQ ID NO: 5772
  Synthetic polypeptide

SEQ ID NO: 5774 - protein, 40 aa, Artificial Sequence; identical to SEQ ID NO: 5772
  Synthetic polypeptide

SEQ ID NO: 5775 - protein, 40 aa, Artificial Sequence
  Synthetic polypeptide
AMTALLHSCLGHFQRASSVQYDINLVETSSTSAHHSHEQH

SEQ ID NO: 5776 - protein, 40 aa, Artificial Sequence; identical to SEQ ID NO: 5775
  Synthetic polypeptide

SEQ ID NO: 5777 - protein, 40 aa, Artificial Sequence
  Synthetic polypeptide
PWARDLNALGLSFLTCEMGISFSESGSCRLVATWCPTRRG

SEQ ID NO: 5778 - protein, 40 aa, Artificial Sequence; identical to SEQ ID NO: 5777
  Synthetic polypeptide

SEQ ID NO: 5779 - protein, 40 aa, Artificial Sequence
  Synthetic polypeptide
KYPAAKKVLTRCSSLILAFSASINCWVSTAIGCCSGQLCS

SEQ ID NO: 5780 - protein, 40 aa, Artificial Sequence; identical to SEQ ID NO: 5779
  Synthetic polypeptide

SEQ ID NO: 5781 - protein, 40 aa, Artificial Sequence
  Synthetic polypeptide
KWPYCPRLPFSWAWGCCSPWSAFPWSSMTGPAHRVVTKAT

SEQ ID NO: 5782 - protein, 40 aa, Artificial Sequence; identical to SEQ ID NO: 5781
  Synthetic polypeptide

SEQ ID NO: 5783 - protein, 40 aa, Artificial Sequence; identical to SEQ ID NO: 5781
  Synthetic polypeptide

SEQ ID NO: 5784 - protein, 40 aa, Artificial Sequence; identical to SEQ ID NO: 5781
  Synthetic polypeptide

SEQ ID NO: 5785 - protein, 40 aa, Artificial Sequence
  Synthetic polypeptide
WLRAVDRAAGQPQGLDQCSHPDLLLTWPGLRQPDRLRQLQ

SEQ ID NO: 5786 - protein, 40 aa, Artificial Sequence; identical to SEQ ID NO: 5785
  Synthetic polypeptide

SEQ ID NO: 5787 - protein, 40 aa, Artificial Sequence; identical to SEQ ID NO: 5785
  Synthetic polypeptide

SEQ ID NO: 5788 - protein, 40 aa, Artificial Sequence; identical to SEQ ID NO: 5785
  Synthetic polypeptide

SEQ ID NO: 5789 - protein, 40 aa, Artificial Sequence
  Synthetic polypeptide
GRVRCLTPVIPPLWEDEPDRSLKLRSSRPAWPTCSLRRSV

SEQ ID NO: 5790 - protein, 40 aa, Artificial Sequence; identical to SEQ ID NO: 5789
  Synthetic polypeptide

SEQ ID NO: 5791 - protein, 40 aa, Artificial Sequence
  Synthetic polypeptide
VIWRTWLPSHQSFLNCKMAKKKKKKSLLYTNHGLMVSSST

SEQ ID NO: 5792 - protein, 40 aa, Artificial Sequence
  Synthetic polypeptide
SQHFGRRRQADHLKLGVQDQPEQHGETPSLLKIQNYSVIV

SEQ ID NO: 5793 - protein, 40 aa, Artificial Sequence
  Synthetic polypeptide
HPVILVEATESRKSPSSALSGILIHKIRNSEYQELNLHRP

SEQ ID NO: 5794 - protein, 40 aa, Artificial Sequence; identical to SEQ ID NO: 5793
  Synthetic polypeptide

SEQ ID NO: 5795 - protein, 40 aa, Artificial Sequence; identical to SEQ ID NO: 5793
  Synthetic polypeptide

SEQ ID NO: 5796 - protein, 40 aa, Artificial Sequence; identical to SEQ ID NO: 5793
  Synthetic polypeptide

SEQ ID NO: 5797 - protein, 40 aa, Artificial Sequence; identical to SEQ ID NO: 5793
  Synthetic polypeptide

SEQ ID NO: 5798 - protein, 40 aa, Artificial Sequence
  Synthetic polypeptide
GHRTVHSQIVEMDKVFWTDIINEAIFSANRLTGSDVNLLA

SEQ ID NO: 5799 - protein, 39 aa, Artificial Sequence
  Synthetic polypeptide
LAFSGLQLLSTIARGGSVRGSAGHCPLQPAPSLGPLPTQ

SEQ ID NO: 5800 - protein, 39 aa, Artificial Sequence; identical to SEQ ID NO: 5799
  Synthetic polypeptide

SEQ ID NO: 5801 - protein, 39 aa, Artificial Sequence; identical to SEQ ID NO: 5799
  Synthetic polypeptide

SEQ ID NO: 5802 - protein, 39 aa, Artificial Sequence
  Synthetic polypeptide
LTPVIPALWEAEVGRSRDQEIKTILANMVLGSSATTSSR

SEQ ID NO: 5803 - protein, 39 aa, Artificial Sequence; identical to SEQ ID NO: 5802
  Synthetic polypeptide

SEQ ID NO: 5804 - protein, 39 aa, Artificial Sequence
  Synthetic polypeptide
GRAQWLTPAIPALWEAEADRSLEETVFHKMIFLLKLPSP

SEQ ID NO: 5805 - protein, 39 aa, Artificial Sequence; identical to SEQ ID NO: 5804
  Synthetic polypeptide

SEQ ID NO: 5806 - protein, 39 aa, Artificial Sequence; identical to SEQ ID NO: 5804
  Synthetic polypeptide

SEQ ID NO: 5807 - protein, 39 aa, Artificial Sequence; identical to SEQ ID NO: 5804
  Synthetic polypeptide

SEQ ID NO: 5808 - protein, 39 aa, Artificial Sequence
  Synthetic polypeptide
FPAPGIVPEMYCSGVLSGFWLPPPMFLYLYYKDGSCLCP

SEQ ID NO: 5809 - protein, 39 aa, Artificial Sequence
  Synthetic polypeptide
GLPTHACCTACGIQTKKEKNEDSENDWSINIVSILRLAG

SEQ ID NO: 5810 - protein, 39 aa, Artificial Sequence; identical to SEQ ID NO: 5809
  Synthetic polypeptide

SEQ ID NO: 5811 - protein, 39 aa, Artificial Sequence; identical to SEQ ID NO: 5809
  Synthetic polypeptide

SEQ ID NO: 5812 - protein, 39 aa, Artificial Sequence; identical to SEQ ID NO: 5809
  Synthetic polypeptide

SEQ ID NO: 5813 - protein, 39 aa, Artificial Sequence; identical to SEQ ID NO: 5809
  Synthetic polypeptide

SEQ ID NO: 5814 - protein, 39 aa, Artificial Sequence; identical to SEQ ID NO: 5809
  Synthetic polypeptide

SEQ ID NO: 5815 - protein, 39 aa, Artificial Sequence
  Synthetic polypeptide
MDMVAHTCNPSTLRGQGSRALARSQWHALELPSLQNYEL

SEQ ID NO: 5816 - protein, 39 aa, Artificial Sequence
  Synthetic polypeptide
AQKSKTSLGDMGSALLPHQHTTRPVPRLPGLAVSESNPS

SEQ ID NO: 5817 - protein, 39 aa, Artificial Sequence
  Synthetic polypeptide
ACPVEHSGGGLWPARATWILRALPGSETAERPPDAFWSR

SEQ ID NO: 5818 - protein, 39 aa, Artificial Sequence
  Synthetic polypeptide
IQHVLIYRWFLSLWICKGIQSGIMYIGDSEGWQAGESCC

SEQ ID NO: 5819 - protein, 39 aa, Artificial Sequence
  Synthetic polypeptide
EEEKRKKSGCLFTGFLTASYPQAGCIALLKHWVLIFTSK

SEQ ID NO: 5820 - protein, 39 aa, Artificial Sequence; identical to SEQ ID NO: 5819
  Synthetic polypeptide

SEQ ID NO: 5821 - protein, 39 aa, Artificial Sequence; identical to SEQ ID NO: 5819
  Synthetic polypeptide

SEQ ID NO: 5822 - protein, 39 aa, Artificial Sequence; identical to SEQ ID NO: 5819
  Synthetic polypeptide

SEQ ID NO: 5823 - protein, 39 aa, Artificial Sequence; identical to SEQ ID NO: 5819
  Synthetic polypeptide

SEQ ID NO: 5824 - protein, 39 aa, Artificial Sequence; identical to SEQ ID NO: 5819
  Synthetic polypeptide

SEQ ID NO: 5825 - protein, 39 aa, Artificial Sequence; identical to SEQ ID NO: 5819
  Synthetic polypeptide

SEQ ID NO: 5826 - protein, 39 aa, Artificial Sequence; identical to SEQ ID NO: 5819
  Synthetic polypeptide

SEQ ID NO: 5827 - protein, 39 aa, Artificial Sequence
  Synthetic polypeptide
SSTRCPLHRSHHAPSQCHYEEHHLVMATAGAAQWHHPGL

SEQ ID NO: 5828 - protein, 39 aa, Artificial Sequence
  Synthetic polypeptide
QLPGHHSEVASPPTMRCSRRSTRWLCWGRPTTLLPRRPP

SEQ ID NO: 5829 - protein, 39 aa, Artificial Sequence
  Synthetic polypeptide
PFRHDCKFPEAFPAMLNYPGQRLPLPVRHRCGHHVLLHG

SEQ ID NO: 5830 - protein, 39 aa, Artificial Sequence; identical to SEQ ID NO: 5829
  Synthetic polypeptide

SEQ ID NO: 5831 - protein, 39 aa, Artificial Sequence
  Synthetic polypeptide
GVALKDSGEGKSSPWKHLQFGCHKGNRQCKISKCSNVTF

SEQ ID NO: 5832 - protein, 39 aa, Artificial Sequence; identical to SEQ ID NO: 5831
  Synthetic polypeptide

SEQ ID NO: 5833 - protein, 39 aa, Artificial Sequence
  Synthetic polypeptide
SQPLRKLRQENRLNLGGEGCSELISCHCTPAWPAQSSLP

SEQ ID NO: 5834 - protein, 39 aa, Artificial Sequence; identical to SEQ ID NO: 5833
  Synthetic polypeptide

SEQ ID NO: 5835 - protein, 39 aa, Artificial Sequence
  Synthetic polypeptide
LWTRLPASLGCSGVLAASWRGWVPGSGHRESEGCILILG

SEQ ID NO: 5836 - protein, 39 aa, Artificial Sequence; identical to SEQ ID NO: 5835
  Synthetic polypeptide

SEQ ID NO: 5837 - protein, 39 aa, Artificial Sequence; identical to SEQ ID NO: 5835
  Synthetic polypeptide

SEQ ID NO: 5838 - protein, 39 aa, Artificial Sequence; identical to SEQ ID NO: 5835
  Synthetic polypeptide

SEQ ID NO: 5839 - protein, 39 aa, Artificial Sequence; identical to SEQ ID NO: 5835
  Synthetic polypeptide

SEQ ID NO: 5840 - protein, 39 aa, Artificial Sequence; identical to SEQ ID NO: 5835
  Synthetic polypeptide

SEQ ID NO: 5841 - protein, 39 aa, Artificial Sequence
  Synthetic polypeptide
AGKKHRPGVTGKRDSGSDSNIDFLASAAAEPCTQAFPSW

SEQ ID NO: 5842 - protein, 39 aa, Artificial Sequence; identical to SEQ ID NO: 5841
  Synthetic polypeptide

SEQ ID NO: 5843 - protein, 39 aa, Artificial Sequence; identical to SEQ ID NO: 5841
  Synthetic polypeptide

SEQ ID NO: 5844 - protein, 39 aa, Artificial Sequence; identical to SEQ ID NO: 5841
  Synthetic polypeptide

SEQ ID NO: 5845 - protein, 39 aa, Artificial Sequence; identical to SEQ ID NO: 5841
  Synthetic polypeptide

SEQ ID NO: 5846 - protein, 39 aa, Artificial Sequence; identical to SEQ ID NO: 5841
  Synthetic polypeptide

SEQ ID NO: 5847 - protein, 39 aa, Artificial Sequence; identical to SEQ ID NO: 5841
  Synthetic polypeptide

SEQ ID NO: 5848 - protein, 39 aa, Artificial Sequence
  Synthetic polypeptide
SNYFGTLESSRTFAASKGVLDKERGCFIFKTLKVVMVLL

SEQ ID NO: 5849 - protein, 39 aa, Artificial Sequence; identical to SEQ ID NO: 5848
  Synthetic polypeptide

SEQ ID NO: 5850 - protein, 39 aa, Artificial Sequence; identical to SEQ ID NO: 5848
  Synthetic polypeptide

SEQ ID NO: 5851 - protein, 39 aa, Artificial Sequence; identical to SEQ ID NO: 5848
  Synthetic polypeptide

SEQ ID NO: 5852 - protein, 39 aa, Artificial Sequence; identical to SEQ ID NO: 5848
  Synthetic polypeptide

SEQ ID NO: 5853 - protein, 39 aa, Artificial Sequence
  Synthetic polypeptide
SCACRCGRGHCRAAAIPEWIPQLDHGPAHRQWPRQRPGV

SEQ ID NO: 5854 - protein, 39 aa, Artificial Sequence; identical to SEQ ID NO: 5853
  Synthetic polypeptide

SEQ ID NO: 5855 - protein, 39 aa, Artificial Sequence; identical to SEQ ID NO: 5853
  Synthetic polypeptide

SEQ ID NO: 5856 - protein, 39 aa, Artificial Sequence; identical to SEQ ID NO: 5853
  Synthetic polypeptide

SEQ ID NO: 5857 - protein, 39 aa, Artificial Sequence
  Synthetic polypeptide
SQHFGRPRQLGHEVRRSRPSWLTRLFPERREWQSMRRLR

SEQ ID NO: 5858 - protein, 39 aa, Artificial Sequence; identical to SEQ ID NO: 5857
  Synthetic polypeptide

SEQ ID NO: 5859 - protein, 39 aa, Artificial Sequence; identical to SEQ ID NO: 5857
  Synthetic polypeptide

SEQ ID NO: 5860 - protein, 39 aa, Artificial Sequence
  Synthetic polypeptide
PGFKSWFCRIPTMWLSLGCLAPASCAILRNANGLHYSDC

SEQ ID NO: 5861 - protein, 39 aa, Artificial Sequence; identical to SEQ ID NO: 5860
  Synthetic polypeptide

SEQ ID NO: 5862 - protein, 39 aa, Artificial Sequence; identical to SEQ ID NO: 5860
  Synthetic polypeptide

SEQ ID NO: 5863 - protein, 39 aa, Artificial Sequence; identical to SEQ ID NO: 5860
  Synthetic polypeptide

SEQ ID NO: 5864 - protein, 39 aa, Artificial Sequence; identical to SEQ ID NO: 5860
  Synthetic polypeptide

SEQ ID NO: 5865 - protein, 39 aa, Artificial Sequence
  Synthetic polypeptide
GQARWLLPVISALWMPRRVDHLRSGVQDQPAQHGPQDRL

SEQ ID NO: 5866 - protein, 39 aa, Artificial Sequence
  Synthetic polypeptide
LKYPSIGILLLGAKCSISMIMVQSLQVTHWIVKSVLGTT

SEQ ID NO: 5867 - protein, 39 aa, Artificial Sequence; identical to SEQ ID NO: 5866
  Synthetic polypeptide

SEQ ID NO: 5868 - protein, 39 aa, Artificial Sequence; identical to SEQ ID NO: 5866
  Synthetic polypeptide

SEQ ID NO: 5869 - protein, 39 aa, Artificial Sequence; identical to SEQ ID NO: 5866
  Synthetic polypeptide

SEQ ID NO: 5870 - protein, 39 aa, Artificial Sequence
  Synthetic polypeptide
GLAQWLMPVIPALQEAEASRSFGVRSSRPAWTTWPAGHS

SEQ ID NO: 5871 - protein, 39 aa, Artificial Sequence; identical to SEQ ID NO: 5870
  Synthetic polypeptide

SEQ ID NO: 5872 - protein, 39 aa, Artificial Sequence; identical to SEQ ID NO: 5870
  Synthetic polypeptide

SEQ ID NO: 5873 - protein, 38 aa, Artificial Sequence
  Synthetic polypeptide
DRDPERGDRDQREPLGSPFVETTPGSSCPPQGRPRMLI

SEQ ID NO: 5874 - protein, 38 aa, Artificial Sequence; identical to SEQ ID NO: 5873
  Synthetic polypeptide

SEQ ID NO: 5875 - protein, 38 aa, Artificial Sequence; identical to SEQ ID NO: 5873
  Synthetic polypeptide

SEQ ID NO: 5876 - protein, 38 aa, Artificial Sequence; identical to SEQ ID NO: 5873
  Synthetic polypeptide

SEQ ID NO: 5877 - protein, 38 aa, Artificial Sequence; identical to SEQ ID NO: 5873
  Synthetic polypeptide

SEQ ID NO: 5878 - protein, 38 aa, Artificial Sequence
  Synthetic polypeptide
WSCDSDESLNLPEPEPPFVQGQRSELGAGPPAHEQPHG

SEQ ID NO: 5879 - protein, 38 aa, Artificial Sequence; identical to SEQ ID NO: 5878
  Synthetic polypeptide

SEQ ID NO: 5880 - protein, 38 aa, Artificial Sequence
  Synthetic polypeptide
GQAWWHTPVIPALWEAKELQGQRSDVYSDLNTQRPYYK

SEQ ID NO: 5881 - protein, 38 aa, Artificial Sequence
  Synthetic polypeptide
PGMVAHTCNPSTLGGQGAPGSEVGCLQRPQHTEAVLQM

SEQ ID NO: 5882 - protein, 38 aa, Artificial Sequence; identical to SEQ ID NO: 5880
  Synthetic polypeptide

SEQ ID NO: 5883 - protein, 38 aa, Artificial Sequence; identical to SEQ ID NO: 5881
  Synthetic polypeptide

SEQ ID NO: 5884 - protein, 38 aa, Artificial Sequence; identical to SEQ ID NO: 5880
  Synthetic polypeptide

SEQ ID NO: 5885 - protein, 38 aa, Artificial Sequence; identical to SEQ ID NO: 5881
  Synthetic polypeptide

SEQ ID NO: 5886 - protein, 38 aa, Artificial Sequence; identical to SEQ ID NO: 5880
  Synthetic polypeptide

SEQ ID NO: 5887 - protein, 38 aa, Artificial Sequence; identical to SEQ ID NO: 5881
  Synthetic polypeptide

SEQ ID NO: 5888 - protein, 38 aa, Artificial Sequence; identical to SEQ ID NO: 5880
  Synthetic polypeptide

SEQ ID NO: 5889 - protein, 38 aa, Artificial Sequence; identical to SEQ ID NO: 5881
  Synthetic polypeptide

SEQ ID NO: 5890 - protein, 38 aa, Artificial Sequence
  Synthetic polypeptide
LPTKQIIFFLGTTALAFLVLMPVLHGRNLLLFRSLESS

SEQ ID NO: 5891 - protein, 38 aa, Artificial Sequence
  Synthetic polypeptide
GRSQDGRIGTAPVYSSQRERRRRRVISAFPSEGACPCL

SEQ ID NO: 5892 - protein, 38 aa, Artificial Sequence; identical to SEQ ID NO: 5891
  Synthetic polypeptide

SEQ ID NO: 5893 - protein, 38 aa, Artificial Sequence; identical to SEQ ID NO: 5891
  Synthetic polypeptide

SEQ ID NO: 5894 - protein, 38 aa, Artificial Sequence; identical to SEQ ID NO: 5891
  Synthetic polypeptide

SEQ ID NO: 5895 - protein, 38 aa, Artificial Sequence
  Synthetic polypeptide
LVDGRGSSLGDLSLPCGTFRWGTLASPSNVDPESTPRL

SEQ ID NO: 5896 - protein, 38 aa, Artificial Sequence
  Synthetic polypeptide
SQHFGRPSVQYFLQGTLRSECIPISRCPLCSCFGKRIF

SEQ ID NO: 5897 - protein, 38 aa, Artificial Sequence; identical to SEQ ID NO: 5896
  Synthetic polypeptide

SEQ ID NO: 5898 - protein, 38 aa, Artificial Sequence; identical to SEQ ID NO: 5896
  Synthetic polypeptide

SEQ ID NO: 5899 - protein, 38 aa, Artificial Sequence; identical to SEQ ID NO: 5896
  Synthetic polypeptide

SEQ ID NO: 5900 - protein, 38 aa, Artificial Sequence; identical to SEQ ID NO: 5896
  Synthetic polypeptide

SEQ ID NO: 5901 - protein, 38 aa, Artificial Sequence
  Synthetic polypeptide
NGECAQARVGSGRAPRTMSAATPSAWAAAARLTTTRPV

SEQ ID NO: 5902 - protein, 38 aa, Artificial Sequence; identical to SEQ ID NO: 5901
  Synthetic polypeptide

SEQ ID NO: 5903 - protein, 38 aa, Artificial Sequence; identical to SEQ ID NO: 5901
  Synthetic polypeptide

SEQ ID NO: 5904 - protein, 38 aa, Artificial Sequence
  Synthetic polypeptide
GGARLCQAFILLRLDEKRARVLRKELGCGRVQLRAASV

SEQ ID NO: 5905 - protein, 38 aa, Artificial Sequence; identical to SEQ ID NO: 5904
  Synthetic polypeptide

SEQ ID NO: 5906 - protein, 38 aa, Artificial Sequence; identical to SEQ ID NO: 5904
  Synthetic polypeptide

SEQ ID NO: 5907 - protein, 38 aa, Artificial Sequence; identical to SEQ ID NO: 5904
  Synthetic polypeptide

SEQ ID NO: 5908 - protein, 38 aa, Artificial Sequence; identical to SEQ ID NO: 5904
  Synthetic polypeptide

SEQ ID NO: 5909 - protein, 38 aa, Artificial Sequence; identical to SEQ ID NO: 5904
  Synthetic polypeptide

SEQ ID NO: 5910 - protein, 38 aa, Artificial Sequence; identical to SEQ ID NO: 5904
  Synthetic polypeptide

SEQ ID NO: 5911 - protein, 38 aa, Artificial Sequence; identical to SEQ ID NO: 5904
  Synthetic polypeptide

SEQ ID NO: 5912 - protein, 38 aa, Artificial Sequence; identical to SEQ ID NO: 5904
  Synthetic polypeptide

SEQ ID NO: 5913 - protein, 38 aa, Artificial Sequence; identical to SEQ ID NO: 5904
  Synthetic polypeptide

SEQ ID NO: 5914 - protein, 38 aa, Artificial Sequence; identical to SEQ ID NO: 5904
  Synthetic polypeptide

SEQ ID NO: 5915 - protein, 38 aa, Artificial Sequence
  Synthetic polypeptide
PWTSSLGITWDPTSDLLNQKFLRVMSAISVLQTLSSQP

SEQ ID NO: 5916 - protein, 38 aa, Artificial Sequence; identical to SEQ ID NO: 5915
  Synthetic polypeptide

SEQ ID NO: 5917 - protein, 38 aa, Artificial Sequence; identical to SEQ ID NO: 5915
  Synthetic polypeptide

SEQ ID NO: 5918 - protein, 38 aa, Artificial Sequence; identical to SEQ ID NO: 5915
  Synthetic polypeptide

SEQ ID NO: 5919 - protein, 38 aa, Artificial Sequence; identical to SEQ ID NO: 5915
  Synthetic polypeptide

SEQ ID NO: 5920 - protein, 38 aa, Artificial Sequence; identical to SEQ ID NO: 5915
  Synthetic polypeptide

SEQ ID NO: 5921 - protein, 38 aa, Artificial Sequence
  Synthetic polypeptide
GRMRWLTRVIPALWEAEAGGLLEVRSSRPAWPIWKEGH

SEQ ID NO: 5922 - protein, 38 aa, Artificial Sequence; identical to SEQ ID NO: 5921
  Synthetic polypeptide

SEQ ID NO: 5923 - protein, 38 aa, Artificial Sequence; identical to SEQ ID NO: 5921
  Synthetic polypeptide

SEQ ID NO: 5924 - protein, 38 aa, Artificial Sequence; identical to SEQ ID NO: 5921
  Synthetic polypeptide

SEQ ID NO: 5925 - protein, 38 aa, Artificial Sequence; identical to SEQ ID NO: 5921
  Synthetic polypeptide

SEQ ID NO: 5926 - protein, 38 aa, Artificial Sequence
  Synthetic polypeptide
GEGRAEREMFPSERQLLHILNTWPQLGLHFEKKTQRER

SEQ ID NO: 5927 - protein, 38 aa, Artificial Sequence
  Synthetic polypeptide
VLKDESSQLKERKKNRMLRLLRPMVCIDNVLRRLCSTI

SEQ ID NO: 5928 - protein, 38 aa, Artificial Sequence
  Synthetic polypeptide
VQEFKTSLGNMVNPHLYKNLARPVVKSGDKPSLSARYV

SEQ ID NO: 5929 - protein, 38 aa, Artificial Sequence; identical to SEQ ID NO: 5928
  Synthetic polypeptide

SEQ ID NO: 5930 - protein, 38 aa, Artificial Sequence; identical to SEQ ID NO: 5928
  Synthetic polypeptide

SEQ ID NO: 5931 - protein, 38 aa, Artificial Sequence; identical to SEQ ID NO: 5928
  Synthetic polypeptide

SEQ ID NO: 5932 - protein, 38 aa, Artificial Sequence; identical to SEQ ID NO: 5928
  Synthetic polypeptide

SEQ ID NO: 5933 - protein, 38 aa, Artificial Sequence; identical to SEQ ID NO: 5928
  Synthetic polypeptide

SEQ ID NO: 5934 - protein, 38 aa, Artificial Sequence
  Synthetic polypeptide
DSRWIRAIPFPYLGPSYSAMGGHSIRPTSSSLAQPTPG

SEQ ID NO: 5935 - protein, 38 aa, Artificial Sequence; identical to SEQ ID NO: 5934
  Synthetic polypeptide

SEQ ID NO: 5936 - protein, 38 aa, Artificial Sequence; identical to SEQ ID NO: 5934
  Synthetic polypeptide

SEQ ID NO: 5937 - protein, 38 aa, Artificial Sequence; identical to SEQ ID NO: 5934
  Synthetic polypeptide

SEQ ID NO: 5938 - protein, 38 aa, Artificial Sequence
  Synthetic polypeptide
SNIQDSRVVMATPCPCQMEVRPSASSTPSLAFPSPSCS

SEQ ID NO: 5939 - protein, 38 aa, Artificial Sequence; identical to SEQ ID NO: 5938
  Synthetic polypeptide

SEQ ID NO: 5940 - protein, 38 aa, Artificial Sequence; identical to SEQ ID NO: 5938
  Synthetic polypeptide

SEQ ID NO: 5941 - protein, 38 aa, Artificial Sequence
  Synthetic polypeptide
MPGHHSEVASPPTMRCSRRSTRWLCWGRPTTLLPRRPP

SEQ ID NO: 5942 - protein, 38 aa, Artificial Sequence; identical to SEQ ID NO: 5941
  Synthetic polypeptide

SEQ ID NO: 5943 - protein, 38 aa, Artificial Sequence; identical to SEQ ID NO: 5941
  Synthetic polypeptide

SEQ ID NO: 5944 - protein, 38 aa, Artificial Sequence
  Synthetic polypeptide
WIYKHLAFPLLALTPSCHSVKKVSPLPSTMIAAKGSFH

SEQ ID NO: 5945 - protein, 38 aa, Artificial Sequence; identical to SEQ ID NO: 5944
  Synthetic polypeptide

SEQ ID NO: 5946 - protein, 38 aa, Artificial Sequence; identical to SEQ ID NO: 5944
  Synthetic polypeptide

SEQ ID NO: 5947 - protein, 38 aa, Artificial Sequence
  Synthetic polypeptide
GCRPAPLGSHLSTATSWLDPSMSPCTSQHHCLKRMMRR

SEQ ID NO: 5948 - protein, 38 aa, Artificial Sequence; identical to SEQ ID NO: 5947
  Synthetic polypeptide

SEQ ID NO: 5949 - protein, 38 aa, Artificial Sequence; identical to SEQ ID NO: 5947
  Synthetic polypeptide

SEQ ID NO: 5950 - protein, 38 aa, Artificial Sequence
  Synthetic polypeptide
IPALWEAKHHLLHPRRCFGGRGGPGGLRKVVPALSPLG

SEQ ID NO: 5951 - protein, 38 aa, Artificial Sequence; identical to SEQ ID NO: 5950
  Synthetic polypeptide

SEQ ID NO: 5952 - protein, 38 aa, Artificial Sequence; identical to SEQ ID NO: 5950
  Synthetic polypeptide

SEQ ID NO: 5953 - protein, 38 aa, Artificial Sequence; identical to SEQ ID NO: 5950
  Synthetic polypeptide

SEQ ID NO: 5954 - protein, 38 aa, Artificial Sequence; identical to SEQ ID NO: 5950
  Synthetic polypeptide

SEQ ID NO: 5955 - protein, 38 aa, Artificial Sequence; identical to SEQ ID NO: 5950
  Synthetic polypeptide

SEQ ID NO: 5956 - protein, 38 aa, Artificial Sequence; identical to SEQ ID NO: 5950
  Synthetic polypeptide

SEQ ID NO: 5957 - protein, 38 aa, Artificial Sequence
  Synthetic polypeptide
FPAPGIVPEICSGVLSGFWLPPPMFLYLYYKDGSCLCP

SEQ ID NO: 5958 - protein, 38 aa, Artificial Sequence
  Synthetic polypeptide
GASLPCRPSSEMWGAPLPCRPVRDVRSVSARTPRLRMP

SEQ ID NO: 5959 - protein, 38 aa, Artificial Sequence; identical to SEQ ID NO: 5958
  Synthetic polypeptide

SEQ ID NO: 5960 - protein, 38 aa, Artificial Sequence; identical to SEQ ID NO: 5958
  Synthetic polypeptide

SEQ ID NO: 5961 - protein, 38 aa, Artificial Sequence; identical to SEQ ID NO: 5958
  Synthetic polypeptide

SEQ ID NO: 5962 - protein, 38 aa, Artificial Sequence
  Synthetic polypeptide
GVRSPELCCRLLSDLELASPSQGSVSCPVNSRKGRARS

SEQ ID NO: 5963 - protein, 38 aa, Artificial Sequence; identical to SEQ ID NO: 5962
  Synthetic polypeptide

SEQ ID NO: 5964 - protein, 38 aa, Artificial Sequence; identical to SEQ ID NO: 5962
  Synthetic polypeptide

SEQ ID NO: 5965 - protein, 38 aa, Artificial Sequence
  Synthetic polypeptide
RGFPCTNPPACRHVRRDFAPHSPSARIVRPPQPCGTPW

SEQ ID NO: 5966 - protein, 38 aa, Artificial Sequence
  Synthetic polypeptide
AEERAGYPGGAGLRAHRSQPSEAGPTAEAADCARHPAL

SEQ ID NO: 5967 - protein, 38 aa, Artificial Sequence; identical to SEQ ID NO: 5966
  Synthetic polypeptide

SEQ ID NO: 5968 - protein, 38 aa, Artificial Sequence; identical to SEQ ID NO: 5966
  Synthetic polypeptide

SEQ ID NO: 5969 - protein, 38 aa, Artificial Sequence; identical to SEQ ID NO: 5966
  Synthetic polypeptide

SEQ ID NO: 5970 - protein, 38 aa, Artificial Sequence; identical to SEQ ID NO: 5966
  Synthetic polypeptide

SEQ ID NO: 5971 - protein, 38 aa, Artificial Sequence; identical to SEQ ID NO: 5966
  Synthetic polypeptide

SEQ ID NO: 5972 - protein, 38 aa, Artificial Sequence; identical to SEQ ID NO: 5966
  Synthetic polypeptide

SEQ ID NO: 5973 - protein, 38 aa, Artificial Sequence; identical to SEQ ID NO: 5966
  Synthetic polypeptide

SEQ ID NO: 5974 - protein, 38 aa, Artificial Sequence; identical to SEQ ID NO: 5966
  Synthetic polypeptide

SEQ ID NO: 5975 - protein, 38 aa, Artificial Sequence; identical to SEQ ID NO: 5966
  Synthetic polypeptide

SEQ ID NO: 5976 - protein, 38 aa, Artificial Sequence
  Synthetic polypeptide
PGAVALACNLSTLDAKAGGSLEVRSSRPASTTWSPGSA

SEQ ID NO: 5977 - protein, 38 aa, Artificial Sequence
  Synthetic polypeptide
RPSMKTIRRMQMWNGSSPEQNSGCLTLMKEELYLLLLI

SEQ ID NO: 5978 - protein, 38 aa, Artificial Sequence; identical to SEQ ID NO: 5977
  Synthetic polypeptide

SEQ ID NO: 5979 - protein, 38 aa, Artificial Sequence; identical to SEQ ID NO: 5977
  Synthetic polypeptide

SEQ ID NO: 5980 - protein, 38 aa, Artificial Sequence; identical to SEQ ID NO: 5977
  Synthetic polypeptide

SEQ ID NO: 5981 - protein, 38 aa, Artificial Sequence; identical to SEQ ID NO: 5977
  Synthetic polypeptide

SEQ ID NO: 5982 - protein, 38 aa, Artificial Sequence; identical to SEQ ID NO: 5977
  Synthetic polypeptide

SEQ ID NO: 5983 - protein, 37 aa, Artificial Sequence
  Synthetic polypeptide
SHLTFSLQNHDHACIACRIIYRSDEHHPPILPPKADL

SEQ ID NO: 5984 - protein, 37 aa, Artificial Sequence
  Synthetic polypeptide
GCFEGHMKHWEHHRLWNLCLAKGSAGECWFCGPCSHR

SEQ ID NO: 5985 - protein, 37 aa, Artificial Sequence
  Synthetic polypeptide
PDVVAHCCNPSTLGGQGSWVTRLFPERREWQSMRRLR

SEQ ID NO: 5986 - protein, 37 aa, Artificial Sequence; identical to SEQ ID NO: 5985
  Synthetic polypeptide

SEQ ID NO: 5987 - protein, 37 aa, Artificial Sequence; identical to SEQ ID NO: 5985
  Synthetic polypeptide

SEQ ID NO: 5988 - protein, 37 aa, Artificial Sequence
  Synthetic polypeptide
GDGDARVAGHGVHAHREDHEGPGAAGQGLQRHQRPLR

SEQ ID NO: 5989 - protein, 37 aa, Artificial Sequence
  Synthetic polypeptide
LLKRLRQEDHLCPGGQGYSEPRTHHCTPAWTTKYPEP

SEQ ID NO: 5990 - protein, 37 aa, Artificial Sequence
  Synthetic polypeptide
LAPPCLHHDCEASSATWNFPGRSLAQEKQRPVGPRDA

SEQ ID NO: 5991 - protein, 37 aa, Artificial Sequence
  Synthetic polypeptide
DHLPGSQLLLKGKAEVGKTFFKRSWRKQIRRLLGHQN

SEQ ID NO: 5992 - protein, 37 aa, Artificial Sequence
  Synthetic polypeptide
NPGSGQNPGCKSWLCCSLSGFPCDPHYLKHRPGELPA

SEQ ID NO: 5993 - protein, 37 aa, Artificial Sequence
  Synthetic polypeptide
TQDLARTQGVNLGSVAPCLGFHVIPTISSIVPESCLL

SEQ ID NO: 5994 - protein, 37 aa, Artificial Sequence
  Synthetic polypeptide
ARLVSLGLCCRRLEFLTRKLSHHVAEWILRGFKLLQV

SEQ ID NO: 5995 - protein, 37 aa, Artificial Sequence; identical to SEQ ID NO: 5994
  Synthetic polypeptide

SEQ ID NO: 5996 - protein, 37 aa, Artificial Sequence; identical to SEQ ID NO: 5994
  Synthetic polypeptide

SEQ ID NO: 5997 - protein, 37 aa, Artificial Sequence
  Synthetic polypeptide
WGFGNLVLLNAAATSCVTMNPSFGLSESQKIHRNGFH

SEQ ID NO: 5998 - protein, 37 aa, Artificial Sequence; identical to SEQ ID NO: 5997
  Synthetic polypeptide

SEQ ID NO: 5999 - protein, 37 aa, Artificial Sequence
  Synthetic polypeptide
DVTWSSLPSAMIVRSPQPRGTVSPLNLFFFPVSGPAA

SEQ ID NO: 6000 - protein, 37 aa, Artificial Sequence; identical to SEQ ID NO: 5999
  Synthetic polypeptide

SEQ ID NO: 6001 - protein, 37 aa, Artificial Sequence
  Synthetic polypeptide
PGRAAAAAAARGWLELSSLESGCGHGAKRVCCPTSPK

SEQ ID NO: 6002 - protein, 37 aa, Artificial Sequence; identical to SEQ ID NO: 6001
  Synthetic polypeptide

SEQ ID NO: 6003 - protein, 37 aa, Artificial Sequence; identical to SEQ ID NO: 6001
  Synthetic polypeptide

SEQ ID NO: 6004 - protein, 37 aa, Artificial Sequence; identical to SEQ ID NO: 6001
  Synthetic polypeptide

SEQ ID NO: 6005 - protein, 37 aa, Artificial Sequence
  Synthetic polypeptide
TWLWNLEQASVSFWTLLPTTGVRTRGSPLRLTLWPPR

SEQ ID NO: 6006 - protein, 37 aa, Artificial Sequence; identical to SEQ ID NO: 6005
  Synthetic polypeptide

SEQ ID NO: 6007 - protein, 37 aa, Artificial Sequence; identical to SEQ ID NO: 6005
  Synthetic polypeptide

SEQ ID NO: 6008 - protein, 37 aa, Artificial Sequence; identical to SEQ ID NO: 6005
  Synthetic polypeptide

SEQ ID NO: 6009 - protein, 37 aa, Artificial Sequence; identical to SEQ ID NO: 6005
  Synthetic polypeptide

SEQ ID NO: 6010 - protein, 37 aa, Artificial Sequence; identical to SEQ ID NO: 6005
  Synthetic polypeptide

SEQ ID NO: 6011 - protein, 37 aa, Artificial Sequence
  Synthetic polypeptide
HQLLCDLGRGPLPVWALTSSNTKFPQAAPLPAAAGSQ

SEQ ID NO: 6012 - protein, 37 aa, Artificial Sequence; identical to SEQ ID NO: 6011
  Synthetic polypeptide

SEQ ID NO: 6013 - protein, 37 aa, Artificial Sequence; identical to SEQ ID NO: 6011
  Synthetic polypeptide

SEQ ID NO: 6014 - protein, 37 aa, Artificial Sequence
  Synthetic polypeptide
IPALWEAERNERTSCLCCLCMGATWASLRALCCSPSP

SEQ ID NO: 6015 - protein, 37 aa, Artificial Sequence; identical to SEQ ID NO: 6014
  Synthetic polypeptide

SEQ ID NO: 6016 - protein, 37 aa, Artificial Sequence; identical to SEQ ID NO: 6014
  Synthetic polypeptide

SEQ ID NO: 6017 - protein, 37 aa, Artificial Sequence
  Synthetic polypeptide
GHHYNSTVNAATAQLSLPIIGRPQSIPAMKCLSPPAM

SEQ ID NO: 6018 - protein, 37 aa, Artificial Sequence
  Synthetic polypeptide
EMLRSWWAIHLHAPVTLCGSRLSKRLNPVQTLRICTA

SEQ ID NO: 6019 - protein, 37 aa, Artificial Sequence; identical to SEQ ID NO: 6018
  Synthetic polypeptide

SEQ ID NO: 6020 - protein, 37 aa, Artificial Sequence; identical to SEQ ID NO: 6018
  Synthetic polypeptide

SEQ ID NO: 6021 - protein, 37 aa, Artificial Sequence; identical to SEQ ID NO: 6018
  Synthetic polypeptide

SEQ ID NO: 6022 - protein, 37 aa, Artificial Sequence; identical to SEQ ID NO: 6018
  Synthetic polypeptide

SEQ ID NO: 6023 - protein, 37 aa, Artificial Sequence; identical to SEQ ID NO: 6018
  Synthetic polypeptide

SEQ ID NO: 6024 - protein, 37 aa, Artificial Sequence; identical to SEQ ID NO: 6018
  Synthetic polypeptide

SEQ ID NO: 6025 - protein, 37 aa, Artificial Sequence; identical to SEQ ID NO: 6018
  Synthetic polypeptide

SEQ ID NO: 6026 - protein, 37 aa, Artificial Sequence
  Synthetic polypeptide
LPTKIIFFLGTTALAFLVLMPVLHGRNLLLFRSLESS

SEQ ID NO: 6027 - protein, 37 aa, Artificial Sequence
  Synthetic polypeptide
PLDTGLPSLQNYNDGCRAPLQWRHCQPSGHEGESDFN

SEQ ID NO: 6028 - protein, 37 aa, Artificial Sequence
  Synthetic polypeptide
KASQIMMVAGPLFNGGIASLLAMKEKVISTNPGNSYL

SEQ ID NO: 6029 - protein, 37 aa, Artificial Sequence
  Synthetic polypeptide
HALARSSKELESSPGTYVSSSYEGQASSTAGSYCSHL

SEQ ID NO: 6030 - protein, 37 aa, Artificial Sequence; identical to SEQ ID NO: 6029
  Synthetic polypeptide

SEQ ID NO: 6031 - protein, 37 aa, Artificial Sequence; identical to SEQ ID NO: 6029
  Synthetic polypeptide

SEQ ID NO: 6032 - protein, 37 aa, Artificial Sequence; identical to SEQ ID NO: 6029
  Synthetic polypeptide

SEQ ID NO: 6033 - protein, 37 aa, Artificial Sequence
  Synthetic polypeptide
GSAASFLKASTWTTRPSCGESGGPAVCGGRPRTITAR

SEQ ID NO: 6034 - protein, 37 aa, Artificial Sequence
  Synthetic polypeptide
IYSQCSAWPRPSTRRRWTLRSCSASLLEDLPRPSISA

SEQ ID NO: 6035 - protein, 37 aa, Artificial Sequence; identical to SEQ ID NO: 6034
  Synthetic polypeptide

SEQ ID NO: 6036 - protein, 37 aa, Artificial Sequence
  Synthetic polypeptide
AGRAKPTVQPSPSTTSKTVTTSEIRCHTRNYIPDLKK

SEQ ID NO: 6037 - protein, 37 aa, Artificial Sequence
  Synthetic polypeptide
PGTSHLTSLSLLFRVCEVGNRVGAVPAAGERGDGNYA

SEQ ID NO: 6038 - protein, 37 aa, Artificial Sequence
  Synthetic polypeptide
WCAPIVPATWEVEVACNSPGAGWEPDCLLFSLDDGYL

SEQ ID NO: 6039 - protein, 37 aa, Artificial Sequence
  Synthetic polypeptide
SQLLRRVKQETCLNPGGGRCNEPRLCHCTPAWATVGR

SEQ ID NO: 6040 - protein, 37 aa, Artificial Sequence; identical to SEQ ID NO: 6039
  Synthetic polypeptide

SEQ ID NO: 6041 - protein, 37 aa, Artificial Sequence; identical to SEQ ID NO: 6039
  Synthetic polypeptide

SEQ ID NO: 6042 - protein, 37 aa, Artificial Sequence; identical to SEQ ID NO: 6039
  Synthetic polypeptide

SEQ ID NO: 6043 - protein, 37 aa, Artificial Sequence; identical to SEQ ID NO: 6039
  Synthetic polypeptide

SEQ ID NO: 6044 - protein, 37 aa, Artificial Sequence
  Synthetic polypeptide
SAQLWRHTSPGVLVLLLTHCVSLGKVLSLGWSPQPGL

SEQ ID NO: 6045 - protein, 37 aa, Artificial Sequence; identical to SEQ ID NO: 6044
  Synthetic polypeptide

SEQ ID NO: 6046 - protein, 37 aa, Artificial Sequence; identical to SEQ ID NO: 6044
  Synthetic polypeptide

SEQ ID NO: 6047 - protein, 37 aa, Artificial Sequence; identical to SEQ ID NO: 6044
  Synthetic polypeptide

SEQ ID NO: 6048 - protein, 36 aa, Artificial Sequence
  Synthetic polypeptide
TETQRGGTEIRESPLDLPSWRRHRGPPAHPRGGPGC

SEQ ID NO: 6049 - protein, 36 aa, Artificial Sequence; identical to SEQ ID NO: 6048
  Synthetic polypeptide

SEQ ID NO: 6050 - protein, 36 aa, Artificial Sequence; identical to SEQ ID NO: 6048
  Synthetic polypeptide

SEQ ID NO: 6051 - protein, 36 aa, Artificial Sequence; identical to SEQ ID NO: 6048
  Synthetic polypeptide

SEQ ID NO: 6052 - protein, 36 aa, Artificial Sequence; identical to SEQ ID NO: 6048
  Synthetic polypeptide

SEQ ID NO: 6053 - protein, 36 aa, Artificial Sequence
  Synthetic polypeptide
GSHETLGTSSALESLSRQRECWRMLVLWALLSSSGL

SEQ ID NO: 6054 - protein, 36 aa, Artificial Sequence; identical to SEQ ID NO: 6053
  Synthetic polypeptide

SEQ ID NO: 6055 - protein, 36 aa, Artificial Sequence; identical to SEQ ID NO: 6053
  Synthetic polypeptide

SEQ ID NO: 6056 - protein, 36 aa, Artificial Sequence
  Synthetic polypeptide
GRAGRSIRTGRNSQNRFSKWPPQTWSTWASVWLATL

SEQ ID NO: 6057 - protein, 36 aa, Artificial Sequence; identical to SEQ ID NO: 6056
  Synthetic polypeptide

SEQ ID NO: 6058 - protein, 36 aa, Artificial Sequence; identical to SEQ ID NO: 6056
  Synthetic polypeptide

SEQ ID NO: 6059 - protein, 36 aa, Artificial Sequence; identical to SEQ ID NO: 6056
  Synthetic polypeptide

SEQ ID NO: 6060 - protein, 36 aa, Artificial Sequence; identical to SEQ ID NO: 6056
  Synthetic polypeptide

SEQ ID NO: 6061 - protein, 36 aa, Artificial Sequence; identical to SEQ ID NO: 6056
  Synthetic polypeptide

SEQ ID NO: 6062 - protein, 36 aa, Artificial Sequence; identical to SEQ ID NO: 6056
  Synthetic polypeptide

SEQ ID NO: 6063 - protein, 36 aa, Artificial Sequence
  Synthetic polypeptide
LTPAIPELWEAVDHMKLRVQDQPGQHNLDSLAGHHW

SEQ ID NO: 6064 - protein, 36 aa, Artificial Sequence
  Synthetic polypeptide
RSQDGRIGTAPVYSSQRERRRRRAISAFPSEEDHYH

SEQ ID NO: 6065 - protein, 36 aa, Artificial Sequence; identical to SEQ ID NO: 6064
  Synthetic polypeptide

SEQ ID NO: 6066 - protein, 36 aa, Artificial Sequence; identical to SEQ ID NO: 6064
  Synthetic polypeptide

SEQ ID NO: 6067 - protein, 36 aa, Artificial Sequence; identical to SEQ ID NO: 6064
  Synthetic polypeptide

SEQ ID NO: 6068 - protein, 36 aa, Artificial Sequence; identical to SEQ ID NO: 6064
  Synthetic polypeptide

SEQ ID NO: 6069 - protein, 36 aa, Artificial Sequence; identical to SEQ ID NO: 6064
  Synthetic polypeptide

SEQ ID NO: 6070 - protein, 36 aa, Artificial Sequence; identical to SEQ ID NO: 6064
  Synthetic polypeptide

SEQ ID NO: 6071 - protein, 36 aa, Artificial Sequence
  Synthetic polypeptide
SCNRWGRISGILWVKERGPAVTQAGGQWHHHSSLQP

SEQ ID NO: 6072 - protein, 36 aa, Artificial Sequence
  Synthetic polypeptide
KFLHLGLAHMPKLTSYRFSLTLEAVTLPWQEPRTPT

SEQ ID NO: 6073 - protein, 36 aa, Artificial Sequence; identical to SEQ ID NO: 6072
  Synthetic polypeptide

SEQ ID NO: 6074 - protein, 36 aa, Artificial Sequence; identical to SEQ ID NO: 6072
  Synthetic polypeptide

SEQ ID NO: 6075 - protein, 36 aa, Artificial Sequence
  Synthetic polypeptide
RSQDGRIGTAPVYSSQRERRRRRVISAFPSEVNNSC

SEQ ID NO: 6076 - protein, 36 aa, Artificial Sequence; identical to SEQ ID NO: 6075
  Synthetic polypeptide

SEQ ID NO: 6077 - protein, 36 aa, Artificial Sequence
  Synthetic polypeptide
GLRSPAELPQMTSLWPQQSVPAMMRTLTPVSRAQVG

SEQ ID NO: 6078 - protein, 36 aa, Artificial Sequence; identical to SEQ ID NO: 6077
  Synthetic polypeptide

SEQ ID NO: 6079 - protein, 36 aa, Artificial Sequence; identical to SEQ ID NO: 6077
  Synthetic polypeptide

SEQ ID NO: 6080 - protein, 36 aa, Artificial Sequence; identical to SEQ ID NO: 6077
  Synthetic polypeptide

SEQ ID NO: 6081 - protein, 36 aa, Artificial Sequence; identical to SEQ ID NO: 6077
  Synthetic polypeptide

SEQ ID NO: 6082 - protein, 36 aa, Artificial Sequence; identical to SEQ ID NO: 6077
  Synthetic polypeptide

SEQ ID NO: 6083 - protein, 36 aa, Artificial Sequence; identical to SEQ ID NO: 6077
  Synthetic polypeptide

SEQ ID NO: 6084 - protein, 36 aa, Artificial Sequence; identical to SEQ ID NO: 6077
  Synthetic polypeptide

SEQ ID NO: 6085 - protein, 36 aa, Artificial Sequence; identical to SEQ ID NO: 6077
  Synthetic polypeptide

SEQ ID NO: 6086 - protein, 36 aa, Artificial Sequence; identical to SEQ ID NO: 6077
  Synthetic polypeptide

SEQ ID NO: 6087 - protein, 36 aa, Artificial Sequence
  Synthetic polypeptide
SQLLGKAEAGESLEPGRRRLWISRRCRATCSSLTTK

SEQ ID NO: 6088 - protein, 36 aa, Artificial Sequence; identical to SEQ ID NO: 6087
  Synthetic polypeptide

SEQ ID NO: 6089 - protein, 36 aa, Artificial Sequence; identical to SEQ ID NO: 6087
  Synthetic polypeptide

SEQ ID NO: 6090 - protein, 36 aa, Artificial Sequence; identical to SEQ ID NO: 6087
  Synthetic polypeptide

SEQ ID NO: 6091 - protein, 36 aa, Artificial Sequence; identical to SEQ ID NO: 6087
  Synthetic polypeptide

SEQ ID NO: 6092 - protein, 36 aa, Artificial Sequence; identical to SEQ ID NO: 6087
  Synthetic polypeptide

SEQ ID NO: 6093 - protein, 36 aa, Artificial Sequence; identical to SEQ ID NO: 6087
  Synthetic polypeptide

SEQ ID NO: 6094 - protein, 36 aa, Artificial Sequence; identical to SEQ ID NO: 6087
  Synthetic polypeptide

SEQ ID NO: 6095 - protein, 36 aa, Artificial Sequence; identical to SEQ ID NO: 6087
  Synthetic polypeptide

SEQ ID NO: 6096 - protein, 36 aa, Artificial Sequence; identical to SEQ ID NO: 6087
  Synthetic polypeptide

SEQ ID NO: 6097 - protein, 36 aa, Artificial Sequence
  Synthetic polypeptide
PSVVAHAYKSQHFGRPRETRERHVCAASAWGPLGLL

SEQ ID NO: 6098 - protein, 36 aa, Artificial Sequence; identical to SEQ ID NO: 6097
  Synthetic polypeptide

SEQ ID NO: 6099 - protein, 36 aa, Artificial Sequence; identical to SEQ ID NO: 6097
  Synthetic polypeptide

SEQ ID NO: 6100 - protein, 36 aa, Artificial Sequence
  Synthetic polypeptide
CRRMEWVFQMLSRQNNYTVNNKRNGVAKVNIFFKEL

SEQ ID NO: 6101 - protein, 36 aa, Artificial Sequence
  Synthetic polypeptide
EVRSPSARQPPRLRSEEPLRPAATPSGKFLYIFINV

SEQ ID NO: 6102 - protein, 36 aa, Artificial Sequence
  Synthetic polypeptide
EVRRPSAWQPPRLRSEEPLRPAAAPSEKFLYIFINV

SEQ ID NO: 6103 - protein, 36 aa, Artificial Sequence
  Synthetic polypeptide
DVGSTSAPPPCLGCEERLCWAATLSGRRAKVGLQSW

SEQ ID NO: 6104 - protein, 36 aa, Artificial Sequence; identical to SEQ ID NO: 6103
  Synthetic polypeptide

SEQ ID NO: 6105 - protein, 36 aa, Artificial Sequence
  Synthetic polypeptide
SQLLRRVKQETCLNPGGGRCNEPRLCHCTPAWATVL

SEQ ID NO: 6106 - protein, 36 aa, Artificial Sequence
  Synthetic polypeptide
LGVVAHILIPALWEAKLRRMRTRKMISELPFTKQWR

SEQ ID NO: 6107 - protein, 36 aa, Artificial Sequence; identical to SEQ ID NO: 6106
  Synthetic polypeptide

SEQ ID NO: 6108 - protein, 36 aa, Artificial Sequence; identical to SEQ ID NO: 6106
  Synthetic polypeptide

SEQ ID NO: 6109 - protein, 35 aa, Artificial Sequence
  Synthetic polypeptide
PQGTFGNIWRHFWLSHLGKTLLAPSRRWSRRSLHY

SEQ ID NO: 6110 - protein, 35 aa, Artificial Sequence; identical to SEQ ID NO: 6109
  Synthetic polypeptide

SEQ ID NO: 6111 - protein, 35 aa, Artificial Sequence
  Synthetic polypeptide
MQQKRLENVRGIREKDESSPGAHLPPALRDHLGGL

SEQ ID NO: 6112 - protein, 35 aa, Artificial Sequence
  Synthetic polypeptide
NSSSFSSSSVYTKMKMTTMKTFMMIYFHLMNSKRK

SEQ ID NO: 6113 - protein, 35 aa, Artificial Sequence; identical to SEQ ID NO: 6112
  Synthetic polypeptide

SEQ ID NO: 6114 - protein, 35 aa, Artificial Sequence; identical to SEQ ID NO: 6112
  Synthetic polypeptide

SEQ ID NO: 6115 - protein, 35 aa, Artificial Sequence; identical to SEQ ID NO: 6112
  Synthetic polypeptide

SEQ ID NO: 6116 - protein, 35 aa, Artificial Sequence; identical to SEQ ID NO: 6112
  Synthetic polypeptide

SEQ ID NO: 6117 - protein, 35 aa, Artificial Sequence; identical to SEQ ID NO: 6112
  Synthetic polypeptide

SEQ ID NO: 6118 - protein, 35 aa, Artificial Sequence
  Synthetic polypeptide
AMTALLHSCLGHFQRASSVQYDINLVETSSTSAHH

SEQ ID NO: 6119 - protein, 35 aa, Artificial Sequence
  Synthetic polypeptide
RGAAQRAGWSTNQSKTQRPGSSVGCPSFIMQDNCL

SEQ ID NO: 6120 - protein, 35 aa, Artificial Sequence
  Synthetic polypeptide
KQHMLFSRPGIKVWSRGPEQEGSLLSSGSLPLASD

SEQ ID NO: 6121 - protein, 35 aa, Artificial Sequence
  Synthetic polypeptide
AHEMEMSLDNMGQFEKEDRAHCGVSMEMWSLVTNL

SEQ ID NO: 6122 - protein, 35 aa, Artificial Sequence
  Synthetic polypeptide
AWRSRGCAHHPENKPRCSNAEQAIPVHSESEERRF

SEQ ID NO: 6123 - protein, 35 aa, Artificial Sequence
  Synthetic polypeptide
GMAQESRSPLWESRLSASVPWALTASTWPPAPCPR

SEQ ID NO: 6124 - protein, 35 aa, Artificial Sequence
  Synthetic polypeptide
SQLLGRWRQQNRLNPGGRGCSEWRSCHCTSLGNRK

SEQ ID NO: 6125 - protein, 35 aa, Artificial Sequence; identical to SEQ ID NO: 6124
  Synthetic polypeptide

SEQ ID NO: 6126 - protein, 35 aa, Artificial Sequence; identical to SEQ ID NO: 6124
  Synthetic polypeptide

SEQ ID NO: 6127 - protein, 35 aa, Artificial Sequence
  Synthetic polypeptide
NQESWACSCCNLRLRQRPLGAPLQQPVPVPERRPV

SEQ ID NO: 6128 - protein, 35 aa, Artificial Sequence; identical to SEQ ID NO: 6127
  Synthetic polypeptide

SEQ ID NO: 6129 - protein, 35 aa, Artificial Sequence; identical to SEQ ID NO: 6127
  Synthetic polypeptide

SEQ ID NO: 6130 - protein, 35 aa, Artificial Sequence; identical to SEQ ID NO: 6127
  Synthetic polypeptide

SEQ ID NO: 6131 - protein, 35 aa, Artificial Sequence; identical to SEQ ID NO: 6127
  Synthetic polypeptide

SEQ ID NO: 6132 - protein, 35 aa, Artificial Sequence
  Synthetic polypeptide
GRARWLTPVLPALWEGEAGGSRGQEIETVLANTKR

SEQ ID NO: 6133 - protein, 35 aa, Artificial Sequence; identical to SEQ ID NO: 6132
  Synthetic polypeptide

SEQ ID NO: 6134 - protein, 35 aa, Artificial Sequence; identical to SEQ ID NO: 6132
  Synthetic polypeptide

SEQ ID NO: 6135 - protein, 35 aa, Artificial Sequence; identical to SEQ ID NO: 6132
  Synthetic polypeptide

SEQ ID NO: 6136 - protein, 35 aa, Artificial Sequence; identical to SEQ ID NO: 6132
  Synthetic polypeptide

SEQ ID NO: 6137 - protein, 35 aa, Artificial Sequence
  Synthetic polypeptide
LSDHSSCSISHSSGETNEGVLNAVSNAWGAFPMPL

SEQ ID NO: 6138 - protein, 35 aa, Artificial Sequence; identical to SEQ ID NO: 6137
  Synthetic polypeptide

SEQ ID NO: 6139 - protein, 35 aa, Artificial Sequence; identical to SEQ ID NO: 6137
  Synthetic polypeptide

SEQ ID NO: 6140 - protein, 35 aa, Artificial Sequence; identical to SEQ ID NO: 6137
  Synthetic polypeptide

SEQ ID NO: 6141 - protein, 35 aa, Artificial Sequence; identical to SEQ ID NO: 6137
  Synthetic polypeptide

SEQ ID NO: 6142 - protein, 35 aa, Artificial Sequence; identical to SEQ ID NO: 6137
  Synthetic polypeptide

SEQ ID NO: 6143 - protein, 35 aa, Artificial Sequence; identical to SEQ ID NO: 6137
  Synthetic polypeptide

SEQ ID NO: 6144 - protein, 35 aa, Artificial Sequence
  Synthetic polypeptide
VTDSLKGIPDNDGCRAPLQWRHCQPSGHEGESDFN

SEQ ID NO: 6145 - protein, 35 aa, Artificial Sequence
  Synthetic polypeptide
LHCLLASWWIQPAEDPSWISELGEQRAGKAAHHAE

SEQ ID NO: 6146 - protein, 35 aa, Artificial Sequence
  Synthetic polypeptide
SQHFGMPRTICTLWGRLEQLKSKKMHGLEKQRPRE

SEQ ID NO: 6147 - protein, 35 aa, Artificial Sequence
  Synthetic polypeptide
MFSFVSLTVPWASQWQGPCLSSITASYLNVVICSW

SEQ ID NO: 6148 - protein, 35 aa, Artificial Sequence
  Synthetic polypeptide
TTWRNPVSTKNTKLFSHCSIVCDPEKAKERTTHCL

SEQ ID NO: 6149 - protein, 35 aa, Artificial Sequence; identical to SEQ ID NO: 6148
  Synthetic polypeptide

SEQ ID NO: 6150 - protein, 35 aa, Artificial Sequence
  Synthetic polypeptide
SQEIETILANMIGLMDTTDNRENLLKRLAGPIQEH

SEQ ID NO: 6151 - protein, 35 aa, Artificial Sequence; identical to SEQ ID NO: 6150
  Synthetic polypeptide

SEQ ID NO: 6152 - protein, 35 aa, Artificial Sequence
  Synthetic polypeptide
GSPLGDLGLSCRASLWGTQTSLGNADPKSAPRASG

SEQ ID NO: 6153 - protein, 35 aa, Artificial Sequence
  Synthetic polypeptide
AGRGGSCLSSQHFGRPRKCILQQRPIPAPGGPKEE

SEQ ID NO: 6154 - protein, 35 aa, Artificial Sequence; identical to SEQ ID NO: 6153
  Synthetic polypeptide

SEQ ID NO: 6155 - protein, 35 aa, Artificial Sequence; identical to SEQ ID NO: 6153
  Synthetic polypeptide

SEQ ID NO: 6156 - protein, 35 aa, Artificial Sequence; identical to SEQ ID NO: 6153
  Synthetic polypeptide

SEQ ID NO: 6157 - protein, 35 aa, Artificial Sequence
  Synthetic polypeptide
LLYALRNQKICDSLYCNIHFIKVLWNLTCSVSEVL

SEQ ID NO: 6158 - protein, 35 aa, Artificial Sequence; identical to SEQ ID NO: 6157
  Synthetic polypeptide

SEQ ID NO: 6159 - protein, 35 aa, Artificial Sequence; identical to SEQ ID NO: 6157
  Synthetic polypeptide

SEQ ID NO: 6160 - protein, 35 aa, Artificial Sequence; identical to SEQ ID NO: 6157
  Synthetic polypeptide

SEQ ID NO: 6161 - protein, 35 aa, Artificial Sequence; identical to SEQ ID NO: 6157
  Synthetic polypeptide

SEQ ID NO: 6162 - protein, 35 aa, Artificial Sequence
  Synthetic polypeptide
KYKKLVRTKYFGQISSTKPFSVPTASQVPMSTCWL

SEQ ID NO: 6163 - protein, 35 aa, Artificial Sequence
  Synthetic polypeptide
VNYLASLPQFLHETIGTTCVPVLWVTLRMSWKLTN

SEQ ID NO: 6164 - protein, 34 aa, Artificial Sequence
  Synthetic polypeptide
FRSLLKCHLPEPAAGEPAHEASQAPCRMPPSMAT

SEQ ID NO: 6165 - protein, 34 aa, Artificial Sequence
  Synthetic polypeptide
ALWKAEAGGSLEAGSSRPVWPACSSCLGSVISWL

SEQ ID NO: 6166 - protein, 34 aa, Artificial Sequence; identical to SEQ ID NO: 6165
  Synthetic polypeptide

SEQ ID NO: 6167 - protein, 34 aa, Artificial Sequence
  Synthetic polypeptide
NSVSVLWPGIKVWSRGPEQEGSLLSSGSLPLASD

SEQ ID NO: 6168 - protein, 34 aa, Artificial Sequence
  Synthetic polypeptide
VQNFALIGMIINEFTTNFLDWTDQFSLLCVCSNR

SEQ ID NO: 6169 - protein, 34 aa, Artificial Sequence; identical to SEQ ID NO: 6168
  Synthetic polypeptide

SEQ ID NO: 6170 - protein, 34 aa, Artificial Sequence; identical to SEQ ID NO: 6168
  Synthetic polypeptide

SEQ ID NO: 6171 - protein, 34 aa, Artificial Sequence; identical to SEQ ID NO: 6168
  Synthetic polypeptide

SEQ ID NO: 6172 - protein, 34 aa, Artificial Sequence; identical to SEQ ID NO: 6168
  Synthetic polypeptide

SEQ ID NO: 6173 - protein, 34 aa, Artificial Sequence; identical to SEQ ID NO: 6168
  Synthetic polypeptide

SEQ ID NO: 6174 - protein, 34 aa, Artificial Sequence; identical to SEQ ID NO: 6168
  Synthetic polypeptide

SEQ ID NO: 6175 - protein, 34 aa, Artificial Sequence; identical to SEQ ID NO: 6168
  Synthetic polypeptide

SEQ ID NO: 6176 - protein, 34 aa, Artificial Sequence; identical to SEQ ID NO: 6168
  Synthetic polypeptide

SEQ ID NO: 6177 - protein, 34 aa, Artificial Sequence; identical to SEQ ID NO: 6168
  Synthetic polypeptide

SEQ ID NO: 6178 - protein, 34 aa, Artificial Sequence; identical to SEQ ID NO: 6168
  Synthetic polypeptide

SEQ ID NO: 6179 - protein, 34 aa, Artificial Sequence; identical to SEQ ID NO: 6168
  Synthetic polypeptide

SEQ ID NO: 6180 - protein, 34 aa, Artificial Sequence
  Synthetic polypeptide
SQHFGKLRYRYPEACSSPSGKPVERYLSVSLQCQ

SEQ ID NO: 6181 - protein, 34 aa, Artificial Sequence
  Synthetic polypeptide
PGTEWLCLRSSTLGGRGGRIAWGQKFESSLGNVG

SEQ ID NO: 6182 - protein, 34 aa, Artificial Sequence; identical to SEQ ID NO: 6181
  Synthetic polypeptide

SEQ ID NO: 6183 - protein, 34 aa, Artificial Sequence
  Synthetic polypeptide
ELRWEDHLSPGGQGCGEPRLHHCTPAWWSPLMIT

SEQ ID NO: 6184 - protein, 34 aa, Artificial Sequence; identical to SEQ ID NO: 6183
  Synthetic polypeptide

SEQ ID NO: 6185 - protein, 34 aa, Artificial Sequence; identical to SEQ ID NO: 6183
  Synthetic polypeptide

SEQ ID NO: 6186 - protein, 34 aa, Artificial Sequence; identical to SEQ ID NO: 6183
  Synthetic polypeptide

SEQ ID NO: 6187 - protein, 34 aa, Artificial Sequence; identical to SEQ ID NO: 6183
  Synthetic polypeptide

SEQ ID NO: 6188 - protein, 34 aa, Artificial Sequence; identical to SEQ ID NO: 6183
  Synthetic polypeptide

SEQ ID NO: 6189 - protein, 34 aa, Artificial Sequence; identical to SEQ ID NO: 6183
  Synthetic polypeptide

SEQ ID NO: 6190 - protein, 34 aa, Artificial Sequence; identical to SEQ ID NO: 6183
  Synthetic polypeptide

SEQ ID NO: 6191 - protein, 34 aa, Artificial Sequence
  Synthetic polypeptide
KFLHLGLAHMPKLTRFSLTLEAVTLPWQEPRTPT

SEQ ID NO: 6192 - protein, 34 aa, Artificial Sequence; identical to SEQ ID NO: 6191
  Synthetic polypeptide

SEQ ID NO: 6193 - protein, 34 aa, Artificial Sequence; identical to SEQ ID NO: 6191
  Synthetic polypeptide

SEQ ID NO: 6194 - protein, 34 aa, Artificial Sequence
  Synthetic polypeptide
LFDLGPACSTGQSQAGSNMASWRWSLCRAQLMKT

SEQ ID NO: 6195 - protein, 34 aa, Artificial Sequence; identical to SEQ ID NO: 6194
  Synthetic polypeptide

SEQ ID NO: 6196 - protein, 34 aa, Artificial Sequence; identical to SEQ ID NO: 6194
  Synthetic polypeptide

SEQ ID NO: 6197 - protein, 34 aa, Artificial Sequence; identical to SEQ ID NO: 6194
  Synthetic polypeptide

SEQ ID NO: 6198 - protein, 34 aa, Artificial Sequence; identical to SEQ ID NO: 6194
  Synthetic polypeptide

SEQ ID NO: 6199 - protein, 34 aa, Artificial Sequence; identical to SEQ ID NO: 6194
  Synthetic polypeptide

SEQ ID NO: 6200 - protein, 34 aa, Artificial Sequence
  Synthetic polypeptide
CSNCPAESSHHRTSPIHSSHDGVPLCCPGWSTVA

SEQ ID NO: 6201 - protein, 34 aa, Artificial Sequence
  Synthetic polypeptide
RAQWLTPVILALWEAEAGRSQGLAHTAPRALTSQ

SEQ ID NO: 6202 - protein, 34 aa, Artificial Sequence; identical to SEQ ID NO: 6201
  Synthetic polypeptide

SEQ ID NO: 6203 - protein, 34 aa, Artificial Sequence; identical to SEQ ID NO: 6201
  Synthetic polypeptide

SEQ ID NO: 6204 - protein, 34 aa, Artificial Sequence
  Synthetic polypeptide
DHLRTCASTPVACPSTCGRRSLSPSISPSTSLTS

SEQ ID NO: 6205 - protein, 34 aa, Artificial Sequence; identical to SEQ ID NO: 6204
  Synthetic polypeptide

SEQ ID NO: 6206 - protein, 34 aa, Artificial Sequence; identical to SEQ ID NO: 6204
  Synthetic polypeptide

SEQ ID NO: 6207 - protein, 34 aa, Artificial Sequence; identical to SEQ ID NO: 6204
  Synthetic polypeptide

SEQ ID NO: 6208 - protein, 34 aa, Artificial Sequence; identical to SEQ ID NO: 6204
  Synthetic polypeptide

SEQ ID NO: 6209 - protein, 34 aa, Artificial Sequence; identical to SEQ ID NO: 6204
  Synthetic polypeptide

SEQ ID NO: 6210 - protein, 34 aa, Artificial Sequence; identical to SEQ ID NO: 6204
  Synthetic polypeptide

SEQ ID NO: 6211 - protein, 34 aa, Artificial Sequence
  Synthetic polypeptide
KSTVPGLCIFFLSQIWNVHQTLKLSSAKHLYQPA

SEQ ID NO: 6212 - protein, 34 aa, Artificial Sequence; identical to SEQ ID NO: 6211
  Synthetic polypeptide

SEQ ID NO: 6213 - protein, 34 aa, Artificial Sequence; identical to SEQ ID NO: 6211
  Synthetic polypeptide

SEQ ID NO: 6214 - protein, 34 aa, Artificial Sequence; identical to SEQ ID NO: 6211
  Synthetic polypeptide

SEQ ID NO: 6215 - protein, 34 aa, Artificial Sequence; identical to SEQ ID NO: 6211
  Synthetic polypeptide

SEQ ID NO: 6216 - protein, 34 aa, Artificial Sequence
  Synthetic polypeptide
VIIMLLLLEALQLFLLLRERRFGECKKSWNRSDE

SEQ ID NO: 6217 - protein, 34 aa, Artificial Sequence; identical to SEQ ID NO: 6216
  Synthetic polypeptide

SEQ ID NO: 6218 - protein, 34 aa, Artificial Sequence; identical to SEQ ID NO: 6216
  Synthetic polypeptide

SEQ ID NO: 6219 - protein, 34 aa, Artificial Sequence; identical to SEQ ID NO: 6216
  Synthetic polypeptide

SEQ ID NO: 6220 - protein, 33 aa, Artificial Sequence
  Synthetic polypeptide
LFLSRTTTMPASPVGSSIGQTSTTLPSCPQRQT

SEQ ID NO: 6221 - protein, 33 aa, Artificial Sequence; identical to SEQ ID NO: 6220
  Synthetic polypeptide

SEQ ID NO: 6222 - protein, 33 aa, Artificial Sequence; identical to SEQ ID NO: 6220
  Synthetic polypeptide

SEQ ID NO: 6223 - protein, 33 aa, Artificial Sequence
  Synthetic polypeptide
TQEVSLGYPPTIPGSTTSTAGPSPAILPTLSWS

SEQ ID NO: 6224 - protein, 33 aa, Artificial Sequence; identical to SEQ ID NO: 6223
  Synthetic polypeptide

SEQ ID NO: 6225 - protein, 33 aa, Artificial Sequence
  Synthetic polypeptide
MVPRFQLACGLKISQRLWCSWSLNGTGCSRRTV

SEQ ID NO: 6226 - protein, 33 aa, Artificial Sequence; identical to SEQ ID NO: 6225
  Synthetic polypeptide

SEQ ID NO: 6227 - protein, 33 aa, Artificial Sequence; identical to SEQ ID NO: 6225
  Synthetic polypeptide

SEQ ID NO: 6228 - protein, 33 aa, Artificial Sequence
  Synthetic polypeptide
GSHETLGTSSALESLSRQRECWRMLVLWALLSS

SEQ ID NO: 6229 - protein, 33 aa, Artificial Sequence
  Synthetic polypeptide
SPWASISTSVNWALSSRPPPAGHWHWHRFLWQQ

SEQ ID NO: 6230 - protein, 33 aa, Artificial Sequence; identical to SEQ ID NO: 6229
  Synthetic polypeptide

SEQ ID NO: 6231 - protein, 33 aa, Artificial Sequence; identical to SEQ ID NO: 6229
  Synthetic polypeptide

SEQ ID NO: 6232 - protein, 33 aa, Artificial Sequence; identical to SEQ ID NO: 6229
  Synthetic polypeptide

SEQ ID NO: 6233 - protein, 33 aa, Artificial Sequence; identical to SEQ ID NO: 6229
  Synthetic polypeptide

SEQ ID NO: 6234 - protein, 33 aa, Artificial Sequence; identical to SEQ ID NO: 6229
  Synthetic polypeptide

SEQ ID NO: 6235 - protein, 33 aa, Artificial Sequence
  Synthetic polypeptide
GRTWWLTAVIPALWEAKAAGSRGYFQKEENGKV

SEQ ID NO: 6236 - protein, 33 aa, Artificial Sequence; identical to SEQ ID NO: 6235
  Synthetic polypeptide

SEQ ID NO: 6237 - protein, 33 aa, Artificial Sequence; identical to SEQ ID NO: 6235
  Synthetic polypeptide

SEQ ID NO: 6238 - protein, 33 aa, Artificial Sequence
  Synthetic polypeptide
SQHFGRLMLADHEALPVDWFSSLDQSRVHALGT

SEQ ID NO: 6239 - protein, 33 aa, Artificial Sequence
  Synthetic polypeptide
LGCKLKKGGASSVFAHLCVASTILSPGTKQGAS

SEQ ID NO: 6240 - protein, 33 aa, Artificial Sequence; identical to SEQ ID NO: 6239
  Synthetic polypeptide

SEQ ID NO: 6241 - protein, 33 aa, Artificial Sequence
  Synthetic polypeptide
SGPMRVGSAKLGQGVSFRHLHIRSTQQELKICQ

SEQ ID NO: 6242 - protein, 33 aa, Artificial Sequence; identical to SEQ ID NO: 6241
  Synthetic polypeptide

SEQ ID NO: 6243 - protein, 33 aa, Artificial Sequence; identical to SEQ ID NO: 6241
  Synthetic polypeptide

SEQ ID NO: 6244 - protein, 33 aa, Artificial Sequence; identical to SEQ ID NO: 6241
  Synthetic polypeptide

SEQ ID NO: 6245 - protein, 33 aa, Artificial Sequence; identical to SEQ ID NO: 6241
  Synthetic polypeptide

SEQ ID NO: 6246 - protein, 33 aa, Artificial Sequence; identical to SEQ ID NO: 6241
  Synthetic polypeptide

SEQ ID NO: 6247 - protein, 33 aa, Artificial Sequence
  Synthetic polypeptide
DKSGCTYSILPSLCSCEHFLLCQVCRGPDHLCQ

SEQ ID NO: 6248 - protein, 33 aa, Artificial Sequence; identical to SEQ ID NO: 6247
  Synthetic polypeptide

SEQ ID NO: 6249 - protein, 33 aa, Artificial Sequence; identical to SEQ ID NO: 6247
  Synthetic polypeptide

SEQ ID NO: 6250 - protein, 33 aa, Artificial Sequence; identical to SEQ ID NO: 6247
  Synthetic polypeptide

SEQ ID NO: 6251 - protein, 33 aa, Artificial Sequence
  Synthetic polypeptide
IGYNNIHYTYIPESKAQIKSWTLPPGPNWQFKN

SEQ ID NO: 6252 - protein, 33 aa, Artificial Sequence; identical to SEQ ID NO: 6251
  Synthetic polypeptide

SEQ ID NO: 6253 - protein, 33 aa, Artificial Sequence; identical to SEQ ID NO: 6251
  Synthetic polypeptide

SEQ ID NO: 6254 - protein, 33 aa, Artificial Sequence; identical to SEQ ID NO: 6251
  Synthetic polypeptide

SEQ ID NO: 6255 - protein, 33 aa, Artificial Sequence; identical to SEQ ID NO: 6251
  Synthetic polypeptide

SEQ ID NO: 6256 - protein, 33 aa, Artificial Sequence; identical to SEQ ID NO: 6251
  Synthetic polypeptide

SEQ ID NO: 6257 - protein, 33 aa, Artificial Sequence; identical to SEQ ID NO: 6251
  Synthetic polypeptide

SEQ ID NO: 6258 - protein, 33 aa, Artificial Sequence
  Synthetic polypeptide
EQGEWEVTASQVLMGRIAGPRSTRRVGACCSPP

SEQ ID NO: 6259 - protein, 33 aa, Artificial Sequence; identical to SEQ ID NO: 6258
  Synthetic polypeptide

SEQ ID NO: 6260 - protein, 33 aa, Artificial Sequence
  Synthetic polypeptide
VGTGDAAQPPARHKTAPRQQRILQRLRKHCASP

SEQ ID NO: 6261 - protein, 33 aa, Artificial Sequence; identical to SEQ ID NO: 6260
  Synthetic polypeptide

SEQ ID NO: 6262 - protein, 33 aa, Artificial Sequence; identical to SEQ ID NO: 6260
  Synthetic polypeptide

SEQ ID NO: 6263 - protein, 33 aa, Artificial Sequence; identical to SEQ ID NO: 6260
  Synthetic polypeptide

SEQ ID NO: 6264 - protein, 33 aa, Artificial Sequence; identical to SEQ ID NO: 6260
  Synthetic polypeptide

SEQ ID NO: 6265 - protein, 33 aa, Artificial Sequence
  Synthetic polypeptide
CELIESWVQDWRSAWTPRATGTPTSAGCRFKTP

SEQ ID NO: 6266 - protein, 33 aa, Artificial Sequence
  Synthetic polypeptide
KIRIIQLKGQKAEVLSRQLCSTWIEKTGSSTKW

SEQ ID NO: 6267 - protein, 33 aa, Artificial Sequence; identical to SEQ ID NO: 6266
  Synthetic polypeptide

SEQ ID NO: 6268 - protein, 33 aa, Artificial Sequence
  Synthetic polypeptide
ISAQPGIQGHYWSLRLGGSGPPGPGRRPGEAGV

SEQ ID NO: 6269 - protein, 33 aa, Artificial Sequence
  Synthetic polypeptide
WTSGLSTLNFSLLIYKMRPLQIPLRQMEGLQVS

SEQ ID NO: 6270 - protein, 33 aa, Artificial Sequence; identical to SEQ ID NO: 6269
  Synthetic polypeptide

SEQ ID NO: 6271 - protein, 33 aa, Artificial Sequence; identical to SEQ ID NO: 6269
  Synthetic polypeptide

SEQ ID NO: 6272 - protein, 33 aa, Artificial Sequence
  Synthetic polypeptide
PGRVVHACNPSTLGCQGFQSGLLRPGQHGHQCG

SEQ ID NO: 6273 - protein, 33 aa, Artificial Sequence; identical to SEQ ID NO: 6272
  Synthetic polypeptide

SEQ ID NO: 6274 - protein, 33 aa, Artificial Sequence; identical to SEQ ID NO: 6272
  Synthetic polypeptide

SEQ ID NO: 6275 - protein, 33 aa, Artificial Sequence; identical to SEQ ID NO: 6272
  Synthetic polypeptide

SEQ ID NO: 6276 - protein, 33 aa, Artificial Sequence; identical to SEQ ID NO: 6272
  Synthetic polypeptide

SEQ ID NO: 6277 - protein, 33 aa, Artificial Sequence; identical to SEQ ID NO: 6272
  Synthetic polypeptide

SEQ ID NO: 6278 - protein, 33 aa, Artificial Sequence; identical to SEQ ID NO: 6272
  Synthetic polypeptide

SEQ ID NO: 6279 - protein, 33 aa, Artificial Sequence
  Synthetic polypeptide
RAQWLTPVILALWEAEAGRSQGQEIETILANMV

SEQ ID NO: 6280 - protein, 33 aa, Artificial Sequence; identical to SEQ ID NO: 6279
  Synthetic polypeptide

SEQ ID NO: 6281 - protein, 33 aa, Artificial Sequence; identical to SEQ ID NO: 6279
  Synthetic polypeptide

SEQ ID NO: 6282 - protein, 33 aa, Artificial Sequence
  Synthetic polypeptide
PGSVADACNPSTLGGRGGRITRTHLCFYNQPRM

SEQ ID NO: 6283 - protein, 33 aa, Artificial Sequence; identical to SEQ ID NO: 6282
  Synthetic polypeptide

SEQ ID NO: 6284 - protein, 33 aa, Artificial Sequence; identical to SEQ ID NO: 6282
  Synthetic polypeptide

SEQ ID NO: 6285 - protein, 33 aa, Artificial Sequence
  Synthetic polypeptide
PGVTVPSGLILVLMGRIAGPRSTRRVGACCSPP

SEQ ID NO: 6286 - protein, 33 aa, Artificial Sequence; identical to SEQ ID NO: 6285
  Synthetic polypeptide

SEQ ID NO: 6287 - protein, 33 aa, Artificial Sequence
  Synthetic polypeptide
GREFKTSLGNIGTTSPWRVSCCSSLGRPGKSCR

SEQ ID NO: 6288 - protein, 33 aa, Artificial Sequence; identical to SEQ ID NO: 6287
  Synthetic polypeptide

SEQ ID NO: 6289 - protein, 33 aa, Artificial Sequence; identical to SEQ ID NO: 6287
  Synthetic polypeptide

SEQ ID NO: 6290 - protein, 33 aa, Artificial Sequence; identical to SEQ ID NO: 6287
  Synthetic polypeptide

SEQ ID NO: 6291 - protein, 33 aa, Artificial Sequence; identical to SEQ ID NO: 6287
  Synthetic polypeptide

SEQ ID NO: 6292 - protein, 33 aa, Artificial Sequence
  Synthetic polypeptide
GVGRLCRHLICRCLGLGLPASRTCPGRAAPLTT

SEQ ID NO: 6293 - protein, 33 aa, Artificial Sequence; identical to SEQ ID NO: 6292
  Synthetic polypeptide

SEQ ID NO: 6294 - protein, 33 aa, Artificial Sequence; identical to SEQ ID NO: 6292
  Synthetic polypeptide

SEQ ID NO: 6295 - protein, 33 aa, Artificial Sequence; identical to SEQ ID NO: 6292
  Synthetic polypeptide

SEQ ID NO: 6296 - protein, 33 aa, Artificial Sequence
  Synthetic polypeptide
HLLEHLLKCSLPSYTWSPPASVFLSWWRWPREK

SEQ ID NO: 6297 - protein, 33 aa, Artificial Sequence; identical to SEQ ID NO: 6296
  Synthetic polypeptide

SEQ ID NO: 6298 - protein, 33 aa, Artificial Sequence; identical to SEQ ID NO: 6296
  Synthetic polypeptide

SEQ ID NO: 6299 - protein, 33 aa, Artificial Sequence; identical to SEQ ID NO: 6296
  Synthetic polypeptide

SEQ ID NO: 6300 - protein, 33 aa, Artificial Sequence
  Synthetic polypeptide
GAPLPGRNPVWEEASRPAELGSRDPPTIYNFQQ

SEQ ID NO: 6301 - protein, 33 aa, Artificial Sequence; identical to SEQ ID NO: 6300
  Synthetic polypeptide

SEQ ID NO: 6302 - protein, 33 aa, Artificial Sequence
  Synthetic polypeptide
PRTGCPASGTPSATWSSHTWTHASAGCTTWATR

SEQ ID NO: 6303 - protein, 33 aa, Artificial Sequence; identical to SEQ ID NO: 6302
  Synthetic polypeptide

SEQ ID NO: 6304 - protein, 33 aa, Artificial Sequence; identical to SEQ ID NO: 6302
  Synthetic polypeptide

SEQ ID NO: 6305 - protein, 33 aa, Artificial Sequence; identical to SEQ ID NO: 6302
  Synthetic polypeptide

SEQ ID NO: 6306 - protein, 33 aa, Artificial Sequence
  Synthetic polypeptide
RWNRKRNTRIGSECRGSASPDSAVYQEAHFAGQ

SEQ ID NO: 6307 - protein, 33 aa, Artificial Sequence; identical to SEQ ID NO: 6306
  Synthetic polypeptide

SEQ ID NO: 6308 - protein, 33 aa, Artificial Sequence; identical to SEQ ID NO: 6306
  Synthetic polypeptide

SEQ ID NO: 6309 - protein, 33 aa, Artificial Sequence; identical to SEQ ID NO: 6306
  Synthetic polypeptide

SEQ ID NO: 6310 - protein, 33 aa, Artificial Sequence
  Synthetic polypeptide
GLSSHVGTVMGTLHLAPMRARPSACSTPCWASR

SEQ ID NO: 6311 - protein, 33 aa, Artificial Sequence; identical to SEQ ID NO: 6310
  Synthetic polypeptide

SEQ ID NO: 6312 - protein, 33 aa, Artificial Sequence; identical to SEQ ID NO: 6310
  Synthetic polypeptide

SEQ ID NO: 6313 - protein, 33 aa, Artificial Sequence
  Synthetic polypeptide
GASPPGSHPIWEEASRPAELGSRDPPTIYNFQQ

SEQ ID NO: 6314 - protein, 33 aa, Artificial Sequence; identical to SEQ ID NO: 6313
  Synthetic polypeptide

SEQ ID NO: 6315 - protein, 33 aa, Artificial Sequence
  Synthetic polypeptide
PSSVPHGTEGSPRQTSLKSFTHKIMRYYKPGWL

SEQ ID NO: 6316 - protein, 33 aa, Artificial Sequence; identical to SEQ ID NO: 6315
  Synthetic polypeptide

SEQ ID NO: 6317 - protein, 33 aa, Artificial Sequence
  Synthetic polypeptide
SQHFGRPRQADHEEYLDLSQPLEPYSPCYPDPR

SEQ ID NO: 6318 - protein, 32 aa, Artificial Sequence
  Synthetic polypeptide
MVPRFQLACGLISQRLWCSWSLNGTGCSRRTV

SEQ ID NO: 6319 - protein, 32 aa, Artificial Sequence; identical to SEQ ID NO: 6318
  Synthetic polypeptide

SEQ ID NO: 6320 - protein, 32 aa, Artificial Sequence; identical to SEQ ID NO: 6318
  Synthetic polypeptide

SEQ ID NO: 6321 - protein, 32 aa, Artificial Sequence
  Synthetic polypeptide
PGAVAHACNPCTLGGRDGRITSVLCSYRLQPC

SEQ ID NO: 6322 - protein, 32 aa, Artificial Sequence; identical to SEQ ID NO: 6321
  Synthetic polypeptide

SEQ ID NO: 6323 - protein, 32 aa, Artificial Sequence; identical to SEQ ID NO: 6321
  Synthetic polypeptide

SEQ ID NO: 6324 - protein, 32 aa, Artificial Sequence
  Synthetic polypeptide
GQAWWLTSVIPALWEAEAGGSPEDLLVTTPWS

SEQ ID NO: 6325 - protein, 32 aa, Artificial Sequence; identical to SEQ ID NO: 6324
  Synthetic polypeptide

SEQ ID NO: 6326 - protein, 32 aa, Artificial Sequence; identical to SEQ ID NO: 6324
  Synthetic polypeptide

SEQ ID NO: 6327 - protein, 32 aa, Artificial Sequence; identical to SEQ ID NO: 6324
  Synthetic polypeptide

SEQ ID NO: 6328 - protein, 32 aa, Artificial Sequence
  Synthetic polypeptide
SQHFGRPRRADHEVRRSRPRQHWPVPERLLSA

SEQ ID NO: 6329 - protein, 32 aa, Artificial Sequence; identical to SEQ ID NO: 6328
  Synthetic polypeptide

SEQ ID NO: 6330 - protein, 32 aa, Artificial Sequence; identical to SEQ ID NO: 6328
  Synthetic polypeptide

SEQ ID NO: 6331 - protein, 32 aa, Artificial Sequence
  Synthetic polypeptide
WKTIKMFIRAGRVNKLRHISTVEYSADGYEEH

SEQ ID NO: 6332 - protein, 32 aa, Artificial Sequence; identical to SEQ ID NO: 6331
  Synthetic polypeptide

SEQ ID NO: 6333 - protein, 32 aa, Artificial Sequence
  Synthetic polypeptide
GRARWLTPVIPALWEADAGGSRGTASGLVFIL

SEQ ID NO: 6334 - protein, 32 aa, Artificial Sequence
  Synthetic polypeptide
GVPLPGRPCWEVRSPSARPPPRLGESWRSGMA

SEQ ID NO: 6335 - protein, 32 aa, Artificial Sequence
  Synthetic polypeptide
LFFYLSRMMISRLNLLMNSVWLAKFPSTGLEF

SEQ ID NO: 6336 - protein, 32 aa, Artificial Sequence; identical to SEQ ID NO: 6335
  Synthetic polypeptide

SEQ ID NO: 6337 - protein, 32 aa, Artificial Sequence; identical to SEQ ID NO: 6335
  Synthetic polypeptide

SEQ ID NO: 6338 - protein, 32 aa, Artificial Sequence; identical to SEQ ID NO: 6335
  Synthetic polypeptide

SEQ ID NO: 6339 - protein, 32 aa, Artificial Sequence; identical to SEQ ID NO: 6335
  Synthetic polypeptide

SEQ ID NO: 6340 - protein, 32 aa, Artificial Sequence
  Synthetic polypeptide
VLIQNVRGIREKDESSPGAHLPPALRDHLGGL

SEQ ID NO: 6341 - protein, 32 aa, Artificial Sequence
  Synthetic polypeptide
FLHFHPRVPVLACDGPAHRTLCHPVCLYHPQM

SEQ ID NO: 6342 - protein, 32 aa, Artificial Sequence; identical to SEQ ID NO: 6341
  Synthetic polypeptide

SEQ ID NO: 6343 - protein, 32 aa, Artificial Sequence; identical to SEQ ID NO: 6341
  Synthetic polypeptide

SEQ ID NO: 6344 - protein, 32 aa, Artificial Sequence; identical to SEQ ID NO: 6341
  Synthetic polypeptide

SEQ ID NO: 6345 - protein, 32 aa, Artificial Sequence
  Synthetic polypeptide
GTGDQTRNQDTRDRDSGSASCCCVTLIKVILD

SEQ ID NO: 6346 - protein, 32 aa, Artificial Sequence
  Synthetic polypeptide
EVRRPSAWQPPRLRSEEPLRPAAAPSENALRS

SEQ ID NO: 6347 - protein, 32 aa, Artificial Sequence; identical to SEQ ID NO: 6346
  Synthetic polypeptide

SEQ ID NO: 6348 - protein, 32 aa, Artificial Sequence; identical to SEQ ID NO: 6346
  Synthetic polypeptide

SEQ ID NO: 6349 - protein, 32 aa, Artificial Sequence; identical to SEQ ID NO: 6346
  Synthetic polypeptide

SEQ ID NO: 6350 - protein, 32 aa, Artificial Sequence
  Synthetic polypeptide
DRPQWLMPVIPTLWRMSSAVCVHQLPPGQLHV

SEQ ID NO: 6351 - protein, 32 aa, Artificial Sequence; identical to SEQ ID NO: 6350
  Synthetic polypeptide

SEQ ID NO: 6352 - protein, 32 aa, Artificial Sequence; identical to SEQ ID NO: 6350
  Synthetic polypeptide

SEQ ID NO: 6353 - protein, 32 aa, Artificial Sequence; identical to SEQ ID NO: 6350
  Synthetic polypeptide

SEQ ID NO: 6354 - protein, 32 aa, Artificial Sequence
  Synthetic polypeptide
PAWPAAPSGRKLHGVMVNLPHNRVQICHQQVH

SEQ ID NO: 6355 - protein, 32 aa, Artificial Sequence; identical to SEQ ID NO: 6354
  Synthetic polypeptide

SEQ ID NO: 6356 - protein, 32 aa, Artificial Sequence
  Synthetic polypeptide
PGAVAHAYNPRTLGGQEMCAILAGKERDIWKS

SEQ ID NO: 6357 - protein, 32 aa, Artificial Sequence; identical to SEQ ID NO: 6356
  Synthetic polypeptide

SEQ ID NO: 6358 - protein, 32 aa, Artificial Sequence; identical to SEQ ID NO: 6356
  Synthetic polypeptide

SEQ ID NO: 6359 - protein, 32 aa, Artificial Sequence; identical to SEQ ID NO: 6356
  Synthetic polypeptide

SEQ ID NO: 6360 - protein, 32 aa, Artificial Sequence; identical to SEQ ID NO: 6356
  Synthetic polypeptide

SEQ ID NO: 6361 - protein, 32 aa, Artificial Sequence
  Synthetic polypeptide
PKSGTNPTIHQLTWINKRSFHGQQHSAGCFAA

SEQ ID NO: 6362 - protein, 32 aa, Artificial Sequence; identical to SEQ ID NO: 6361
  Synthetic polypeptide

SEQ ID NO: 6363 - protein, 32 aa, Artificial Sequence
  Synthetic polypeptide
PDAMTHACNPALWEAELPARGGYGHPDVLLSS

SEQ ID NO: 6364 - protein, 32 aa, Artificial Sequence; identical to SEQ ID NO: 6363
  Synthetic polypeptide

SEQ ID NO: 6365 - protein, 32 aa, Artificial Sequence
  Synthetic polypeptide
YNLQKPGGGIESKKILIGRKSFRRKEKEIYKI

SEQ ID NO: 6366 - protein, 32 aa, Artificial Sequence; identical to SEQ ID NO: 6365
  Synthetic polypeptide

SEQ ID NO: 6367 - protein, 32 aa, Artificial Sequence; identical to SEQ ID NO: 6365
  Synthetic polypeptide

SEQ ID NO: 6368 - protein, 32 aa, Artificial Sequence; identical to SEQ ID NO: 6365
  Synthetic polypeptide

SEQ ID NO: 6369 - protein, 31 aa, Artificial Sequence
  Synthetic polypeptide
GRVQWLTPIIPTLREAELQAECSRQTQLALE

SEQ ID NO: 6370 - protein, 31 aa, Artificial Sequence
  Synthetic polypeptide
ETSLCILWSFSLVLAEGLAYGNVQHYQDNSY

SEQ ID NO: 6371 - protein, 31 aa, Artificial Sequence
  Synthetic polypeptide
RVVTPASPGYCQDSVRRRRCESRWSWSPRSP

SEQ ID NO: 6372 - protein, 31 aa, Artificial Sequence; identical to SEQ ID NO: 6371
  Synthetic polypeptide

SEQ ID NO: 6373 - protein, 31 aa, Artificial Sequence; identical to SEQ ID NO: 6371
  Synthetic polypeptide

SEQ ID NO: 6374 - protein, 31 aa, Artificial Sequence; identical to SEQ ID NO: 6371
  Synthetic polypeptide

SEQ ID NO: 6375 - protein, 31 aa, Artificial Sequence; identical to SEQ ID NO: 6371
  Synthetic polypeptide

SEQ ID NO: 6376 - protein, 31 aa, Artificial Sequence; identical to SEQ ID NO: 6371
  Synthetic polypeptide

SEQ ID NO: 6377 - protein, 31 aa, Artificial Sequence; identical to SEQ ID NO: 6371
  Synthetic polypeptide

SEQ ID NO: 6378 - protein, 31 aa, Artificial Sequence
  Synthetic polypeptide
KKFFLISWASWQKAMRPWKTLLPASTSQSAR

SEQ ID NO: 6379 - protein, 31 aa, Artificial Sequence; identical to SEQ ID NO: 6378
  Synthetic polypeptide

SEQ ID NO: 6380 - protein, 31 aa, Artificial Sequence; identical to SEQ ID NO: 6378
  Synthetic polypeptide

SEQ ID NO: 6381 - protein, 31 aa, Artificial Sequence
  Synthetic polypeptide
NDDIKIKSLDEQCVVGKISKHWTGILREAFT

SEQ ID NO: 6382 - protein, 31 aa, Artificial Sequence
  Synthetic polypeptide
AFACRPPLPTTVVCCHRRPAADFHPSGSGKI

SEQ ID NO: 6383 - protein, 31 aa, Artificial Sequence
  Synthetic polypeptide
SWTSLSALVEYILSKNAAKSGDHLLQSSCLQ

SEQ ID NO: 6384 - protein, 31 aa, Artificial Sequence
  Synthetic polypeptide
TQEAEVAVSQDHTIALQPGRRGDPERKPHRG

SEQ ID NO: 6385 - protein, 31 aa, Artificial Sequence; identical to SEQ ID NO: 6384
  Synthetic polypeptide

SEQ ID NO: 6386 - protein, 31 aa, Artificial Sequence; identical to SEQ ID NO: 6384
  Synthetic polypeptide

SEQ ID NO: 6387 - protein, 31 aa, Artificial Sequence
  Synthetic polypeptide
GIPSHAELKAAACLSSCSWRCTGARRPCRSQ

SEQ ID NO: 6388 - protein, 31 aa, Artificial Sequence; identical to SEQ ID NO: 6387
  Synthetic polypeptide

SEQ ID NO: 6389 - protein, 31 aa, Artificial Sequence; identical to SEQ ID NO: 6387
  Synthetic polypeptide

SEQ ID NO: 6390 - protein, 31 aa, Artificial Sequence; identical to SEQ ID NO: 6387
  Synthetic polypeptide

SEQ ID NO: 6391 - protein, 31 aa, Artificial Sequence; identical to SEQ ID NO: 6387
  Synthetic polypeptide

SEQ ID NO: 6392 - protein, 31 aa, Artificial Sequence
  Synthetic polypeptide
RPSFELNLLCDTWWAHCWESCCCHRCCPPLN

SEQ ID NO: 6393 - protein, 31 aa, Artificial Sequence; identical to SEQ ID NO: 6392
  Synthetic polypeptide

SEQ ID NO: 6394 - protein, 31 aa, Artificial Sequence; identical to SEQ ID NO: 6392
  Synthetic polypeptide

SEQ ID NO: 6395 - protein, 31 aa, Artificial Sequence; identical to SEQ ID NO: 6392
  Synthetic polypeptide

SEQ ID NO: 6396 - protein, 31 aa, Artificial Sequence; identical to SEQ ID NO: 6392
  Synthetic polypeptide

SEQ ID NO: 6397 - protein, 31 aa, Artificial Sequence
  Synthetic polypeptide
TLGFCFLRCKMERILSCLHWKPWLSLLAPWD

SEQ ID NO: 6398 - protein, 31 aa, Artificial Sequence; identical to SEQ ID NO: 6397
  Synthetic polypeptide

SEQ ID NO: 6399 - protein, 31 aa, Artificial Sequence
  Synthetic polypeptide
LSLSCCLCWPSSVKKLYHNVLYVEDFIFLSL

SEQ ID NO: 6400 - protein, 31 aa, Artificial Sequence
  Synthetic polypeptide
HVPIVPATWETDMERLLEPRSLRLHFIFKPG

SEQ ID NO: 6401 - protein, 31 aa, Artificial Sequence; identical to SEQ ID NO: 6400
  Synthetic polypeptide

SEQ ID NO: 6402 - protein, 31 aa, Artificial Sequence
  Synthetic polypeptide
RWCMGEIHLRRPTLHMGGIQLKVPTFSPSQH

SEQ ID NO: 6403 - protein, 31 aa, Artificial Sequence; identical to SEQ ID NO: 6402
  Synthetic polypeptide

SEQ ID NO: 6404 - protein, 31 aa, Artificial Sequence; identical to SEQ ID NO: 6402
  Synthetic polypeptide

SEQ ID NO: 6405 - protein, 31 aa, Artificial Sequence; identical to SEQ ID NO: 6402
  Synthetic polypeptide

SEQ ID NO: 6406 - protein, 31 aa, Artificial Sequence; identical to SEQ ID NO: 6402
  Synthetic polypeptide

SEQ ID NO: 6407 - protein, 31 aa, Artificial Sequence; identical to SEQ ID NO: 6402
  Synthetic polypeptide

SEQ ID NO: 6408 - protein, 31 aa, Artificial Sequence; identical to SEQ ID NO: 6402
  Synthetic polypeptide

SEQ ID NO: 6409 - protein, 31 aa, Artificial Sequence; identical to SEQ ID NO: 6402
  Synthetic polypeptide

SEQ ID NO: 6410 - protein, 31 aa, Artificial Sequence
  Synthetic polypeptide
DVTCSSLPSTMIVRPPQPYGTVQRRLPRSPL

SEQ ID NO: 6411 - protein, 31 aa, Artificial Sequence; identical to SEQ ID NO: 6410
  Synthetic polypeptide

SEQ ID NO: 6412 - protein, 31 aa, Artificial Sequence; identical to SEQ ID NO: 6410
  Synthetic polypeptide

SEQ ID NO: 6413 - protein, 31 aa, Artificial Sequence; identical to SEQ ID NO: 6410
  Synthetic polypeptide

SEQ ID NO: 6414 - protein, 31 aa, Artificial Sequence; identical to SEQ ID NO: 6410
  Synthetic polypeptide

SEQ ID NO: 6415 - protein, 31 aa, Artificial Sequence
  Synthetic polypeptide
ETKKFVTHFIAIFTLSRFSGTSPAVSLRSCK

SEQ ID NO: 6416 - protein, 31 aa, Artificial Sequence; identical to SEQ ID NO: 6415
  Synthetic polypeptide

SEQ ID NO: 6417 - protein, 31 aa, Artificial Sequence; identical to SEQ ID NO: 6415
  Synthetic polypeptide

SEQ ID NO: 6418 - protein, 31 aa, Artificial Sequence; identical to SEQ ID NO: 6415
  Synthetic polypeptide

SEQ ID NO: 6419 - protein, 31 aa, Artificial Sequence; identical to SEQ ID NO: 6415
  Synthetic polypeptide

SEQ ID NO: 6420 - protein, 31 aa, Artificial Sequence
  Synthetic polypeptide
PSTWEHHRLWNLCLAKGSAGECWFCGPCSHR

SEQ ID NO: 6421 - protein, 31 aa, Artificial Sequence
  Synthetic polypeptide
EVRSLSTRQPPHLGRSQQTCRTWLPGPTHHL

SEQ ID NO: 6422 - protein, 31 aa, Artificial Sequence; identical to SEQ ID NO: 6421
  Synthetic polypeptide

SEQ ID NO: 6423 - protein, 30 aa, Artificial Sequence
  Synthetic polypeptide
MENNQDVYQSRKSEQIKAHLDCGVLCRWEH

SEQ ID NO: 6424 - protein, 30 aa, Artificial Sequence; identical to SEQ ID NO: 6423
  Synthetic polypeptide

SEQ ID NO: 6425 - protein, 30 aa, Artificial Sequence
  Synthetic polypeptide
RVVTPASPGYCQDSVRRRRCESRWSWLRGG

SEQ ID NO: 6426 - protein, 30 aa, Artificial Sequence; identical to SEQ ID NO: 6425
  Synthetic polypeptide

SEQ ID NO: 6427 - protein, 30 aa, Artificial Sequence; identical to SEQ ID NO: 6425
  Synthetic polypeptide

SEQ ID NO: 6428 - protein, 30 aa, Artificial Sequence; identical to SEQ ID NO: 6425
  Synthetic polypeptide

SEQ ID NO: 6429 - protein, 30 aa, Artificial Sequence; identical to SEQ ID NO: 6425
  Synthetic polypeptide

SEQ ID NO: 6430 - protein, 30 aa, Artificial Sequence; identical to SEQ ID NO: 6425
  Synthetic polypeptide

SEQ ID NO: 6431 - protein, 30 aa, Artificial Sequence; identical to SEQ ID NO: 6425
  Synthetic polypeptide

SEQ ID NO: 6432 - protein, 30 aa, Artificial Sequence
  Synthetic polypeptide
QHFGRPRPVDRLRLGVQDQSGQHAHPVWAQ

SEQ ID NO: 6433 - protein, 30 aa, Artificial Sequence; identical to SEQ ID NO: 6432
  Synthetic polypeptide

SEQ ID NO: 6434 - protein, 30 aa, Artificial Sequence
  Synthetic polypeptide
VCLFPQMMSNPCANPVSPWRPSERWGSPSS

SEQ ID NO: 6435 - protein, 30 aa, Artificial Sequence; identical to SEQ ID NO: 6434
  Synthetic polypeptide

SEQ ID NO: 6436 - protein, 30 aa, Artificial Sequence; identical to SEQ ID NO: 6434
  Synthetic polypeptide

SEQ ID NO: 6437 - protein, 30 aa, Artificial Sequence; identical to SEQ ID NO: 6434
  Synthetic polypeptide

SEQ ID NO: 6438 - protein, 30 aa, Artificial Sequence; identical to SEQ ID NO: 6434
  Synthetic polypeptide

SEQ ID NO: 6439 - protein, 30 aa, Artificial Sequence; identical to SEQ ID NO: 6434
  Synthetic polypeptide

SEQ ID NO: 6440 - protein, 30 aa, Artificial Sequence
  Synthetic polypeptide
NPVSAKLARVEPAILRRPYSPYWWSVRRPL

SEQ ID NO: 6441 - protein, 30 aa, Artificial Sequence
  Synthetic polypeptide
TQEAEVAVSQDHTIALQPGRGDPERKPHRG

SEQ ID NO: 6442 - protein, 30 aa, Artificial Sequence; identical to SEQ ID NO: 6441
  Synthetic polypeptide

SEQ ID NO: 6443 - protein, 30 aa, Artificial Sequence; identical to SEQ ID NO: 6441
  Synthetic polypeptide

SEQ ID NO: 6444 - protein, 30 aa, Artificial Sequence; identical to SEQ ID NO: 6441
  Synthetic polypeptide

SEQ ID NO: 6445 - protein, 30 aa, Artificial Sequence; identical to SEQ ID NO: 6441
  Synthetic polypeptide

SEQ ID NO: 6446 - protein, 30 aa, Artificial Sequence
  Synthetic polypeptide
FSTAFPGGSAVLGTSQAFATMLSCTPWCTP

SEQ ID NO: 6447 - protein, 30 aa, Artificial Sequence; identical to SEQ ID NO: 6446
  Synthetic polypeptide

SEQ ID NO: 6448 - protein, 30 aa, Artificial Sequence; identical to SEQ ID NO: 6446
  Synthetic polypeptide

SEQ ID NO: 6449 - protein, 30 aa, Artificial Sequence; identical to SEQ ID NO: 6446
  Synthetic polypeptide

SEQ ID NO: 6450 - protein, 30 aa, Artificial Sequence; identical to SEQ ID NO: 6446
  Synthetic polypeptide

SEQ ID NO: 6451 - protein, 30 aa, Artificial Sequence; identical to SEQ ID NO: 6446
  Synthetic polypeptide

SEQ ID NO: 6452 - protein, 30 aa, Artificial Sequence; identical to SEQ ID NO: 6446
  Synthetic polypeptide

SEQ ID NO: 6453 - protein, 30 aa, Artificial Sequence
  Synthetic polypeptide
TLGRNWYLESGHLKLGSETAERPPDAFWSR

SEQ ID NO: 6454 - protein, 30 aa, Artificial Sequence
  Synthetic polypeptide
YHENGHTAQGCPFLGPGGVVLLGQHSLGHL

SEQ ID NO: 6455 - protein, 30 aa, Artificial Sequence; identical to SEQ ID NO: 6454
  Synthetic polypeptide

SEQ ID NO: 6456 - protein, 30 aa, Artificial Sequence; identical to SEQ ID NO: 6454
  Synthetic polypeptide

SEQ ID NO: 6457 - protein, 30 aa, Artificial Sequence; identical to SEQ ID NO: 6454
  Synthetic polypeptide

SEQ ID NO: 6458 - protein, 30 aa, Artificial Sequence
  Synthetic polypeptide
SQHFGRPSPHLPPQPVLLCQWPLHPHLLDV

SEQ ID NO: 6459 - protein, 30 aa, Artificial Sequence
  Synthetic polypeptide
GGEGRTGGECRGAEGRTGDVPFGEAAPSHS

SEQ ID NO: 6460 - protein, 30 aa, Artificial Sequence
  Synthetic polypeptide
RPQLEGPLSQEAFPNFLPHSHSSWHLTPSC

SEQ ID NO: 6461 - protein, 30 aa, Artificial Sequence; identical to SEQ ID NO: 6460
  Synthetic polypeptide

SEQ ID NO: 6462 - protein, 30 aa, Artificial Sequence; identical to SEQ ID NO: 6460
  Synthetic polypeptide

SEQ ID NO: 6463 - protein, 30 aa, Artificial Sequence; identical to SEQ ID NO: 6460
  Synthetic polypeptide

SEQ ID NO: 6464 - protein, 30 aa, Artificial Sequence
  Synthetic polypeptide
SQDFGRPRNVCYTGRKREGYMEKLRFWLSV

SEQ ID NO: 6465 - protein, 30 aa, Artificial Sequence; identical to SEQ ID NO: 6464
  Synthetic polypeptide

SEQ ID NO: 6466 - protein, 30 aa, Artificial Sequence; identical to SEQ ID NO: 6464
  Synthetic polypeptide

SEQ ID NO: 6467 - protein, 30 aa, Artificial Sequence; identical to SEQ ID NO: 6464
  Synthetic polypeptide

SEQ ID NO: 6468 - protein, 30 aa, Artificial Sequence; identical to SEQ ID NO: 6464
  Synthetic polypeptide

SEQ ID NO: 6469 - protein, 30 aa, Artificial Sequence
  Synthetic polypeptide
KWPYCPRLLQPMPEQDLLLLSLKSQCFVGS

SEQ ID NO: 6470 - protein, 30 aa, Artificial Sequence; identical to SEQ ID NO: 6469
  Synthetic polypeptide

SEQ ID NO: 6471 - protein, 30 aa, Artificial Sequence; identical to SEQ ID NO: 6469
  Synthetic polypeptide

SEQ ID NO: 6472 - protein, 30 aa, Artificial Sequence; identical to SEQ ID NO: 6469
  Synthetic polypeptide

SEQ ID NO: 6473 - protein, 30 aa, Artificial Sequence; identical to SEQ ID NO: 6469
  Synthetic polypeptide

SEQ ID NO: 6474 - protein, 30 aa, Artificial Sequence; identical to SEQ ID NO: 6469
  Synthetic polypeptide

SEQ ID NO: 6475 - protein, 30 aa, Artificial Sequence; identical to SEQ ID NO: 6469
  Synthetic polypeptide

SEQ ID NO: 6476 - protein, 30 aa, Artificial Sequence; identical to SEQ ID NO: 6469
  Synthetic polypeptide

SEQ ID NO: 6477 - protein, 30 aa, Artificial Sequence
  Synthetic polypeptide
AWTLEPDSLSSAVALALPVSVAVERAHRPQ

SEQ ID NO: 6478 - protein, 30 aa, Artificial Sequence; identical to SEQ ID NO: 6477
  Synthetic polypeptide

SEQ ID NO: 6479 - protein, 30 aa, Artificial Sequence; identical to SEQ ID NO: 6477
  Synthetic polypeptide

SEQ ID NO: 6480 - protein, 30 aa, Artificial Sequence; identical to SEQ ID NO: 6477
  Synthetic polypeptide

SEQ ID NO: 6481 - protein, 30 aa, Artificial Sequence; identical to SEQ ID NO: 6477
  Synthetic polypeptide

SEQ ID NO: 6482 - protein, 30 aa, Artificial Sequence; identical to SEQ ID NO: 6477
  Synthetic polypeptide

SEQ ID NO: 6483 - protein, 30 aa, Artificial Sequence; identical to SEQ ID NO: 6477
  Synthetic polypeptide

SEQ ID NO: 6484 - protein, 30 aa, Artificial Sequence
  Synthetic polypeptide
GWAWWLKTLIPALWEAEVGRSPEQGCNECV

SEQ ID NO: 6485 - protein, 30 aa, Artificial Sequence; identical to SEQ ID NO: 6484
  Synthetic polypeptide

SEQ ID NO: 6486 - protein, 30 aa, Artificial Sequence
  Synthetic polypeptide
GLHELSQVLGMSFALTLNCQIDKTSQTIGL

SEQ ID NO: 6487 - protein, 30 aa, Artificial Sequence; identical to SEQ ID NO: 6486
  Synthetic polypeptide

SEQ ID NO: 6488 - protein, 30 aa, Artificial Sequence
  Synthetic polypeptide
RRSTWKVLSIRPGIDLFPVLQRSLCHLWVL

SEQ ID NO: 6489 - protein, 30 aa, Artificial Sequence; identical to SEQ ID NO: 6488
  Synthetic polypeptide

SEQ ID NO: 6490 - protein, 30 aa, Artificial Sequence; identical to SEQ ID NO: 6488
  Synthetic polypeptide

SEQ ID NO: 6491 - protein, 30 aa, Artificial Sequence; identical to SEQ ID NO: 6488
  Synthetic polypeptide

SEQ ID NO: 6492 - protein, 30 aa, Artificial Sequence; identical to SEQ ID NO: 6488
  Synthetic polypeptide

SEQ ID NO: 6493 - protein, 30 aa, Artificial Sequence
  Synthetic polypeptide
IYSQCSAWPRPSTRRRKICPDPPSRLSQAP

SEQ ID NO: 6494 - protein, 30 aa, Artificial Sequence; identical to SEQ ID NO: 6493
  Synthetic polypeptide

SEQ ID NO: 6495 - protein, 30 aa, Artificial Sequence; identical to SEQ ID NO: 6493
  Synthetic polypeptide

SEQ ID NO: 6496 - protein, 30 aa, Artificial Sequence; identical to SEQ ID NO: 6493
  Synthetic polypeptide

SEQ ID NO: 6497 - protein, 30 aa, Artificial Sequence; identical to SEQ ID NO: 6493
  Synthetic polypeptide

SEQ ID NO: 6498 - protein, 30 aa, Artificial Sequence
  Synthetic polypeptide
NERIYVKHLEQGEAYIGHRPARGCSSGVPF

SEQ ID NO: 6499 - protein, 30 aa, Artificial Sequence; identical to SEQ ID NO: 6498
  Synthetic polypeptide

SEQ ID NO: 6500 - protein, 30 aa, Artificial Sequence; identical to SEQ ID NO: 6498
  Synthetic polypeptide

SEQ ID NO: 6501 - protein, 30 aa, Artificial Sequence; identical to SEQ ID NO: 6498
  Synthetic polypeptide

SEQ ID NO: 6502 - protein, 30 aa, Artificial Sequence; identical to SEQ ID NO: 6498
  Synthetic polypeptide

SEQ ID NO: 6503 - protein, 30 aa, Artificial Sequence; identical to SEQ ID NO: 6498
  Synthetic polypeptide

SEQ ID NO: 6504 - protein, 30 aa, Artificial Sequence; identical to SEQ ID NO: 6498
  Synthetic polypeptide

SEQ ID NO: 6505 - protein, 30 aa, Artificial Sequence
  Synthetic polypeptide
DVGSTSALPPRPGCEERLCPDAPSENALRS

SEQ ID NO: 6506 - protein, 30 aa, Artificial Sequence; identical to SEQ ID NO: 6505
  Synthetic polypeptide

SEQ ID NO: 6507 - protein, 30 aa, Artificial Sequence; identical to SEQ ID NO: 6505
  Synthetic polypeptide

SEQ ID NO: 6508 - protein, 30 aa, Artificial Sequence; identical to SEQ ID NO: 6505
  Synthetic polypeptide

SEQ ID NO: 6509 - protein, 30 aa, Artificial Sequence
  Synthetic polypeptide
YHATALQPGRHSLHYRRRPWLQDTPHLLLE

SEQ ID NO: 6510 - protein, 30 aa, Artificial Sequence; identical to SEQ ID NO: 6509
  Synthetic polypeptide

SEQ ID NO: 6511 - protein, 30 aa, Artificial Sequence
  Synthetic polypeptide
FYCQLCNWWPWTNLLTCIFFSLLTCKMRFL

SEQ ID NO: 6512 - protein, 30 aa, Artificial Sequence
  Synthetic polypeptide
ERREGEESAREGGLFPRGADQEYSAFRVGM

SEQ ID NO: 6513 - protein, 30 aa, Artificial Sequence
  Synthetic polypeptide
TRSCRTPSHRGAPQEQHSQCLPGCFIGLPC

SEQ ID NO: 6514 - protein, 30 aa, Artificial Sequence; identical to SEQ ID NO: 6513
  Synthetic polypeptide

SEQ ID NO: 6515 - protein, 30 aa, Artificial Sequence
  Synthetic polypeptide
KFIFCFFWKIRTSGNIRSASWGGRELGSRP

SEQ ID NO: 6516 - protein, 30 aa, Artificial Sequence; identical to SEQ ID NO: 6515
  Synthetic polypeptide

SEQ ID NO: 6517 - protein, 30 aa, Artificial Sequence; identical to SEQ ID NO: 6515
  Synthetic polypeptide

SEQ ID NO: 6518 - protein, 30 aa, Artificial Sequence; identical to SEQ ID NO: 6515
  Synthetic polypeptide

SEQ ID NO: 6519 - protein, 30 aa, Artificial Sequence; identical to SEQ ID NO: 6515
  Synthetic polypeptide

SEQ ID NO: 6520 - protein, 30 aa, Artificial Sequence; identical to SEQ ID NO: 6515
  Synthetic polypeptide

SEQ ID NO: 6521 - protein, 30 aa, Artificial Sequence; identical to SEQ ID NO: 6515
  Synthetic polypeptide

SEQ ID NO: 6522 - protein, 30 aa, Artificial Sequence
  Synthetic polypeptide
WVQVLVLPYTHYVAFFRMLSPCKLCHPQKR

SEQ ID NO: 6523 - protein, 30 aa, Artificial Sequence; identical to SEQ ID NO: 6522
  Synthetic polypeptide

SEQ ID NO: 6524 - protein, 30 aa, Artificial Sequence; identical to SEQ ID NO: 6522
  Synthetic polypeptide

SEQ ID NO: 6525 - protein, 30 aa, Artificial Sequence; identical to SEQ ID NO: 6522
  Synthetic polypeptide

SEQ ID NO: 6526 - protein, 30 aa, Artificial Sequence; identical to SEQ ID NO: 6522
  Synthetic polypeptide

SEQ ID NO: 6527 - protein, 29 aa, Artificial Sequence
  Synthetic polypeptide
LMPVIPAPWEAKVGRLLEARSWRQAWETH

SEQ ID NO: 6528 - protein, 29 aa, Artificial Sequence
  Synthetic polypeptide
LMPVIPAPWEAKVGRLLEARSWRQAWETH

SEQ ID NO: 6529 - protein, 29 aa, Artificial Sequence
  Synthetic polypeptide
GLMPVFVCVVHCSMVPGPGGMRSSMLWYC

SEQ ID NO: 6530 - protein, 29 aa, Artificial Sequence
  Synthetic polypeptide
GLMPVFVCVVHCSMVPGPGGMRSSMLWYC

SEQ ID NO: 6531 - protein, 29 aa, Artificial Sequence
  Synthetic polypeptide
GLMPVFVCVVHCSMVPGPGGMRSSMLWYC

SEQ ID NO: 6532 - protein, 29 aa, Artificial Sequence
  Synthetic polypeptide
GRMQWLTPVIPAFWEAEAVRSQVCEEQHL

SEQ ID NO: 6533 - protein, 29 aa, Artificial Sequence
  Synthetic polypeptide
GRMQWLTPVIPAFWEAEAVRSQVCEEQHL

SEQ ID NO: 6534 - protein, 29 aa, Artificial Sequence
  Synthetic polypeptide
GRMQWLTPVIPAFWEAEAVRSQVCEEQHL

SEQ ID NO: 6535 - protein, 29 aa, Artificial Sequence
  Synthetic polypeptide
RVDRSRLQKVLMPDCLPGTQSLRRGSMSS

SEQ ID NO: 6536 - protein, 29 aa, Artificial Sequence
  Synthetic polypeptide
RVDRSRLQKVLMPDCLPGTQSLRRGSMSS

SEQ ID NO: 6537 - protein, 29 aa, Artificial Sequence
  Synthetic polypeptide
RVDRSRLQKVLMPDCLPGTQSLRRGSMSS

SEQ ID NO: 6538 - protein, 29 aa, Artificial Sequence
  Synthetic polypeptide
SQHFGRPRSSRVRGRMSTATSTHRGRITN

SEQ ID NO: 6539 - protein, 29 aa, Artificial Sequence
  Synthetic polypeptide
SQHFGRPRSSRVRGRMSTATSTHRGRITN

SEQ ID NO: 6540 - protein, 29 aa, Artificial Sequence
  Synthetic polypeptide
SQHFGRPRSSRVRGRMSTATSTHRGRITN

SEQ ID NO: 6541 - protein, 29 aa, Artificial Sequence
  Synthetic polypeptide
SQHFGRPRSSRVRGRMSTATSTHRGRITN

SEQ ID NO: 6542 - protein, 29 aa, Artificial Sequence
  Synthetic polypeptide
SQHFGRPRSSRVRGRMSTATSTHRGRITN

SEQ ID NO: 6543 - protein, 29 aa, Artificial Sequence
  Synthetic polypeptide
GGEEEGRMEGGWERVLPSFIQTAGLILGP

SEQ ID NO: 6544 - protein, 29 aa, Artificial Sequence
  Synthetic polypeptide
GGEEEGRMEGGWERVLPSFIQTAGLILGP

SEQ ID NO: 6545 - protein, 29 aa, Artificial Sequence
  Synthetic polypeptide
LTPAIPALWEAEVGGSQGQEIETILANMV

SEQ ID NO: 6546 - protein, 29 aa, Artificial Sequence
  Synthetic polypeptide
GGWITRSRDRDHPGQHGLAHTAPRALTSQ

SEQ ID NO: 6547 - protein, 29 aa, Artificial Sequence
  Synthetic polypeptide
LTPAIPALWEAEVGGSQGQEIETILANMV

SEQ ID NO: 6548 - protein, 29 aa, Artificial Sequence
  Synthetic polypeptide
GGWITRSRDRDHPGQHGLAHTAPRALTSQ

SEQ ID NO: 6549 - protein, 29 aa, Artificial Sequence
  Synthetic polypeptide
LTPAIPALWEAEVGGSQGQEIETILANMV

SEQ ID NO: 6550 - protein, 29 aa, Artificial Sequence
  Synthetic polypeptide
GGWITRSRDRDHPGQHGLAHTAPRALTSQ

SEQ ID NO: 6551 - protein, 29 aa, Artificial Sequence
  Synthetic polypeptide
EFGGLLERTQMMWYQLAKEEPGVGACALD

SEQ ID NO: 6552 - protein, 29 aa, Artificial Sequence
  Synthetic polypeptide
EFGGLLERTQMMWYQLAKEEPGVGACALD

SEQ ID NO: 6553 - protein, 29 aa, Artificial Sequence
  Synthetic polypeptide
TLLKDILSVLTTHKGTASLGRHVGGCVAL

SEQ ID NO: 6554 - protein, 29 aa, Artificial Sequence
  Synthetic polypeptide
TLLKDILSVLTTHKGTASLGRHVGGCVAL

SEQ ID NO: 6555 - protein, 29 aa, Artificial Sequence
  Synthetic polypeptide
TLLKDILSVLTTHKGTASLGRHVGGCVAL

SEQ ID NO: 6556 - protein, 29 aa, Artificial Sequence
  Synthetic polypeptide
RPQLEGPLSQEAFPNFLPHSHSFLALTEN

SEQ ID NO: 6557 - protein, 29 aa, Artificial Sequence
  Synthetic polypeptide
RPQLEGPLSQEAFPNFLPHSHSFLALTEN

SEQ ID NO: 6558 - protein, 29 aa, Artificial Sequence
  Synthetic polypeptide
AGRSGSHLQSQHFGRPKQTDHLRRQCFTK

SEQ ID NO: 6559 - protein, 29 aa, Artificial Sequence
  Synthetic polypeptide
AGRSGSHLQSQHFGRPKQTDHLRRQCFTK

SEQ ID NO: 6560 - protein, 29 aa, Artificial Sequence
  Synthetic polypeptide
AGRSGSHLQSQHFGRPKQTDHLRRQCFTK

SEQ ID NO: 6561 - protein, 29 aa, Artificial Sequence
  Synthetic polypeptide
AGRSGSHLQSQHFGRPKQTDHLRRQCFTK

SEQ ID NO: 6562 - protein, 29 aa, Artificial Sequence
  Synthetic polypeptide
DVGSAFAPPPCLGCEERLCQAATPSGRNQ

SEQ ID NO: 6563 - protein, 29 aa, Artificial Sequence
  Synthetic polypeptide
GALPPGSHPVWDVRSVSARQPPRPGGRNQ

SEQ ID NO: 6564 - protein, 29 aa, Artificial Sequence
  Synthetic polypeptide
YPLYLHTRIEGSNKIMDFASRAKLAVQKL

SEQ ID NO: 6565 - protein, 29 aa, Artificial Sequence
  Synthetic polypeptide
NVSQMKNHGVNWSMLILVLKKILRIYTLL

SEQ ID NO: 6566 - protein, 29 aa, Artificial Sequence
  Synthetic polypeptide
NVSQMKNHGVNWSMLILVLKKILRIYTLL

SEQ ID NO: 6567 - protein, 29 aa, Artificial Sequence
  Synthetic polypeptide
NVSQMKNHGVNWSMLILVLKKILRIYTLL

SEQ ID NO: 6568 - protein, 29 aa, Artificial Sequence
  Synthetic polypeptide
WIGKTLEGQWREHFHLHPGTLLRLRGWRL

SEQ ID NO: 6569 - protein, 29 aa, Artificial Sequence
  Synthetic polypeptide
SQHFGRPRRVACLRSGVRDQPGQYGKKVT

SEQ ID NO: 6570 - protein, 29 aa, Artificial Sequence
  Synthetic polypeptide
DTSEEDRKKRLGLPDGKMCCKTEVITIRS

SEQ ID NO: 6571 - protein, 29 aa, Artificial Sequence
  Synthetic polypeptide
DQPGQHSETSSLLKIQTITWEWCFIFKPG

SEQ ID NO: 6572 - protein, 29 aa, Artificial Sequence
  Synthetic polypeptide
DQPGQHSETSSLLKIQTITWEWCFIFKPG

SEQ ID NO: 6573 - protein, 29 aa, Artificial Sequence
  Synthetic polypeptide
HKAWHRSVPSSPKESMPSLGFMNVGLSTC

SEQ ID NO: 6574 - protein, 29 aa, Artificial Sequence
  Synthetic polypeptide
HKAWHRSVPSSPKESMPSLGFMNVGLSTC

SEQ ID NO: 6575 - protein, 29 aa, Artificial Sequence
  Synthetic polypeptide
HKAWHRSVPSSPKESMPSLGFMNVGLSTC

SEQ ID NO: 6576 - protein, 29 aa, Artificial Sequence
  Synthetic polypeptide
HKAWHRSVPSSPKESMPSLGFMNVGLSTC

SEQ ID NO: 6577 - protein, 29 aa, Artificial Sequence
  Synthetic polypeptide
HKAWHRSVPSSPKESMPSLGFMNVGLSTC

SEQ ID NO: 6578 - protein, 29 aa, Artificial Sequence
  Synthetic polypeptide
IYSQCSAWPRPSTRRRICPDPPSRLSQAP

SEQ ID NO: 6579 - protein, 29 aa, Artificial Sequence
  Synthetic polypeptide
IYSQCSAWPRPSTRRRICPDPPSRLSQAP

SEQ ID NO: 6580 - protein, 29 aa, Artificial Sequence
  Synthetic polypeptide
IYSQCSAWPRPSTRRRICPDPPSRLSQAP

SEQ ID NO: 6581 - protein, 29 aa, Artificial Sequence
  Synthetic polypeptide
SQHFGRPRTTSPWRVSCCSSLGRPGKSCR

SEQ ID NO: 6582 - protein, 29 aa, Artificial Sequence
  Synthetic polypeptide
SQHFGRPRTTSPWRVSCCSSLGRPGKSCR

SEQ ID NO: 6583 - protein, 29 aa, Artificial Sequence
  Synthetic polypeptide
SQHFGRPRTTSPWRVSCCSSLGRPGKSCR

SEQ ID NO: 6584 - protein, 29 aa, Artificial Sequence
  Synthetic polypeptide
SQHFGRPRTTSPWRVSCCSSLGRPGKSCR

SEQ ID NO: 6585 - protein, 29 aa, Artificial Sequence
  Synthetic polypeptide
SQHFGRPRTTSPWRVSCCSSLGRPGKSCR

SEQ ID NO: 6586 - protein, 29 aa, Artificial Sequence
  Synthetic polypeptide
SVPVSHYPQMGPSSCRKTSSGLPLILRDG

SEQ ID NO: 6587 - protein, 29 aa, Artificial Sequence
  Synthetic polypeptide
SVPVSHYPQMGPSSCRKTSSGLPLILRDG

SEQ ID NO: 6588 - protein, 29 aa, Artificial Sequence
  Synthetic polypeptide
SVPVSHYPQMGPSSCRKTSSGLPLILRDG

SEQ ID NO: 6589 - protein, 29 aa, Artificial Sequence
  Synthetic polypeptide
SERGEREKRARERGGYFLGAPIKNTVHFE

SEQ ID NO: 6590 - protein, 29 aa, Artificial Sequence
  Synthetic polypeptide
SERGEREKRARERGGYFLGAPIKNTVHFE

SEQ ID NO: 6591 - protein, 29 aa, Artificial Sequence
  Synthetic polypeptide
SERGEREKRARERGGYFLGAPIKNTVHFE

SEQ ID NO: 6592 - protein, 29 aa, Artificial Sequence
  Synthetic polypeptide
SERGEREKRARERGGYFLGAPIKNTVHFE

SEQ ID NO: 6593 - protein, 29 aa, Artificial Sequence
  Synthetic polypeptide
DQEFKTSLANTISTSSGCKPRKTTCCCSN

SEQ ID NO: 6594 - protein, 29 aa, Artificial Sequence
  Synthetic polypeptide
DQEFKTSLANTISTSSGCKPRKTTCCCSN

SEQ ID NO: 6595 - protein, 29 aa, Artificial Sequence
  Synthetic polypeptide
GPEAGLCTGRVSRRRRGRRRGVYGAGTTT

SEQ ID NO: 6596 - protein, 29 aa, Artificial Sequence
  Synthetic polypeptide
GPEAGLCTGRVSRRRRGRRRGVYGAGTTT

SEQ ID NO: 6597 - protein, 29 aa, Artificial Sequence
  Synthetic polypeptide
GPEAGLCTGRVSRRRRGRRRGVYGAGTTT

SEQ ID NO: 6598 - protein, 28 aa, Artificial Sequence
  Synthetic polypeptide
PCGVEPLLSCSPLYLQHRIWLMCAPAQT

SEQ ID NO: 6599 - protein, 28 aa, Artificial Sequence
  Synthetic polypeptide
PCGVEPLLSCSPLYLQHRIWLMCAPAQT

SEQ ID NO: 6600 - protein, 28 aa, Artificial Sequence
  Synthetic polypeptide
PCGVEPLLSCSPLYLQHRIWLMCAPAQT

SEQ ID NO: 6601 - protein, 28 aa, Artificial Sequence
  Synthetic polypeptide
PCGVEPLLSCSPLYLQHRIWLMCAPAQT

SEQ ID NO: 6602 - protein, 28 aa, Artificial Sequence
  Synthetic polypeptide
PCGVEPLLSCSPLYLQHRIWLMCAPAQT

SEQ ID NO: 6603 - protein, 28 aa, Artificial Sequence
  Synthetic polypeptide
PGAVAHTCNPSTLGGQGRRITRERIFFL

SEQ ID NO: 6604 - protein, 28 aa, Artificial Sequence
  Synthetic polypeptide
PGAVAHTCNPSTLGGQGRRITRERIFFL

SEQ ID NO: 6605 - protein, 28 aa, Artificial Sequence
  Synthetic polypeptide
PDAVAHACNPSILGGRGGQITSCGHPRP

SEQ ID NO: 6606 - protein, 28 aa, Artificial Sequence
  Synthetic polypeptide
PDAVAHACNPSILGGRGGQITSCGHPRP

SEQ ID NO: 6607 - protein, 28 aa, Artificial Sequence
  Synthetic polypeptide
PDAVAHACNPSILGGRGGQITSCGHPRP

SEQ ID NO: 6608 - protein, 28 aa, Artificial Sequence
  Synthetic polypeptide
ANNQALISCRICFHLNLDFSGSGTQWLF

SEQ ID NO: 6609 - protein, 28 aa, Artificial Sequence
  Synthetic polypeptide
ANNQALISCRICFHLNLDFSGSGTQWLF

SEQ ID NO: 6610 - protein, 28 aa, Artificial Sequence
  Synthetic polypeptide
WVSVIPATWEAEAGESLEPRRQRRSVVP

SEQ ID NO: 6611 - protein, 28 aa, Artificial Sequence
  Synthetic polypeptide
SQLLGRLRQENHLNPGGRGDQWSLDFSQ

SEQ ID NO: 6612 - protein, 28 aa, Artificial Sequence
  Synthetic polypeptide
WVSVIPATWEAEAGESLEPRRQRRSVVP

SEQ ID NO: 6613 - protein, 28 aa, Artificial Sequence
  Synthetic polypeptide
SQLLGRLRQENHLNPGGRGDQWSLDFSQ

SEQ ID NO: 6614 - protein, 28 aa, Artificial Sequence
  Synthetic polypeptide
GTSRLWSTLQMGMRSTESKKLGKEISNM

SEQ ID NO: 6615 - protein, 28 aa, Artificial Sequence
  Synthetic polypeptide
GTSRLWSTLQMGMRSTESKKLGKEISNM

SEQ ID NO: 6616 - protein, 28 aa, Artificial Sequence
  Synthetic polypeptide
RDFTVYFMVIFPGPSRGLGVWQCSALSG

SEQ ID NO: 6617 - protein, 28 aa, Artificial Sequence
  Synthetic polypeptide
SFSPSIIVILNIPDTYHYSMLLITARWL

SEQ ID NO: 6618 - protein, 28 aa, Artificial Sequence
  Synthetic polypeptide
CSNCPAESSHHRTSPIHSSHEVPFTSCH

SEQ ID NO: 6619 - protein, 28 aa, Artificial Sequence
  Synthetic polypeptide
SLLFALISYISFPVGCPPQVAVSAGLHL

SEQ ID NO: 6620 - protein, 28 aa, Artificial Sequence
  Synthetic polypeptide
SQHFGMPRFSKWPPQTWSTWASVWLATL

SEQ ID NO: 6621 - protein, 28 aa, Artificial Sequence
  Synthetic polypeptide
SQHFGMPRFSKWPPQTWSTWASVWLATL

SEQ ID NO: 6622 - protein, 28 aa, Artificial Sequence
  Synthetic polypeptide
SQHFGMPRFSKWPPQTWSTWASVWLATL

SEQ ID NO: 6623 - protein, 28 aa, Artificial Sequence
  Synthetic polypeptide
SQHFGMPRFSKWPPQTWSTWASVWLATL

SEQ ID NO: 6624 - protein, 28 aa, Artificial Sequence
  Synthetic polypeptide
SQHFGMPRFSKWPPQTWSTWASVWLATL

SEQ ID NO: 6625 - protein, 28 aa, Artificial Sequence
  Synthetic polypeptide
SQHFGMPRFSKWPPQTWSTWASVWLATL

SEQ ID NO: 6626 - protein, 28 aa, Artificial Sequence
  Synthetic polypeptide
SQHFGMPRFSKWPPQTWSTWASVWLATL

SEQ ID NO: 6627 - protein, 28 aa, Artificial Sequence
  Synthetic polypeptide
QNGRKKRKSNWKRGDSHSVHQLARPRGA

SEQ ID NO: 6628 - protein, 28 aa, Artificial Sequence
  Synthetic polypeptide
QNGRKKRKSNWKRGDSHSVHQLARPRGA

SEQ ID NO: 6629 - protein, 28 aa, Artificial Sequence
  Synthetic polypeptide
QNGRKKRKSNWKRGDSHSVHQLARPRGA

SEQ ID NO: 6630 - protein, 28 aa, Artificial Sequence
  Synthetic polypeptide
QNGRKKRKSNWKRGDSHSVHQLARPRGA

SEQ ID NO: 6631 - protein, 28 aa, Artificial Sequence
  Synthetic polypeptide
QNGRKKRKSNWKRGDSHSVHQLARPRGA

SEQ ID NO: 6632 - protein, 28 aa, Artificial Sequence
  Synthetic polypeptide
QMPVIPATKEAEKGESLEPRRQRLRPTL

SEQ ID NO: 6633 - protein, 28 aa, Artificial Sequence
  Synthetic polypeptide
QMPVIPATKEAEKGESLEPRRQRLRPTL

SEQ ID NO: 6634 - protein, 28 aa, Artificial Sequence
  Synthetic polypeptide
QMPVIPATKEAEKGESLEPRRQRLRPTL

SEQ ID NO: 6635 - protein, 28 aa, Artificial Sequence
  Synthetic polypeptide
MDELNPQFSPPLLQLPRQLLHQVQQITL

SEQ ID NO: 6636 - protein, 28 aa, Artificial Sequence
  Synthetic polypeptide
MDELNPQFSPPLLQLPRQLLHQVQQITL

SEQ ID NO: 6637 - protein, 28 aa, Artificial Sequence
  Synthetic polypeptide
MDELNPQFSPPLLQLPRQLLHQVQQITL

SEQ ID NO: 6638 - protein, 28 aa, Artificial Sequence
  Synthetic polypeptide
MDELNPQFSPPLLQLPRQLLHQVQQITL

SEQ ID NO: 6639 - protein, 28 aa, Artificial Sequence
  Synthetic polypeptide
KAVRVLLAALGQITSEVQGGFEQWKHSV

SEQ ID NO: 6640 - protein, 28 aa, Artificial Sequence
  Synthetic polypeptide
KAVRVLLAALGQITSEVQGGFEQWKHSV

SEQ ID NO: 6641 - protein, 28 aa, Artificial Sequence
  Synthetic polypeptide
KAVRVLLAALGQITSEVQGGFEQWKHSV

SEQ ID NO: 6642 - protein, 28 aa, Artificial Sequence
  Synthetic polypeptide
QYYAFCFCQELVQAESIMKVNHKPLRTA

SEQ ID NO: 6643 - protein, 28 aa, Artificial Sequence
  Synthetic polypeptide
QYYAFCFCQELVQAESIMKVNHKPLRTA

SEQ ID NO: 6644 - protein, 27 aa, Artificial Sequence
  Synthetic polypeptide
GQVQWLMPVIPAFWVADMGGSPELKKR

SEQ ID NO: 6645 - protein, 27 aa, Artificial Sequence
  Synthetic polypeptide
GQVQWLMPVIPAFWVADMGGSPELKKR

SEQ ID NO: 6646 - protein, 27 aa, Artificial Sequence
  Synthetic polypeptide
AAENSKKRTELRSDSVSGVCIRKSPTR

SEQ ID NO: 6647 - protein, 27 aa, Artificial Sequence
  Synthetic polypeptide
AAENSKKRTELRSDSVSGVCIRKSPTR

SEQ ID NO: 6648 - protein, 27 aa, Artificial Sequence
  Synthetic polypeptide
CQHFERPRREDHEEKQELSGRSEASHG

SEQ ID NO: 6649 - protein, 27 aa, Artificial Sequence
  Synthetic polypeptide
CQHFERPRREDHEEKQELSGRSEASHG

SEQ ID NO: 6650 - protein, 27 aa, Artificial Sequence
  Synthetic polypeptide
CQHFERPRREDHEEKQELSGRSEASHG

SEQ ID NO: 6651 - protein, 27 aa, Artificial Sequence
  Synthetic polypeptide
CQHFERPRREDHEEKQELSGRSEASHG

SEQ ID NO: 6652 - protein, 27 aa, Artificial Sequence
  Synthetic polypeptide
CQHFERPRREDHEEKQELSGRSEASHG

SEQ ID NO: 6653 - protein, 27 aa, Artificial Sequence
  Synthetic polypeptide
CQHFERPRREDHEEKQELSGRSEASHG

SEQ ID NO: 6654 - protein, 27 aa, Artificial Sequence
  Synthetic polypeptide
CQHFERPRREDHEEKQELSGRSEASHG

SEQ ID NO: 6655 - protein, 27 aa, Artificial Sequence
  Synthetic polypeptide
LCLEKEEDQRRIEITTSCNLNRQLPIR

SEQ ID NO: 6656 - protein, 27 aa, Artificial Sequence
  Synthetic polypeptide
LCLEKEEDQRRIEITTSCNLNRQLPIR

SEQ ID NO: 6657 - protein, 27 aa, Artificial Sequence
  Synthetic polypeptide
LCLEKEEDQRRIEITTSCNLNRQLPIR

SEQ ID NO: 6658 - protein, 27 aa, Artificial Sequence
  Synthetic polypeptide
LCLEKEEDQRRIEITTSCNLNRQLPIR

SEQ ID NO: 6659 - protein, 27 aa, Artificial Sequence
  Synthetic polypeptide
EDTFQAWPKCLIHPSPALSPLARCCLP

SEQ ID NO: 6660 - protein, 27 aa, Artificial Sequence
  Synthetic polypeptide
SASLGLPRCRDCRRTLVHSVLNAGRGG

SEQ ID NO: 6661 - protein, 27 aa, Artificial Sequence
  Synthetic polypeptide
SASLGLPRCRDCRRTLVHSVLNAGRGG

SEQ ID NO: 6662 - protein, 27 aa, Artificial Sequence
  Synthetic polypeptide
SASLGLPRCRDCRRTLVHSVLNAGRGG

SEQ ID NO: 6663 - protein, 27 aa, Artificial Sequence
  Synthetic polypeptide
SASLGLPRCRDCRRTLVHSVLNAGRGG

SEQ ID NO: 6664 - protein, 27 aa, Artificial Sequence
  Synthetic polypeptide
SASLGLPRCRDCRRTLVHSVLNAGRGG

SEQ ID NO: 6665 - protein, 27 aa, Artificial Sequence
  Synthetic polypeptide
SASLGLPRCRDCRRTLVHSVLNAGRGG

SEQ ID NO: 6666 - protein, 27 aa, Artificial Sequence
  Synthetic polypeptide
SASLGLPRCRDCRRTLVHSVLNAGRGG

SEQ ID NO: 6667 - protein, 27 aa, Artificial Sequence
  Synthetic polypeptide
SASLGLPRCRDCRRTLVHSVLNAGRGG

SEQ ID NO: 6668 - protein, 27 aa, Artificial Sequence
  Synthetic polypeptide
SASLGLPRCRDCRRTLVHSVLNAGRGG

SEQ ID NO: 6669 - protein, 27 aa, Artificial Sequence
  Synthetic polypeptide
SASLGLPRCRDCRRTLVHSVLNAGRGG

SEQ ID NO: 6670 - protein, 27 aa, Artificial Sequence
  Synthetic polypeptide
GFLSHVELSRKKLSPGKTKTSWTQRCL

SEQ ID NO: 6671 - protein, 27 aa, Artificial Sequence
  Synthetic polypeptide
DLPRRAFGWDLEGLLPKNKDTSRRTCC

SEQ ID NO: 6672 - protein, 27 aa, Artificial Sequence
  Synthetic polypeptide
SQHFGRPRRVDHEVRRSRPSWLTRWLP

SEQ ID NO: 6673 - protein, 27 aa, Artificial Sequence
  Synthetic polypeptide
SQHFGRPRRVDHEVRRSRPSWLTRWLP

SEQ ID NO: 6674 - protein, 27 aa, Artificial Sequence
  Synthetic polypeptide
SQHFGRPRRVDHEVRRSRPSWLTRWLP

SEQ ID NO: 6675 - protein, 27 aa, Artificial Sequence
  Synthetic polypeptide
SQHFGRPRRVDHEVRRSRPSWLTRWLP

SEQ ID NO: 6676 - protein, 27 aa, Artificial Sequence
  Synthetic polypeptide
SQHFGRPRRVDHEVRRSRPSWLTRWLP

SEQ ID NO: 6677 - protein, 27 aa, Artificial Sequence
  Synthetic polypeptide
SQHFGRPRRVDHEVRRSRPSWLTRWLP

SEQ ID NO: 6678 - protein, 27 aa, Artificial Sequence
  Synthetic polypeptide
QALQVPATSRFLPAHCCIRLLRKQCKM

SEQ ID NO: 6679 - protein, 27 aa, Artificial Sequence
  Synthetic polypeptide
QALQVPATSRFLPAHCCIRLLRKQCKM

SEQ ID NO: 6680 - protein, 27 aa, Artificial Sequence
  Synthetic polypeptide
QALQVPATSRFLPAHCCIRLLRKQCKM

SEQ ID NO: 6681 - protein, 27 aa, Artificial Sequence
  Synthetic polypeptide
QALQVPATSRFLPAHCCIRLLRKQCKM

SEQ ID NO: 6682 - protein, 27 aa, Artificial Sequence
  Synthetic polypeptide
GLTSHASCTACGTQTSLITCFCEVQEN

SEQ ID NO: 6683 - protein, 27 aa, Artificial Sequence
  Synthetic polypeptide
KDQQDGPHQMWLLDLGLLSSHDGRERG

SEQ ID NO: 6684 - protein, 27 aa, Artificial Sequence
  Synthetic polypeptide
NEAITNTPKTNGRITGFLKSRSPDSVR

SEQ ID NO: 6685 - protein, 27 aa, Artificial Sequence
  Synthetic polypeptide
NEAITNTPKTNGRITGFLKSRSPDSVR

SEQ ID NO: 6686 - protein, 27 aa, Artificial Sequence
  Synthetic polypeptide
NEAITNTPKTNGRITGFLKSRSPDSVR

SEQ ID NO: 6687 - protein, 27 aa, Artificial Sequence
  Synthetic polypeptide
PLPLLCQPHKGRDAWATAGAALCLLEE

SEQ ID NO: 6688 - protein, 27 aa, Artificial Sequence
  Synthetic polypeptide
PLPLLCQPHKGRDAWATAGAALCLLEE

SEQ ID NO: 6689 - protein, 27 aa, Artificial Sequence
  Synthetic polypeptide
PLPLLCQPHKGRDAWATAGAALCLLEE

SEQ ID NO: 6690 - protein, 27 aa, Artificial Sequence
  Synthetic polypeptide
SQHFGRLRQTDHLSNSNSESKFAIWEA

SEQ ID NO: 6691 - protein, 27 aa, Artificial Sequence
  Synthetic polypeptide
SQHFGRLRQTDHLSNSNSESKFAIWEA

SEQ ID NO: 6692 - protein, 27 aa, Artificial Sequence
  Synthetic polypeptide
SQHFGRLRQTDHLSNSNSESKFAIWEA

SEQ ID NO: 6693 - protein, 27 aa, Artificial Sequence
  Synthetic polypeptide
NLEGSPSRSAESEFALLTRVCCPTSPK

SEQ ID NO: 6694 - protein, 27 aa, Artificial Sequence
  Synthetic polypeptide
NLEGSPSRSAESEFALLTRVCCPTSPK

SEQ ID NO: 6695 - protein, 27 aa, Artificial Sequence
  Synthetic polypeptide
NLEGSPSRSAESEFALLTRVCCPTSPK

SEQ ID NO: 6696 - protein, 27 aa, Artificial Sequence
  Synthetic polypeptide
NLEGSPSRSAESEFALLTRVCCPTSPK

SEQ ID NO: 6697 - protein, 27 aa, Artificial Sequence
  Synthetic polypeptide
NLEGSPSRSAESEFALLTRVCCPTSPK

SEQ ID NO: 6698 - protein, 27 aa, Artificial Sequence
  Synthetic polypeptide
NLEGSPSRSAESEFALLTRVCCPTSPK

SEQ ID NO: 6699 - protein, 27 aa, Artificial Sequence
  Synthetic polypeptide
RKMVYEKAQCLVYAFSSSRKSGMFTKH

SEQ ID NO: 6700 - protein, 27 aa, Artificial Sequence
  Synthetic polypeptide
RKMVYEKAQCLVYAFSSSRKSGMFTKH

SEQ ID NO: 6701 - protein, 27 aa, Artificial Sequence
  Synthetic polypeptide
RKMVYEKAQCLVYAFSSSRKSGMFTKH

SEQ ID NO: 6702 - protein, 27 aa, Artificial Sequence
  Synthetic polypeptide
RKMVYEKAQCLVYAFSSSRKSGMFTKH

SEQ ID NO: 6703 - protein, 27 aa, Artificial Sequence
  Synthetic polypeptide
RKMVYEKAQCLVYAFSSSRKSGMFTKH

SEQ ID NO: 6704 - protein, 27 aa, Artificial Sequence
  Synthetic polypeptide
SQHFGMPRWADHLRSGVRDQPSQPGDL

SEQ ID NO: 6705 - protein, 27 aa, Artificial Sequence
  Synthetic polypeptide
SQHFGMPRWADHLRSGVRDQPSQPGDL

SEQ ID NO: 6706 - protein, 27 aa, Artificial Sequence
  Synthetic polypeptide
SQHFGMPRWADHLRSGVRDQPSQPGDL

SEQ ID NO: 6707 - protein, 27 aa, Artificial Sequence
  Synthetic polypeptide
SQHFGMPRWADHLRSGVRDQPSQPGDL

SEQ ID NO: 6708 - protein, 27 aa, Artificial Sequence
  Synthetic polypeptide
SQHFGMPRWADHLRSGVRDQPSQPGDL

SEQ ID NO: 6709 - protein, 27 aa, Artificial Sequence
  Synthetic polypeptide
SQHFGMPRWADHLRSGVRDQPSQPGDL

SEQ ID NO: 6710 - protein, 27 aa, Artificial Sequence
  Synthetic polypeptide
SQHFGMPRWADHLRSGVRDQPSQPGDL

SEQ ID NO: 6711 - protein, 27 aa, Artificial Sequence
  Synthetic polypeptide
NLSHNHAAPSGSPAIVPLTQRKTIWRM

SEQ ID NO: 6712 - protein, 27 aa, Artificial Sequence
  Synthetic polypeptide
NLSHNHAAPSGSPAIVPLTQRKTIWRM

SEQ ID NO: 6713 - protein, 27 aa, Artificial Sequence
  Synthetic polypeptide
NLSHNHAAPSGSPAIVPLTQRKTIWRM

SEQ ID NO: 6714 - protein, 27 aa, Artificial Sequence
  Synthetic polypeptide
NLSHNHAAPSGSPAIVPLTQRKTIWRM

SEQ ID NO: 6715 - protein, 27 aa, Artificial Sequence
  Synthetic polypeptide
VIIMLLLLEALQLFLLLRERRFGECKK

SEQ ID NO: 6716 - protein, 27 aa, Artificial Sequence
  Synthetic polypeptide
NLSHNHAAPSGSPAIVPLTQRKTIWRM

SEQ ID NO: 6717 - protein, 27 aa, Artificial Sequence
  Synthetic polypeptide
QGFPTLRPWTGADLWPLGTELHSRRGI

SEQ ID NO: 6718 - protein, 26 aa, Artificial Sequence
  Synthetic polypeptide
RLPLGKAFCRFNKAGAPRVSWRPQTW

SEQ ID NO: 6719 - protein, 26 aa, Artificial Sequence
  Synthetic polypeptide
LALLRCLLYHTGLEPNPHCLQVSRDE

SEQ ID NO: 6720 - protein, 26 aa, Artificial Sequence
  Synthetic polypeptide
LALLRCLLYHTGLEPNPHCLQVSRDE

SEQ ID NO: 6721 - protein, 26 aa, Artificial Sequence
  Synthetic polypeptide
LALLRCLLYHTGLEPNPHCLQVSRDE

SEQ ID NO: 6722 - protein, 26 aa, Artificial Sequence
  Synthetic polypeptide
CRFCPSACDGWSHRSDRSSSEQLPAL

SEQ ID NO: 6723 - protein, 26 aa, Artificial Sequence
  Synthetic polypeptide
CRFCPSACDGWSHRSDRSSSEQLPAL

SEQ ID NO: 6724 - protein, 26 aa, Artificial Sequence
  Synthetic polypeptide
CRFCPSACDGWSHRSDRSSSEQLPAL

SEQ ID NO: 6725 - protein, 26 aa, Artificial Sequence
  Synthetic polypeptide
CRFCPSACDGWSHRSDRSSSEQLPAL

SEQ ID NO: 6726 - protein, 26 aa, Artificial Sequence
  Synthetic polypeptide
CRFCPSACDGWSHRSDRSSSEQLPAL

SEQ ID NO: 6727 - protein, 26 aa, Artificial Sequence
  Synthetic polypeptide
SFSKFSSLKAGSSAVFPAAELLICGP

SEQ ID NO: 6728 - protein, 26 aa, Artificial Sequence
  Synthetic polypeptide
SFSKFSSLKAGSSAVFPAAELLICGP

SEQ ID NO: 6729 - protein, 26 aa, Artificial Sequence
  Synthetic polypeptide
SFSKFSSLKAGSSAVFPAAELLICGP

SEQ ID NO: 6730 - protein, 26 aa, Artificial Sequence
  Synthetic polypeptide
SFSKFSSLKAGSSAVFPAAELLICGP

SEQ ID NO: 6731 - protein, 26 aa, Artificial Sequence
  Synthetic polypeptide
EERRRGGWKGAGRGFCPPSSRQQVSS

SEQ ID NO: 6732 - protein, 26 aa, Artificial Sequence
  Synthetic polypeptide
EERRRGGWKGAGRGFCPPSSRQQVSS

SEQ ID NO: 6733 - protein, 26 aa, Artificial Sequence
  Synthetic polypeptide
ASARMVQTKAVTTHTVGKDCADPCDS

SEQ ID NO: 6734 - protein, 26 aa, Artificial Sequence
  Synthetic polypeptide
ASARMVQTKAVTTHTVGKDCADPCDS

SEQ ID NO: 6735 - protein, 26 aa, Artificial Sequence
  Synthetic polypeptide
ASARMVQTKAVTTHTVGKDCADPCDS

SEQ ID NO: 6736 - protein, 26 aa, Artificial Sequence
  Synthetic polypeptide
ASARMVQTKAVTTHTVGKDCADPCDS

SEQ ID NO: 6737 - protein, 26 aa, Artificial Sequence
  Synthetic polypeptide
ASARMVQTKAVTTHTVGKDCADPCDS

SEQ ID NO: 6738 - protein, 26 aa, Artificial Sequence
  Synthetic polypeptide
ASARMVQTKAVTTHTVGKDCADPCDS

SEQ ID NO: 6739 - protein, 26 aa, Artificial Sequence
  Synthetic polypeptide
LEQCLHVVASLCGRSSDNSSDQDFKI

SEQ ID NO: 6740 - protein, 26 aa, Artificial Sequence
  Synthetic polypeptide
LEQCLHVVASLCGRSSDNSSDQDFKI

SEQ ID NO: 6741 - protein, 26 aa, Artificial Sequence
  Synthetic polypeptide
WGRRRRIWGGLQNLLCDCGVGKGPTE

SEQ ID NO: 6742 - protein, 26 aa, Artificial Sequence
  Synthetic polypeptide
WGRRRRIWGGLQNLLCDCGVGKGPTE

SEQ ID NO: 6743 - protein, 26 aa, Artificial Sequence
  Synthetic polypeptide
WGRRRRIWGGLQNLLCDCGVGKGPTE

SEQ ID NO: 6744 - protein, 26 aa, Artificial Sequence
  Synthetic polypeptide
WGRRRRIWGGLQNLLCDCGVGKGPTE

SEQ ID NO: 6745 - protein, 26 aa, Artificial Sequence
  Synthetic polypeptide
WGRRRRIWGGLQNLLCDCGVGKGPTE

SEQ ID NO: 6746 - protein, 26 aa, Artificial Sequence
  Synthetic polypeptide
SQIAWLSVFLPWVWATMLSCTPWCTP

SEQ ID NO: 6747 - protein, 26 aa, Artificial Sequence
  Synthetic polypeptide
SQIAWLSVFLPWVWATMLSCTPWCTP

SEQ ID NO: 6748 - protein, 26 aa, Artificial Sequence
  Synthetic polypeptide
SQIAWLSVFLPWVWATMLSCTPWCTP

SEQ ID NO: 6749 - protein, 26 aa, Artificial Sequence
  Synthetic polypeptide
SQIAWLSVFLPWVWATMLSCTPWCTP

SEQ ID NO: 6750 - protein, 26 aa, Artificial Sequence
  Synthetic polypeptide
SQIAWLSVFLPWVWATMLSCTPWCTP

SEQ ID NO: 6751 - protein, 26 aa, Artificial Sequence
  Synthetic polypeptide
SQIAWLSVFLPWVWATMLSCTPWCTP

SEQ ID NO: 6752 - protein, 26 aa, Artificial Sequence
  Synthetic polypeptide
SQIAWLSVFLPWVWATMLSCTPWCTP

SEQ ID NO: 6753 - protein, 26 aa, Artificial Sequence
  Synthetic polypeptide
SLWEAKIGGLLDPRSSRPAWATCLQV

SEQ ID NO: 6754 - protein, 26 aa, Artificial Sequence
  Synthetic polypeptide
SLWEAKIGGLLDPRSSRPAWATCLQV

SEQ ID NO: 6755 - protein, 26 aa, Artificial Sequence
  Synthetic polypeptide
EGCVCFPFHDDCKFPEASVALRNYHR

SEQ ID NO: 6756 - protein, 26 aa, Artificial Sequence
  Synthetic polypeptide
EGCVCFPFHDDCKFPEASVALRNYHR

SEQ ID NO: 6757 - protein, 26 aa, Artificial Sequence
  Synthetic polypeptide
EGCVCFPFHDDCKFPEASVALRNYHR

SEQ ID NO: 6758 - protein, 26 aa, Artificial Sequence
  Synthetic polypeptide
EGCVCFPFHDDCKFPEASVALRNYHR

SEQ ID NO: 6759 - protein, 26 aa, Artificial Sequence
  Synthetic polypeptide
EGCVCFPFHDDCKFPEASVALRNYHR

SEQ ID NO: 6760 - protein, 26 aa, Artificial Sequence
  Synthetic polypeptide
EGCVCFPFHDDCKFPEASVALRNYHR

SEQ ID NO: 6761 - protein, 26 aa, Artificial Sequence
  Synthetic polypeptide
EGCVCFPFHDDCKFPEASVALRNYHR

SEQ ID NO: 6762 - protein, 26 aa, Artificial Sequence
  Synthetic polypeptide
EGCVCFPFHDDCKFPEASVALRNYHR

SEQ ID NO: 6763 - protein, 26 aa, Artificial Sequence
  Synthetic polypeptide
EGCVCFPFHDDCKFPEASVALRNYHR

SEQ ID NO: 6764 - protein, 26 aa, Artificial Sequence
  Synthetic polypeptide
EGCVCFPFHDDCKFPEASVALRNYHR

SEQ ID NO: 6765 - protein, 26 aa, Artificial Sequence
  Synthetic polypeptide
NPKLFECQHDTTSGKSTPDLVTDCGI

SEQ ID NO: 6766 - protein, 26 aa, Artificial Sequence
  Synthetic polypeptide
NPKLFECQHDTTSGKSTPDLVTDCGI

SEQ ID NO: 6767 - protein, 26 aa, Artificial Sequence
  Synthetic polypeptide
GYLSPGVCLSRQAQETMVRAPASWPV

SEQ ID NO: 6768 - protein, 26 aa, Artificial Sequence
  Synthetic polypeptide
GYLSPGVCLSRQAQETMVRAPASWPV

SEQ ID NO: 6769 - protein, 26 aa, Artificial Sequence
  Synthetic polypeptide
GYLSPGVCLSRQAQETMVRAPASWPV

SEQ ID NO: 6770 - protein, 26 aa, Artificial Sequence
  Synthetic polypeptide
GYLSPGVCLSRQAQETMVRAPASWPV

SEQ ID NO: 6771 - protein, 26 aa, Artificial Sequence
  Synthetic polypeptide
GLPSHVELDFMFSWFISFYTTKCVAL

SEQ ID NO: 6772 - protein, 26 aa, Artificial Sequence
  Synthetic polypeptide
GLPSHVELDFMFSWFISFYTTKCVAL

SEQ ID NO: 6773 - protein, 26 aa, Artificial Sequence
  Synthetic polypeptide
IGTAPVYSSQPERRRRRVISAFPSEE

SEQ ID NO: 6774 - protein, 26 aa, Artificial Sequence
  Synthetic polypeptide
IGTAPVYSSQPERRRRRVISAFPSEE

SEQ ID NO: 6775 - protein, 26 aa, Artificial Sequence
  Synthetic polypeptide
IGTAPVYSSQPERRRRRVISAFPSEE

SEQ ID NO: 6776 - protein, 26 aa, Artificial Sequence
  Synthetic polypeptide
PLHPSEPQCVICKAMMRTGFPVVPRK

SEQ ID NO: 6777 - protein, 26 aa, Artificial Sequence
  Synthetic polypeptide
PLHPSEPQCVICKAMMRTGFPVVPRK

SEQ ID NO: 6778 - protein, 26 aa, Artificial Sequence
  Synthetic polypeptide
PLHPSEPQCVICKAMMRTGFPVVPRK

SEQ ID NO: 6779 - protein, 26 aa, Artificial Sequence
  Synthetic polypeptide
PLHPSEPQCVICKAMMRTGFPVVPRK

SEQ ID NO: 6780 - protein, 26 aa, Artificial Sequence
  Synthetic polypeptide
KFKKLYIKCGQKYGAAETYRWGSLNC

SEQ ID NO: 6781 - protein, 26 aa, Artificial Sequence
  Synthetic polypeptide
KFKKLYIKCGQKYGAAETYRWGSLNC

SEQ ID NO: 6782 - protein, 26 aa, Artificial Sequence
  Synthetic polypeptide
KFKKLYIKCGQKYGAAETYRWGSLNC

SEQ ID NO: 6783 - protein, 26 aa, Artificial Sequence
  Synthetic polypeptide
KFKKLYIKCGQKYGAAETYRWGSLNC

SEQ ID NO: 6784 - protein, 26 aa, Artificial Sequence
  Synthetic polypeptide
KFKKLYIKCGQKYGAAETYRWGSLNC

SEQ ID NO: 6785 - protein, 26 aa, Artificial Sequence
  Synthetic polypeptide
KFKKLYIKCGQKYGAAETYRWGSLNC

SEQ ID NO: 6786 - protein, 26 aa, Artificial Sequence
  Synthetic polypeptide
KFKKLYIKCGQKYGAAETYRWGSLNC

SEQ ID NO: 6787 - protein, 26 aa, Artificial Sequence
  Synthetic polypeptide
VPLQSRHSLHYRRRPWLQDTPHLLLE

SEQ ID NO: 6788 - protein, 26 aa, Artificial Sequence
  Synthetic polypeptide
VPLQSRHSLHYRRRPWLQDTPHLLLE

SEQ ID NO: 6789 - protein, 26 aa, Artificial Sequence
  Synthetic polypeptide
FFLNPILFKLKAHTPFLLRLCLSAVE

SEQ ID NO: 6790 - protein, 26 aa, Artificial Sequence
  Synthetic polypeptide
FFLNPILFKLKAHTPFLLRLCLSAVE

SEQ ID NO: 6791 - protein, 26 aa, Artificial Sequence
  Synthetic polypeptide
GSLSLSPPPGLELQGAASYVWWMWCP

SEQ ID NO: 6792 - protein, 26 aa, Artificial Sequence
  Synthetic polypeptide
GSLSLSPPPGLELQGAASYVWWMWCP

SEQ ID NO: 6793 - protein, 26 aa, Artificial Sequence
  Synthetic polypeptide
GSLSLSPPPGLELQGAASYVWWMWCP

SEQ ID NO: 6794 - protein, 26 aa, Artificial Sequence
  Synthetic polypeptide
VSKDICLKIHTGYLFTTNTQMLWPHG

SEQ ID NO: 6795 - protein, 26 aa, Artificial Sequence
  Synthetic polypeptide
VSKDICLKIHTGYLFTTNTQMLWPHG

SEQ ID NO: 6796 - protein, 26 aa, Artificial Sequence
  Synthetic polypeptide
TSSVKCPVSVCCPAQLSTAAGISLVR

SEQ ID NO: 6797 - protein, 26 aa, Artificial Sequence
  Synthetic polypeptide
TSSVKCPVSVCCPAQLSTAAGISLVR

SEQ ID NO: 6798 - protein, 26 aa, Artificial Sequence
  Synthetic polypeptide
TSSVKCPVSVCCPAQLSTAAGISLVR

SEQ ID NO: 6799 - protein, 26 aa, Artificial Sequence
  Synthetic polypeptide
TSSVKCPVSVCCPAQLSTAAGISLVR

SEQ ID NO: 6800 - protein, 26 aa, Artificial Sequence
  Synthetic polypeptide
TSSVKCPVSVCCPAQLSTAAGISLVR

SEQ ID NO: 6801 - protein, 26 aa, Artificial Sequence
  Synthetic polypeptide
TSSVKCPVSVCCPAQLSTAAGISLVR

SEQ ID NO: 6802 - protein, 26 aa, Artificial Sequence
  Synthetic polypeptide
TSSVKCPVSVCCPAQLSTAAGISLVR

SEQ ID NO: 6803 - protein, 26 aa, Artificial Sequence
  Synthetic polypeptide
TSSVKCPVSVCCPAQLSTAAGISLVR

SEQ ID NO: 6804 - protein, 26 aa, Artificial Sequence
  Synthetic polypeptide
TSSVKCPVSVCCPAQLSTAAGISLVR

SEQ ID NO: 6805 - protein, 25 aa, Artificial Sequence
  Synthetic polypeptide
VTWGKLLNFLIPKVWAEEKASDQQW

SEQ ID NO: 6806 - protein, 25 aa, Artificial Sequence
  Synthetic polypeptide
SQHSGRPRRSDHKLWAPSTVRMSSL

SEQ ID NO: 6807 - protein, 25 aa, Artificial Sequence
  Synthetic polypeptide
SQHSGRPRRSDHKLWAPSTVRMSSL

SEQ ID NO: 6808 - protein, 25 aa, Artificial Sequence
  Synthetic polypeptide
SQHSGRPRRSDHKLWAPSTVRMSSL

SEQ ID NO: 6809 - protein, 25 aa, Artificial Sequence
  Synthetic polypeptide
FKVTVIMVTIKMTLILQKSWRSGMA

SEQ ID NO: 6810 - protein, 25 aa, Artificial Sequence
  Synthetic polypeptide
SLCLSNLWFPIFNQLLEILIWMSDS

SEQ ID NO: 6811 - protein, 25 aa, Artificial Sequence
  Synthetic polypeptide
SLCLSNLWFPIFNQLLEILIWMSDS

SEQ ID NO: 6812 - protein, 25 aa, Artificial Sequence
  Synthetic polypeptide
CSKEMLIGVFWILDFPDSRCSTSLP

SEQ ID NO: 6813 - protein, 25 aa, Artificial Sequence
  Synthetic polypeptide
CSKEMLIGVFWILDFPDSRCSTSLP

SEQ ID NO: 6814 - protein, 25 aa, Artificial Sequence
  Synthetic polypeptide
CSKEMLIGVFWILDFPDSRCSTSLP

SEQ ID NO: 6815 - protein, 25 aa, Artificial Sequence
  Synthetic polypeptide
CSKEMLIGVFWILDFPDSRCSTSLP

SEQ ID NO: 6816 - protein, 25 aa, Artificial Sequence
  Synthetic polypeptide
CSKEMLIGVFWILDFPDSRCSTSLP

SEQ ID NO: 6817 - protein, 25 aa, Artificial Sequence
  Synthetic polypeptide
CSKEMLIGVFWILDFPDSRCSTSLP

SEQ ID NO: 6818 - protein, 25 aa, Artificial Sequence
  Synthetic polypeptide
CSKEMLIGVFWILDFPDSRCSTSLP

SEQ ID NO: 6819 - protein, 25 aa, Artificial Sequence
  Synthetic polypeptide
CSKEMLIGVFWILDFPDSRCSTSLP

SEQ ID NO: 6820 - protein, 25 aa, Artificial Sequence
  Synthetic polypeptide
CSKEMLIGVFWILDFPDSRCSTSLP

SEQ ID NO: 6821 - protein, 25 aa, Artificial Sequence
  Synthetic polypeptide
CMHSSQSATQTQDNDVENDLQSDIS

SEQ ID NO: 6822 - protein, 25 aa, Artificial Sequence
  Synthetic polypeptide
CMHSSQSATQTQDNDVENDLQSDIS

SEQ ID NO: 6823 - protein, 25 aa, Artificial Sequence
  Synthetic polypeptide
CMHSSQSATQTQDNDVENDLQSDIS

SEQ ID NO: 6824 - protein, 25 aa, Artificial Sequence
  Synthetic polypeptide
CMHSSQSATQTQDNDVENDLQSDIS

SEQ ID NO: 6825 - protein, 25 aa, Artificial Sequence
  Synthetic polypeptide
CMHSSQSATQTQDNDVENDLQSDIS

SEQ ID NO: 6826 - protein, 25 aa, Artificial Sequence
  Synthetic polypeptide
CMHSSQSATQTQDNDVENDLQSDIS

SEQ ID NO: 6827 - protein, 25 aa, Artificial Sequence
  Synthetic polypeptide
CMHSSQSATQTQDNDVENDLQSDIS

SEQ ID NO: 6828 - protein, 25 aa, Artificial Sequence
  Synthetic polypeptide
CMHSSQSATQTQDNDVENDLQSDIS

SEQ ID NO: 6829 - protein, 25 aa, Artificial Sequence
  Synthetic polypeptide
CMHSSQSATQTQDNDVENDLQSDIS

SEQ ID NO: 6830 - protein, 25 aa, Artificial Sequence
  Synthetic polypeptide
CMHSSQSATQTQDNDVENDLQSDIS

SEQ ID NO: 6831 - protein, 25 aa, Artificial Sequence
  Synthetic polypeptide
CMHSSQSATQTQDNDVENDLQSDIS

SEQ ID NO: 6832 - protein, 25 aa, Artificial Sequence
  Synthetic polypeptide
CMHSSQSATQTQDNDVENDLQSDIS

SEQ ID NO: 6833 - protein, 25 aa, Artificial Sequence
  Synthetic polypeptide
MHQCGNCSFELPEEAGHTPLHSLQK

SEQ ID NO: 6834 - protein, 25 aa, Artificial Sequence
  Synthetic polypeptide
GLSLKVPSPRKPSLTSCHTHIAFWH

SEQ ID NO: 6835 - protein, 25 aa, Artificial Sequence
  Synthetic polypeptide
GLSLKVPSPRKPSLTSCHTHIAFWH

SEQ ID NO: 6836 - protein, 25 aa, Artificial Sequence
  Synthetic polypeptide
ESGHPRQGFWLCLLLLRDLDQGDSG

SEQ ID NO: 6837 - protein, 25 aa, Artificial Sequence
  Synthetic polypeptide
ESGHPRQGFWLCLLLLRDLDQGDSG

SEQ ID NO: 6838 - protein, 25 aa, Artificial Sequence
  Synthetic polypeptide
ESGHPRQGFWLCLLLLRDLDQGDSG

SEQ ID NO: 6839 - protein, 25 aa, Artificial Sequence
  Synthetic polypeptide
ESGHPRQGFWLCLLLLRDLDQGDSG

SEQ ID NO: 6840 - protein, 25 aa, Artificial Sequence
  Synthetic polypeptide
ESGHPRQGFWLCLLLLRDLDQGDSG

SEQ ID NO: 6841 - protein, 25 aa, Artificial Sequence
  Synthetic polypeptide
ESGHPRQGFWLCLLLLRDLDQGDSG

SEQ ID NO: 6842 - protein, 25 aa, Artificial Sequence
  Synthetic polypeptide
ESGHPRQGFWLCLLLLRDLDQGDSG

SEQ ID NO: 6843 - protein, 25 aa, Artificial Sequence
  Synthetic polypeptide
EAKAAEPLLEASGMLLNFPACRTMS

SEQ ID NO: 6844 - protein, 25 aa, Artificial Sequence
  Synthetic polypeptide
EAKTGRSLEDSCGPASPRTARGWCR

SEQ ID NO: 6845 - protein, 25 aa, Artificial Sequence
  Synthetic polypeptide
EAKTGRSLEDSCGPASPRTARGWCR

SEQ ID NO: 6846 - protein, 25 aa, Artificial Sequence
  Synthetic polypeptide
EAKTGRSLEDSCGPASPRTARGWCR

SEQ ID NO: 6847 - protein, 25 aa, Artificial Sequence
  Synthetic polypeptide
GVEGGGSGEGSRTCCVTVVGKGPTE

SEQ ID NO: 6848 - protein, 25 aa, Artificial Sequence
  Synthetic polypeptide
GVEGGGSGEGSRTCCVTVVGKGPTE

SEQ ID NO: 6849 - protein, 25 aa, Artificial Sequence
  Synthetic polypeptide
GVEGGGSGEGSRTCCVTVVGKGPTE

SEQ ID NO: 6850 - protein, 25 aa, Artificial Sequence
  Synthetic polypeptide
GVEGGGSGEGSRTCCVTVVGKGPTE

SEQ ID NO: 6851 - protein, 25 aa, Artificial Sequence
  Synthetic polypeptide
GVEGGGSGEGSRTCCVTVVGKGPTE

SEQ ID NO: 6852 - protein, 25 aa, Artificial Sequence
  Synthetic polypeptide
SQLLGRLRQENRLNLGGRAGVLCGH

SEQ ID NO: 6853 - protein, 25 aa, Artificial Sequence
  Synthetic polypeptide
SQLLGRLRQENRLNLGGRAGVLCGH

SEQ ID NO: 6854 - protein, 25 aa, Artificial Sequence
  Synthetic polypeptide
PPRILRILNFNPAFQIFRKVHLSSL

SEQ ID NO: 6855 - protein, 25 aa, Artificial Sequence
  Synthetic polypeptide
GLSLKVPSPRKPSLTSCHTHIVPGT

SEQ ID NO: 6856 - protein, 25 aa, Artificial Sequence
  Synthetic polypeptide
GLSLKVPSPRKPSLTSCHTHIVPGT

SEQ ID NO: 6857 - protein, 25 aa, Artificial Sequence
  Synthetic polypeptide
GLSLKVPSPRKPSLTSCHTHIVPGT

SEQ ID NO: 6858 - protein, 25 aa, Artificial Sequence
  Synthetic polypeptide
GLSLKVPSPRKPSLTSCHTHIVPGT

SEQ ID NO: 6859 - protein, 25 aa, Artificial Sequence
  Synthetic polypeptide
GSTQWLNTEKELTFGVQTSEVWASG

SEQ ID NO: 6860 - protein, 25 aa, Artificial Sequence
  Synthetic polypeptide
SQHFGRPMQADHLRRVLLAGAKECI

SEQ ID NO: 6861 - protein, 25 aa, Artificial Sequence
  Synthetic polypeptide
SQHFGRPMQADHLRRVLLAGAKECI

SEQ ID NO: 6862 - protein, 25 aa, Artificial Sequence
  Synthetic polypeptide
SQHFGRPMQADHLRRVLLAGAKECI

SEQ ID NO: 6863 - protein, 25 aa, Artificial Sequence
  Synthetic polypeptide
SQHFGRPMQADHLRRVLLAGAKECI

SEQ ID NO: 6864 - protein, 25 aa, Artificial Sequence
  Synthetic polypeptide
SQHFGRPMQADHLRRVLLAGAKECI

SEQ ID NO: 6865 - protein, 25 aa, Artificial Sequence
  Synthetic polypeptide
GAPLPGRDPVWEVLLSPLSTGEENI

SEQ ID NO: 6866 - protein, 25 aa, Artificial Sequence
  Synthetic polypeptide
GAPLPGRDPVWEVLLSPLSTGEENI

SEQ ID NO: 6867 - protein, 25 aa, Artificial Sequence
  Synthetic polypeptide
GAPLPGRDPVWEVLLSPLSTGEENI

SEQ ID NO: 6868 - protein, 25 aa, Artificial Sequence
  Synthetic polypeptide
MFKAIEIMPRMIHWNLSPISGLEHL

SEQ ID NO: 6869 - protein, 25 aa, Artificial Sequence
  Synthetic polypeptide
MFKAIEIMPRMIHWNLSPISGLEHL

SEQ ID NO: 6870 - protein, 25 aa, Artificial Sequence
  Synthetic polypeptide
MFKAIEIMPRMIHWNLSPISGLEHL

SEQ ID NO: 6871 - protein, 25 aa, Artificial Sequence
  Synthetic polypeptide
GWRPLTNRALKRLTMTPQLHHMTPC

SEQ ID NO: 6872 - protein, 25 aa, Artificial Sequence
  Synthetic polypeptide
GWRPLTNRALKRLTMTPQLHHMTPC

SEQ ID NO: 6873 - protein, 25 aa, Artificial Sequence
  Synthetic polypeptide
TNLKGRPEAVCFYQVFGFAQGHEPY

SEQ ID NO: 6874 - protein, 25 aa, Artificial Sequence
  Synthetic polypeptide
RNKSMEAQANDGCSYDSLKLLESCT

SEQ ID NO: 6875 - protein, 25 aa, Artificial Sequence
  Synthetic polypeptide
RNKSMEAQANDGCSYDSLKLLESCT

SEQ ID NO: 6876 - protein, 25 aa, Artificial Sequence
  Synthetic polypeptide
KAAEYTWCIFLTGQVCSETWRRKGE

SEQ ID NO: 6877 - protein, 25 aa, Artificial Sequence
  Synthetic polypeptide
TGHVIIDRFPCDPHYLKHRPGELPA

SEQ ID NO: 6878 - protein, 25 aa, Artificial Sequence
  Synthetic polypeptide
AMDRCRSVAIRNGVTQQERNLKVLP

SEQ ID NO: 6879 - protein, 24 aa, Artificial Sequence
  Synthetic polypeptide
SQHFGRPSGAFRMWRPRPPPATTL

SEQ ID NO: 6880 - protein, 24 aa, Artificial Sequence
  Synthetic polypeptide
VQEFEICLGNIVRPHLYKKLAWIP

SEQ ID NO: 6881 - protein, 24 aa, Artificial Sequence
  Synthetic polypeptide
FYLCQECVKCHLRCTSRQQHLLSP

SEQ ID NO: 6882 - protein, 24 aa, Artificial Sequence
  Synthetic polypeptide
FYLCQECVKCHLRCTSRQQHLLSP

SEQ ID NO: 6883 - protein, 24 aa, Artificial Sequence
  Synthetic polypeptide
FYLCQECVKCHLRCTSRQQHLLSP

SEQ ID NO: 6884 - protein, 24 aa, Artificial Sequence
  Synthetic polypeptide
FYLCQECVKCHLRCTSRQQHLLSP

SEQ ID NO: 6885 - protein, 24 aa, Artificial Sequence
  Synthetic polypeptide
GISKNGANQGCDHAHRGKGLCRPL

SEQ ID NO: 6886 - protein, 24 aa, Artificial Sequence
  Synthetic polypeptide
GISKNGANQGCDHAHRGKGLCRPL

SEQ ID NO: 6887 - protein, 24 aa, Artificial Sequence
  Synthetic polypeptide
GISKNGANQGCDHAHRGKGLCRPL

SEQ ID NO: 6888 - protein, 24 aa, Artificial Sequence
  Synthetic polypeptide
GISKNGANQGCDHAHRGKGLCRPL

SEQ ID NO: 6889 - protein, 24 aa, Artificial Sequence
  Synthetic polypeptide
GISKNGANQGCDHAHRGKGLCRPL

SEQ ID NO: 6890 - protein, 24 aa, Artificial Sequence
  Synthetic polypeptide
GISKNGANQGCDHAHRGKGLCRPL

SEQ ID NO: 6891 - protein, 24 aa, Artificial Sequence
  Synthetic polypeptide
GISKNGANQGCDHAHRGKGLCRPL

SEQ ID NO: 6892 - protein, 24 aa, Artificial Sequence
  Synthetic polypeptide
ASARMVQTKAVTTHTVGKDCADPC

SEQ ID NO: 6893 - protein, 24 aa, Artificial Sequence
  Synthetic polypeptide
AKNTPLHSSLDNKISRTLTLPCTS

SEQ ID NO: 6894 - protein, 24 aa, Artificial Sequence
  Synthetic polypeptide
RYCHLASPDNTCYLGRDSHWTKWL

SEQ ID NO: 6895 - protein, 24 aa, Artificial Sequence
  Synthetic polypeptide
RYCHLASPDNTCYLGRDSHWTKWL

SEQ ID NO: 6896 - protein, 24 aa, Artificial Sequence
  Synthetic polypeptide
GSPSPAELSTPSCPSYSPWWSSRS

SEQ ID NO: 6897 - protein, 24 aa, Artificial Sequence
  Synthetic polypeptide
NAQPKAWNTAPRCQPHLPGPGEEL

SEQ ID NO: 6898 - protein, 24 aa, Artificial Sequence
  Synthetic polypeptide
NAQPKAWNTAPRCQPHLPGPGEEL

SEQ ID NO: 6899 - protein, 24 aa, Artificial Sequence
  Synthetic polypeptide
NAQPKAWNTAPRCQPHLPGPGEEL

SEQ ID NO: 6900 - protein, 24 aa, Artificial Sequence
  Synthetic polypeptide
NAQPKAWNTAPRCQPHLPGPGEEL

SEQ ID NO: 6901 - protein, 24 aa, Artificial Sequence
  Synthetic polypeptide
WISPLLKLNTKPLSGQWISRPLMP

SEQ ID NO: 6902 - protein, 24 aa, Artificial Sequence
  Synthetic polypeptide
APGMLLNLPQGTRQPPDSKESSRD

SEQ ID NO: 6903 - protein, 24 aa, Artificial Sequence
  Synthetic polypeptide
APGMLLNLPQGTRQPPDSKESSRD

SEQ ID NO: 6904 - protein, 24 aa, Artificial Sequence
  Synthetic polypeptide
APGMLLNLPQGTRQPPDSKESSRD

SEQ ID NO: 6905 - protein, 24 aa, Artificial Sequence
  Synthetic polypeptide
APGMLLNLPQGTRQPPDSKESSRD

SEQ ID NO: 6906 - protein, 24 aa, Artificial Sequence
  Synthetic polypeptide
APGMLLNLPQGTRQPPDSKESSRD

SEQ ID NO: 6907 - protein, 24 aa, Artificial Sequence
  Synthetic polypeptide
GLPSHAELFLRLLLDYRPKVLMPK

SEQ ID NO: 6908 - protein, 24 aa, Artificial Sequence
  Synthetic polypeptide
GLPSHAELFLRLLLDYRPKVLMPK

SEQ ID NO: 6909 - protein, 24 aa, Artificial Sequence
  Synthetic polypeptide
GLPSHAELFLRLLLDYRPKVLMPK

SEQ ID NO: 6910 - protein, 24 aa, Artificial Sequence
  Synthetic polypeptide
GLPSHAELFLRLLLDYRPKVLMPK

SEQ ID NO: 6911 - protein, 24 aa, Artificial Sequence
  Synthetic polypeptide
GLPSHAELFLRLLLDYRPKVLMPK

SEQ ID NO: 6912 - protein, 24 aa, Artificial Sequence
  Synthetic polypeptide
GLPSHAELFLRLLLDYRPKVLMPK

SEQ ID NO: 6913 - protein, 24 aa, Artificial Sequence
  Synthetic polypeptide
GLPSHAELFLRLLLDYRPKVLMPK

SEQ ID NO: 6914 - protein, 24 aa, Artificial Sequence
  Synthetic polypeptide
GLPSHAELFLRLLLDYRPKVLMPK

SEQ ID NO: 6915 - protein, 24 aa, Artificial Sequence
  Synthetic polypeptide
GLPSHAELFLRLLLDYRPKVLMPK

SEQ ID NO: 6916 - protein, 24 aa, Artificial Sequence
  Synthetic polypeptide
AQVQFNPPLHKVQLGKNHVMYSFI

SEQ ID NO: 6917 - protein, 24 aa, Artificial Sequence
  Synthetic polypeptide
AQVQFNPPLHKVQLGKNHVMYSFI

SEQ ID NO: 6918 - protein, 24 aa, Artificial Sequence
  Synthetic polypeptide
DKDAAALLLANEARTPGGLVGHKQ

SEQ ID NO: 6919 - protein, 24 aa, Artificial Sequence
  Synthetic polypeptide
DKDAAALLLANEARTPGGLVGHKQ

SEQ ID NO: 6920 - protein, 24 aa, Artificial Sequence
  Synthetic polypeptide
DKDAAALLLANEARTPGGLVGHKQ

SEQ ID NO: 6921 - protein, 24 aa, Artificial Sequence
  Synthetic polypeptide
DKDAAALLLANEARTPGGLVGHKQ

SEQ ID NO: 6922 - protein, 24 aa, Artificial Sequence
  Synthetic polypeptide
DKDAAALLLANEARTPGGLVGHKQ

SEQ ID NO: 6923 - protein, 24 aa, Artificial Sequence
  Synthetic polypeptide
DKDAAALLLANEARTPGGLVGHKQ

SEQ ID NO: 6924 - protein, 24 aa, Artificial Sequence
  Synthetic polypeptide
DKDAAALLLANEARTPGGLVGHKQ

SEQ ID NO: 6925 - protein, 24 aa, Artificial Sequence
  Synthetic polypeptide
VGLGSRSPQDSFLLHPILAVGLGG

SEQ ID NO: 6926 - protein, 24 aa, Artificial Sequence
  Synthetic polypeptide
VGLGSRSPQDSFLLHPILAVGLGG

SEQ ID NO: 6927 - protein, 24 aa, Artificial Sequence
  Synthetic polypeptide
VGLGSRSPQDSFLLHPILAVGLGG

SEQ ID NO: 6928 - protein, 24 aa, Artificial Sequence
  Synthetic polypeptide
VGLGSRSPQDSFLLHPILAVGLGG

SEQ ID NO: 6929 - protein, 24 aa, Artificial Sequence
  Synthetic polypeptide
VGLGSRSPQDSFLLHPILAVGLGG

SEQ ID NO: 6930 - protein, 24 aa, Artificial Sequence
  Synthetic polypeptide
VGLGSRSPQDSFLLHPILAVGLGG

SEQ ID NO: 6931 - protein, 24 aa, Artificial Sequence
  Synthetic polypeptide
VGLGSRSPQDSFLLHPILAVGLGG

SEQ ID NO: 6932 - protein, 24 aa, Artificial Sequence
  Synthetic polypeptide
VGLGSRSPQDSFLLHPILAVGLGG

SEQ ID NO: 6933 - protein, 24 aa, Artificial Sequence
  Synthetic polypeptide
VGLGSRSPQDSFLLHPILAVGLGG

SEQ ID NO: 6934 - protein, 24 aa, Artificial Sequence
  Synthetic polypeptide
EERPWNQRGLLLALPGAGALPPWL

SEQ ID NO: 6935 - protein, 24 aa, Artificial Sequence
  Synthetic polypeptide
EERPWNQRGLLLALPGAGALPPWL

SEQ ID NO: 6936 - protein, 24 aa, Artificial Sequence
  Synthetic polypeptide
EERPWNQRGLLLALPGAGALPPWL

SEQ ID NO: 6937 - protein, 24 aa, Artificial Sequence
  Synthetic polypeptide
EERPWNQRGLLLALPGAGALPPWL

SEQ ID NO: 6938 - protein, 24 aa, Artificial Sequence
  Synthetic polypeptide
HPPTSGGPQHDLRVLRCPAPGPDL

SEQ ID NO: 6939 - protein, 24 aa, Artificial Sequence
  Synthetic polypeptide
HPPTSGGPQHDLRVLRCPAPGPDL

SEQ ID NO: 6940 - protein, 24 aa, Artificial Sequence
  Synthetic polypeptide
HPPTSGGPQHDLRVLRCPAPGPDL

SEQ ID NO: 6941 - protein, 24 aa, Artificial Sequence
  Synthetic polypeptide
HPPTSGGPQHDLRVLRCPAPGPDL

SEQ ID NO: 6942 - protein, 24 aa, Artificial Sequence
  Synthetic polypeptide
HPPTSGGPQHDLRVLRCPAPGPDL

SEQ ID NO: 6943 - protein, 24 aa, Artificial Sequence
  Synthetic polypeptide
HPPTSGGPQHDLRVLRCPAPGPDL

SEQ ID NO: 6944 - protein, 24 aa, Artificial Sequence
  Synthetic polypeptide
HPPTSGGPQHDLRVLRCPAPGPDL

SEQ ID NO: 6945 - protein, 24 aa, Artificial Sequence
  Synthetic polypeptide
TLLPQVVRNMTSEFFAAQLRAQIS

SEQ ID NO: 6946 - protein, 24 aa, Artificial Sequence
  Synthetic polypeptide
SCCSFWKPCNCSSYSEKDDLENVK

SEQ ID NO: 6947 - protein, 24 aa, Artificial Sequence
  Synthetic polypeptide
QLVVTSTTLEPDCPGFRSMNWSEG

SEQ ID NO: 6948 - protein, 24 aa, Artificial Sequence
  Synthetic polypeptide
QLVVTSTTLEPDCPGFRSMNWSEG

SEQ ID NO: 6949 - protein, 23 aa, Artificial Sequence
  Synthetic polypeptide
FFPDLFFPDLLSPLRLPPSDIRM

SEQ ID NO: 6950 - protein, 23 aa, Artificial Sequence
  Synthetic polypeptide
FFPDLFFPDLLSPLRLPPSDIRM

SEQ ID NO: 6951 - protein, 23 aa, Artificial Sequence
  Synthetic polypeptide
CPTLEPRLLLPGVVVNPPQSDLL

SEQ ID NO: 6952 - protein, 23 aa, Artificial Sequence
  Synthetic polypeptide
CPTLEPRLLLPGVVVNPPQSDLL

SEQ ID NO: 6953 - protein, 23 aa, Artificial Sequence
  Synthetic polypeptide
PDAVAHACNPSILGGRGGQITSL

SEQ ID NO: 6954 - protein, 23 aa, Artificial Sequence
  Synthetic polypeptide
PDAVAHACNPSILGGRGGQITSL

SEQ ID NO: 6955 - protein, 23 aa, Artificial Sequence
  Synthetic polypeptide
PDAVAHACNPSILGGRGGQITSL

SEQ ID NO: 6956 - protein, 23 aa, Artificial Sequence
  Synthetic polypeptide
YSCVCIGLPFWLLVLLCLPAGSC

SEQ ID NO: 6957 - protein, 23 aa, Artificial Sequence
  Synthetic polypeptide
YSCVCIGLPFWLLVLLCLPAGSC

SEQ ID NO: 6958 - protein, 23 aa, Artificial Sequence
  Synthetic polypeptide
YSCVCIGLPFWLLVLLCLPAGSC

SEQ ID NO: 6959 - protein, 23 aa, Artificial Sequence
  Synthetic polypeptide
YSCVCIGLPFWLLVLLCLPAGSC

SEQ ID NO: 6960 - protein, 23 aa, Artificial Sequence
  Synthetic polypeptide
KESVCTAPDMRLSIWDFQGQPRG

SEQ ID NO: 6961 - protein, 23 aa, Artificial Sequence
  Synthetic polypeptide
KESVCTAPDMRLSIWDFQGQPRG

SEQ ID NO: 6962 - protein, 23 aa, Artificial Sequence
  Synthetic polypeptide
KESVCTAPDMRLSIWDFQGQPRG

SEQ ID NO: 6963 - protein, 23 aa, Artificial Sequence
  Synthetic polypeptide
KESVCTAPDMRLSIWDFQGQPRG

SEQ ID NO: 6964 - protein, 23 aa, Artificial Sequence
  Synthetic polypeptide
KESVCTAPDMRLSIWDFQGQPRG

SEQ ID NO: 6965 - protein, 23 aa, Artificial Sequence
  Synthetic polypeptide
LCTLGQLLLCASISASVKCNKFQ

SEQ ID NO: 6966 - protein, 23 aa, Artificial Sequence
  Synthetic polypeptide
TQGGRGCSEVSLQQHALLGSRME

SEQ ID NO: 6967 - protein, 23 aa, Artificial Sequence
  Synthetic polypeptide
TQGGRGCSEVSLQQHALLGSRME

SEQ ID NO: 6968 - protein, 23 aa, Artificial Sequence
  Synthetic polypeptide
IQQSLFWEMLPDCTLLLRGQYIP

SEQ ID NO: 6969 - protein, 23 aa, Artificial Sequence
  Synthetic polypeptide
IQQSLFWEMLPDCTLLLRGQYIP

SEQ ID NO: 6970 - protein, 23 aa, Artificial Sequence
  Synthetic polypeptide
AKIPPLHSSLGLAHTAPRALTSQ

SEQ ID NO: 6971 - protein, 23 aa, Artificial Sequence
  Synthetic polypeptide
AKIPPLHSSLGLAHTAPRALTSQ

SEQ ID NO: 6972 - protein, 23 aa, Artificial Sequence
  Synthetic polypeptide
AKIPPLHSSLGLAHTAPRALTSQ

SEQ ID NO: 6973 - protein, 23 aa, Artificial Sequence
  Synthetic polypeptide
SQHFGRLMLADHEALPVDWFSSL

SEQ ID NO: 6974 - protein, 23 aa, Artificial Sequence
  Synthetic polypeptide
VRGSLGPKSTRLQSTLNCRSPMW

SEQ ID NO: 6975 - protein, 23 aa, Artificial Sequence
  Synthetic polypeptide
VRGSLGPKSTRLQSTLNCRSPMW

SEQ ID NO: 6976 - protein, 23 aa, Artificial Sequence
  Synthetic polypeptide
VRGSLGPKSTRLQSTLNCRSPMW

SEQ ID NO: 6977 - protein, 23 aa, Artificial Sequence
  Synthetic polypeptide
VRGSLGPKSTRLQSTLNCRSPMW

SEQ ID NO: 6978 - protein, 23 aa, Artificial Sequence
  Synthetic polypeptide
VRGSLGPKSTRLQSTLNCRSPMW

SEQ ID NO: 6979 - protein, 23 aa, Artificial Sequence
  Synthetic polypeptide
VRGSLGPKSTRLQSTLNCRSPMW

SEQ ID NO: 6980 - protein, 23 aa, Artificial Sequence
  Synthetic polypeptide
VRGSLGPKSTRLQSTLNCRSPMW

SEQ ID NO: 6981 - protein, 23 aa, Artificial Sequence
  Synthetic polypeptide
VRGSLGPKSTRLQSTLNCRSPMW

SEQ ID NO: 6982 - protein, 23 aa, Artificial Sequence
  Synthetic polypeptide
VRGSLGPKSTRLQSTLNCRSPMW

SEQ ID NO: 6983 - protein, 23 aa, Artificial Sequence
  Synthetic polypeptide
FLHFQLRLWMGTWWCVAMPVCRR

SEQ ID NO: 6984 - protein, 23 aa, Artificial Sequence
  Synthetic polypeptide
FLHFQLRLWMGTWWCVAMPVCRR

SEQ ID NO: 6985 - protein, 23 aa, Artificial Sequence
  Synthetic polypeptide
FLHFQLRLWMGTWWCVAMPVCRR

SEQ ID NO: 6986 - protein, 23 aa, Artificial Sequence
  Synthetic polypeptide
FLHFQLRLWMGTWWCVAMPVCRR

SEQ ID NO: 6987 - protein, 23 aa, Artificial Sequence
  Synthetic polypeptide
FLHFQLRLWMGTWWCVAMPVCRR

SEQ ID NO: 6988 - protein, 23 aa, Artificial Sequence
  Synthetic polypeptide
LHYCTPAWATFREPVQSSMISTW

SEQ ID NO: 6989 - protein, 23 aa, Artificial Sequence
  Synthetic polypeptide
LHYCTPAWATFREPVQSSMISTW

SEQ ID NO: 6990 - protein, 23 aa, Artificial Sequence
  Synthetic polypeptide
LHYCTPAWATFREPVQSSMISTW

SEQ ID NO: 6991 - protein, 23 aa, Artificial Sequence
  Synthetic polypeptide
PGPVAHTCNPSTSGGLGPTSPTG

SEQ ID NO: 6992 - protein, 23 aa, Artificial Sequence
  Synthetic polypeptide
PGPVAHTCNPSTSGGLGPTSPTG

SEQ ID NO: 6993 - protein, 23 aa, Artificial Sequence
  Synthetic polypeptide
PGPVAHTCNPSTSGGLGPTSPTG

SEQ ID NO: 6994 - protein, 23 aa, Artificial Sequence
  Synthetic polypeptide
LRTKRKAKEPLKTQNRYCCGSSV

SEQ ID NO: 6995 - protein, 23 aa, Artificial Sequence
  Synthetic polypeptide
LRTKRKAKEPLKTQNRYCCGSSV

SEQ ID NO: 6996 - protein, 23 aa, Artificial Sequence
  Synthetic polypeptide
LRTKRKAKEPLKTQNRYCCGSSV

SEQ ID NO: 6997 - protein, 23 aa, Artificial Sequence
  Synthetic polypeptide
LRTKRKAKEPLKTQNRYCCGSSV

SEQ ID NO: 6998 - protein, 23 aa, Artificial Sequence
  Synthetic polypeptide
LRTKRKAKEPLKTQNRYCCGSSV

SEQ ID NO: 6999 - protein, 23 aa, Artificial Sequence
  Synthetic polypeptide
QEWPKKAGLLSGSHDFQPLCPGH

SEQ ID NO: 7000 - protein, 23 aa, Artificial Sequence
  Synthetic polypeptide
SPQKPTGPTQTLSNSHSRRGLSD

SEQ ID NO: 7001 - protein, 23 aa, Artificial Sequence
  Synthetic polypeptide
GLGRRWKGSGENTSTCTRERCCA

SEQ ID NO: 7002 - protein, 23 aa, Artificial Sequence
  Synthetic polypeptide
GFPSHVELSGFCSPCCRPTSPWR

SEQ ID NO: 7003 - protein, 23 aa, Artificial Sequence
  Synthetic polypeptide
GFPSHVELSGFCSPCCRPTSPWR

SEQ ID NO: 7004 - protein, 23 aa, Artificial Sequence
  Synthetic polypeptide
GFPSHVELSGFCSPCCRPTSPWR

SEQ ID NO: 7005 - protein, 23 aa, Artificial Sequence
  Synthetic polypeptide
SQHFGRPRRVDHLSLFQQFQLAV

SEQ ID NO: 7006 - protein, 23 aa, Artificial Sequence
  Synthetic polypeptide
SQHFGRPRRVDHLSLFQQFQLAV

SEQ ID NO: 7007 - protein, 23 aa, Artificial Sequence
  Synthetic polypeptide
SQHFGRPRRVDHLSLFQQFQLAV

SEQ ID NO: 7008 - protein, 23 aa, Artificial Sequence
  Synthetic polypeptide
SQHFGRPRRVDHLSLFQQFQLAV

SEQ ID NO: 7009 - protein, 23 aa, Artificial Sequence
  Synthetic polypeptide
SQHFGRPRRVDHLSLFQQFQLAV

SEQ ID NO: 7010 - protein, 23 aa, Artificial Sequence
  Synthetic polypeptide
SQHFGRPRRVDHLSLFQQFQLAV

SEQ ID NO: 7011 - protein, 23 aa, Artificial Sequence
  Synthetic polypeptide
TPGRNWHLESGHLKLESWRSGMA

SEQ ID NO: 7012 - protein, 23 aa, Artificial Sequence
  Synthetic polypeptide
GSGWGQESWSPALGVPLMAACCR

SEQ ID NO: 7013 - protein, 23 aa, Artificial Sequence
  Synthetic polypeptide
GSGWGQESWSPALGVPLMAACCR

SEQ ID NO: 7014 - protein, 23 aa, Artificial Sequence
  Synthetic polypeptide
GSGWGQESWSPALGVPLMAACCR

SEQ ID NO: 7015 - protein, 23 aa, Artificial Sequence
  Synthetic polypeptide
GSGWGQESWSPALGVPLMAACCR

SEQ ID NO: 7016 - protein, 23 aa, Artificial Sequence
  Synthetic polypeptide
SDKAKSIPSASSPRTRWWCRDSQ

SEQ ID NO: 7017 - protein, 23 aa, Artificial Sequence
  Synthetic polypeptide
SDKAKSIPSASSPRTRWWCRDSQ

SEQ ID NO: 7018 - protein, 23 aa, Artificial Sequence
  Synthetic polypeptide
SDKAKSIPSASSPRTRWWCRDSQ

SEQ ID NO: 7019 - protein, 23 aa, Artificial Sequence
  Synthetic polypeptide
DQPGHYAETPSLLKIQKLARMCL

SEQ ID NO: 7020 - protein, 23 aa, Artificial Sequence
  Synthetic polypeptide
DQPGHYAETPSLLKIQKLARMCL

SEQ ID NO: 7021 - protein, 23 aa, Artificial Sequence
  Synthetic polypeptide
DQPGHYAETPSLLKIQKLARMCL

SEQ ID NO: 7022 - protein, 23 aa, Artificial Sequence
  Synthetic polypeptide
DQPGHYAETPSLLKIQKLARMCL

SEQ ID NO: 7023 - protein, 23 aa, Artificial Sequence
  Synthetic polypeptide
TLGFCFLRCKMERILSCLHWKPW

SEQ ID NO: 7024 - protein, 23 aa, Artificial Sequence
  Synthetic polypeptide
FQIGRRKESNVPNTKKRAKCSRQ

SEQ ID NO: 7025 - protein, 23 aa, Artificial Sequence
  Synthetic polypeptide
FQIGRRKESNVPNTKKRAKCSRQ

SEQ ID NO: 7026 - protein, 23 aa, Artificial Sequence
  Synthetic polypeptide
FQIGRRKESNVPNTKKRAKCSRQ

SEQ ID NO: 7027 - protein, 23 aa, Artificial Sequence
  Synthetic polypeptide
MDELNPQFSPPLLQLPRQLLHQK

SEQ ID NO: 7028 - protein, 23 aa, Artificial Sequence
  Synthetic polypeptide
EGKLRRRRPEMRRGRGQQAQAMD

SEQ ID NO: 7029 - protein, 23 aa, Artificial Sequence
  Synthetic polypeptide
EGKLRRRRPEMRRGRGQQAQAMD

SEQ ID NO: 7030 - protein, 23 aa, Artificial Sequence
  Synthetic polypeptide
EGKLRRRRPEMRRGRGQQAQAMD

SEQ ID NO: 7031 - protein, 23 aa, Artificial Sequence
  Synthetic polypeptide
EGKLRRRRPEMRRGRGQQAQAMD

SEQ ID NO: 7032 - protein, 22 aa, Artificial Sequence
  Synthetic polypeptide
SSHLFLSIFLKVCEFLVRAGDE

SEQ ID NO: 7033 - protein, 22 aa, Artificial Sequence
  Synthetic polypeptide
SSHLFLSIFLKVCEFLVRAGDE

SEQ ID NO: 7034 - protein, 22 aa, Artificial Sequence
  Synthetic polypeptide
EVPFASLHDSEASPAMWNSLWD

SEQ ID NO: 7035 - protein, 22 aa, Artificial Sequence
  Synthetic polypeptide
EVPFASLHDSEASPAMWNSLWD

SEQ ID NO: 7036 - protein, 22 aa, Artificial Sequence
  Synthetic polypeptide
EVPFASLHDSEASPAMWNSLWD

SEQ ID NO: 7037 - protein, 22 aa, Artificial Sequence
  Synthetic polypeptide
EVPFASLHDSEASPAMWNSLWD

SEQ ID NO: 7038 - protein, 22 aa, Artificial Sequence
  Synthetic polypeptide
GRRIARTREEEELSGRSEASHG

SEQ ID NO: 7039 - protein, 22 aa, Artificial Sequence
  Synthetic polypeptide
GRRIARTREEEELSGRSEASHG

SEQ ID NO: 7040 - protein, 22 aa, Artificial Sequence
  Synthetic polypeptide
GRRIARTREEEELSGRSEASHG

SEQ ID NO: 7041 - protein, 22 aa, Artificial Sequence
  Synthetic polypeptide
GRRIARTREEEELSGRSEASHG

SEQ ID NO: 7042 - protein, 22 aa, Artificial Sequence
  Synthetic polypeptide
GRRIARTREEEELSGRSEASHG

SEQ ID NO: 7043 - protein, 22 aa, Artificial Sequence
  Synthetic polypeptide
GRRIARTREEEELSGRSEASHG

SEQ ID NO: 7044 - protein, 22 aa, Artificial Sequence
  Synthetic polypeptide
GRRIARTREEEELSGRSEASHG

SEQ ID NO: 7045 - protein, 22 aa, Artificial Sequence
  Synthetic polypeptide
GRRIARTREEEELSGRSEASHG

SEQ ID NO: 7046 - protein, 22 aa, Artificial Sequence
  Synthetic polypeptide
LHKKKRQALGARPCGCTRSQHH

SEQ ID NO: 7047 - protein, 22 aa, Artificial Sequence
  Synthetic polypeptide
LHKKKRQALGARPCGCTRSQHH

SEQ ID NO: 7048 - protein, 22 aa, Artificial Sequence
  Synthetic polypeptide
LHKKKRQALGARPCGCTRSQHH

SEQ ID NO: 7049 - protein, 22 aa, Artificial Sequence
  Synthetic polypeptide
TWTSQALELNGCFEQPGTKYNL

SEQ ID NO: 7050 - protein, 22 aa, Artificial Sequence
  Synthetic polypeptide
TWTSQALELNGCFEQPGTKYNL

SEQ ID NO: 7051 - protein, 22 aa, Artificial Sequence
  Synthetic polypeptide
RLESQERQIKFGTATSSVIMVP

SEQ ID NO: 7052 - protein, 22 aa, Artificial Sequence
  Synthetic polypeptide
RLESQERQIKFGTATSSVIMVP

SEQ ID NO: 7053 - protein, 22 aa, Artificial Sequence
  Synthetic polypeptide
RLESQERQIKFGTATSSVIMVP

SEQ ID NO: 7054 - protein, 22 aa, Artificial Sequence
  Synthetic polypeptide
RLESQERQIKFGTATSSVIMVP

SEQ ID NO: 7055 - protein, 22 aa, Artificial Sequence
  Synthetic polypeptide
RLESQERQIKFGTATSSVIMVP

SEQ ID NO: 7056 - protein, 22 aa, Artificial Sequence
  Synthetic polypeptide
GQSMKFQHKLAARVCSVAHYQQ

SEQ ID NO: 7057 - protein, 22 aa, Artificial Sequence
  Synthetic polypeptide
GQSMKFQHKLAARVCSVAHYQQ

SEQ ID NO: 7058 - protein, 22 aa, Artificial Sequence
  Synthetic polypeptide
GQSMKFQHKLAARVCSVAHYQQ

SEQ ID NO: 7059 - protein, 22 aa, Artificial Sequence
  Synthetic polypeptide
LPYFMMRIILSANYWVVYKILQ

SEQ ID NO: 7060 - protein, 22 aa, Artificial Sequence
  Synthetic polypeptide
LPYFMMRIILSANYWVVYKILQ

SEQ ID NO: 7061 - protein, 22 aa, Artificial Sequence
  Synthetic polypeptide
LPYFMMRIILSANYWVVYKILQ

SEQ ID NO: 7062 - protein, 22 aa, Artificial Sequence
  Synthetic polypeptide
LPYFMMRIILSANYWVVYKILQ

SEQ ID NO: 7063 - protein, 22 aa, Artificial Sequence
  Synthetic polypeptide
LPYFMMRIILSANYWVVYKILQ

SEQ ID NO: 7064 - protein, 22 aa, Artificial Sequence
  Synthetic polypeptide
RQRIFTYQICKATNKCTERQLL

SEQ ID NO: 7065 - protein, 22 aa, Artificial Sequence
  Synthetic polypeptide
RQRIFTYQICKATNKCTERQLL

SEQ ID NO: 7066 - protein, 22 aa, Artificial Sequence
  Synthetic polypeptide
RQRIFTYQICKATNKCTERQLL

SEQ ID NO: 7067 - protein, 22 aa, Artificial Sequence
  Synthetic polypeptide
RQRIFTYQICKATNKCTERQLL

SEQ ID NO: 7068 - protein, 22 aa, Artificial Sequence
  Synthetic polypeptide
RQRIFTYQICKATNKCTERQLL

SEQ ID NO: 7069 - protein, 22 aa, Artificial Sequence
  Synthetic polypeptide
EVRSLSARQPPRLGKSWRSGMA

SEQ ID NO: 7070 - protein, 22 aa, Artificial Sequence
  Synthetic polypeptide
ARHGVSRLESQRFGRLRVLRTP

SEQ ID NO: 7071 - protein, 22 aa, Artificial Sequence
  Synthetic polypeptide
SEHFGRPRKEGHSVAAGTPGPL

SEQ ID NO: 7072 - protein, 22 aa, Artificial Sequence
  Synthetic polypeptide
FNKHYRYQQLQGFCQPTVVYAY

SEQ ID NO: 7073 - protein, 22 aa, Artificial Sequence
  Synthetic polypeptide
FNKHYRYQQLQGFCQPTVVYAY

SEQ ID NO: 7074 - protein, 22 aa, Artificial Sequence
  Synthetic polypeptide
FNKHYRYQQLQGFCQPTVVYAY

SEQ ID NO: 7075 - protein, 22 aa, Artificial Sequence
  Synthetic polypeptide
FNKHYRYQQLQGFCQPTVVYAY

SEQ ID NO: 7076 - protein, 22 aa, Artificial Sequence
  Synthetic polypeptide
LLGCGILSRHPCHSGPYSQLPG

SEQ ID NO: 7077 - protein, 22 aa, Artificial Sequence
  Synthetic polypeptide
LLGCGILSRHPCHSGPYSQLPG

SEQ ID NO: 7078 - protein, 22 aa, Artificial Sequence
  Synthetic polypeptide
LLGCGILSRHPCHSGPYSQLPG

SEQ ID NO: 7079 - protein, 22 aa, Artificial Sequence
  Synthetic polypeptide
LLGCGILSRHPCHSGPYSQLPG

SEQ ID NO: 7080 - protein, 22 aa, Artificial Sequence
  Synthetic polypeptide
LLGCGILSRHPCHSGPYSQLPG

SEQ ID NO: 7081 - protein, 22 aa, Artificial Sequence
  Synthetic polypeptide
LLGCGILSRHPCHSGPYSQLPG

SEQ ID NO: 7082 - protein, 22 aa, Artificial Sequence
  Synthetic polypeptide
RVVPKEWAGSTDLTCQIRSWTD

SEQ ID NO: 7083 - protein, 22 aa, Artificial Sequence
  Synthetic polypeptide
RVVPKEWAGSTDLTCQIRSWTD

SEQ ID NO: 7084 - protein, 22 aa, Artificial Sequence
  Synthetic polypeptide
TQEAEVAVSGDRAIALAWATGN

SEQ ID NO: 7085 - protein, 22 aa, Artificial Sequence
  Synthetic polypeptide
TQEAEVAVSGDRAIALAWATGN

SEQ ID NO: 7086 - protein, 22 aa, Artificial Sequence
  Synthetic polypeptide
AQEVKVAVSRDCTTALQPGGVH

SEQ ID NO: 7087 - protein, 22 aa, Artificial Sequence
  Synthetic polypeptide
AQEVKVAVSRDCTTALQPGGVH

SEQ ID NO: 7088 - protein, 22 aa, Artificial Sequence
  Synthetic polypeptide
AQEVKVAVSRDCTTALQPGGVH

SEQ ID NO: 7089 - protein, 22 aa, Artificial Sequence
  Synthetic polypeptide
AQEVKVAVSRDCTTALQPGGVH

SEQ ID NO: 7090 - protein, 22 aa, Artificial Sequence
  Synthetic polypeptide
AQEVKVAVSRDCTTALQPGGVH

SEQ ID NO: 7091 - protein, 22 aa, Artificial Sequence
  Synthetic polypeptide
AQEVKVAVSRDCTTALQPGGVH

SEQ ID NO: 7092 - protein, 22 aa, Artificial Sequence
  Synthetic polypeptide
AQEVKVAVSRDCTTALQPGGVH

SEQ ID NO: 7093 - protein, 22 aa, Artificial Sequence
  Synthetic polypeptide
AQEVKVAVSRDCTTALQPGGVH

SEQ ID NO: 7094 - protein, 22 aa, Artificial Sequence
  Synthetic polypeptide
IRSSCGLCQQSVFYKLSVHSHE

SEQ ID NO: 7095 - protein, 22 aa, Artificial Sequence
  Synthetic polypeptide
IRSSCGLCQQSVFYKLSVHSHE

SEQ ID NO: 7096 - protein, 22 aa, Artificial Sequence
  Synthetic polypeptide
IRSSCGLCQQSVFYKLSVHSHE

SEQ ID NO: 7097 - protein, 22 aa, Artificial Sequence
  Synthetic polypeptide
IRSSCGLCQQSVFYKLSVHSHE

SEQ ID NO: 7098 - protein, 22 aa, Artificial Sequence
  Synthetic polypeptide
IRSSCGLCQQSVFYKLSVHSHE

SEQ ID NO: 7099 - protein, 22 aa, Artificial Sequence
  Synthetic polypeptide
IRSSCGLCQQSVFYKLSVHSHE

SEQ ID NO: 7100 - protein, 22 aa, Artificial Sequence
  Synthetic polypeptide
GKSGQRKEVFTKNVSVKTTSWP

SEQ ID NO: 7101 - protein, 22 aa, Artificial Sequence
  Synthetic polypeptide
GKSGQRKEVFTKNVSVKTTSWP

SEQ ID NO: 7102 - protein, 22 aa, Artificial Sequence
  Synthetic polypeptide
GKSGQRKEVFTKNVSVKTTSWP

SEQ ID NO: 7103 - protein, 22 aa, Artificial Sequence
  Synthetic polypeptide
GKSGQRKEVFTKNVSVKTTSWP

SEQ ID NO: 7104 - protein, 22 aa, Artificial Sequence
  Synthetic polypeptide
SPVLSAYRRCSDPGGQSIYMLL

SEQ ID NO: 7105 - protein, 22 aa, Artificial Sequence
  Synthetic polypeptide
SPVLSAYRRCSDPGGQSIYMLL

SEQ ID NO: 7106 - protein, 22 aa, Artificial Sequence
  Synthetic polypeptide
SPVLSAYRRCSDPGGQSIYMLL

SEQ ID NO: 7107 - protein, 22 aa, Artificial Sequence
  Synthetic polypeptide
SPVLSAYRRCSDPGGQSIYMLL

SEQ ID NO: 7108 - protein, 22 aa, Artificial Sequence
  Synthetic polypeptide
SPVLSAYRRCSDPGGQSIYMLL

SEQ ID NO: 7109 - protein, 22 aa, Artificial Sequence
  Synthetic polypeptide
SPVLSAYRRCSDPGGQSIYMLL

SEQ ID NO: 7110 - protein, 22 aa, Artificial Sequence
  Synthetic polypeptide
SPVLSAYRRCSDPGGQSIYMLL

SEQ ID NO: 7111 - protein, 22 aa, Artificial Sequence
  Synthetic polypeptide
SPVLSAYRRCSDPGGQSIYMLL

SEQ ID NO: 7112 - protein, 22 aa, Artificial Sequence
  Synthetic polypeptide
QTRASLRHPGLTIWATCRPAAP

SEQ ID NO: 7113 - protein, 22 aa, Artificial Sequence
  Synthetic polypeptide
QTRASLRHPGLTIWATCRPAAP

SEQ ID NO: 7114 - protein, 22 aa, Artificial Sequence
  Synthetic polypeptide
QTRASLRHPGLTIWATCRPAAP

SEQ ID NO: 7115 - protein, 22 aa, Artificial Sequence
  Synthetic polypeptide
RQYDGSGKNPGLTISRFTTASI

SEQ ID NO: 7116 - protein, 22 aa, Artificial Sequence
  Synthetic polypeptide
RQYDGSGKNPGLTISRFTTASI

SEQ ID NO: 7117 - protein, 22 aa, Artificial Sequence
  Synthetic polypeptide
RQYDGSGKNPGLTISRFTTASI

SEQ ID NO: 7118 - protein, 22 aa, Artificial Sequence
  Synthetic polypeptide
RQYDGSGKNPGLTISRFTTASI

SEQ ID NO: 7119 - protein, 22 aa, Artificial Sequence
  Synthetic polypeptide
RQYDGSGKNPGLTISRFTTASI

SEQ ID NO: 7120 - protein, 22 aa, Artificial Sequence
  Synthetic polypeptide
RQYDGSGKNPGLTISRFTTASI

SEQ ID NO: 7121 - protein, 22 aa, Artificial Sequence
  Synthetic polypeptide
RQYDGSGKNPGLTISRFTTASI

SEQ ID NO: 7122 - protein, 22 aa, Artificial Sequence
  Synthetic polypeptide
RQYDGSGKNPGLTISRFTTASI

SEQ ID NO: 7123 - protein, 22 aa, Artificial Sequence
  Synthetic polypeptide
RQYDGSGKNPGLTISRFTTASI

SEQ ID NO: 7124 - protein, 22 aa, Artificial Sequence
  Synthetic polypeptide
RQYDGSGKNPGLTISRFTTASI

SEQ ID NO: 7125 - protein, 22 aa, Artificial Sequence
  Synthetic polypeptide
RQYDGSGKNPGLTISRFTTASI

SEQ ID NO: 7126 - protein, 22 aa, Artificial Sequence
  Synthetic polypeptide
RQYDGSGKNPGLTISRFTTASI

SEQ ID NO: 7127 - protein, 22 aa, Artificial Sequence
  Synthetic polypeptide
RQYDGSGKNPGLTISRFTTASI

SEQ ID NO: 7128 - protein, 22 aa, Artificial Sequence
  Synthetic polypeptide
RKTSLGLPLILRYAFHRCQPVQ

SEQ ID NO: 7129 - protein, 22 aa, Artificial Sequence
  Synthetic polypeptide
RKTSLGLPLILRYAFHRCQPVQ

SEQ ID NO: 7130 - protein, 22 aa, Artificial Sequence
  Synthetic polypeptide
RKTSLGLPLILRYAFHRCQPVQ

SEQ ID NO: 7131 - protein, 22 aa, Artificial Sequence
  Synthetic polypeptide
RKTSLGLPLILRYAFHRCQPVQ

SEQ ID NO: 7132 - protein, 22 aa, Artificial Sequence
  Synthetic polypeptide
RKTSLGLPLILRYAFHRCQPVQ

SEQ ID NO: 7133 - protein, 22 aa, Artificial Sequence
  Synthetic polypeptide
RKTSLGLPLILRYAFHRCQPVQ

SEQ ID NO: 7134 - protein, 22 aa, Artificial Sequence
  Synthetic polypeptide
NPVSTKNTKISQNVSVKTTSWP

SEQ ID NO: 7135 - protein, 22 aa, Artificial Sequence
  Synthetic polypeptide
NPVSTKNTKISQNVSVKTTSWP

SEQ ID NO: 7136 - protein, 22 aa, Artificial Sequence
  Synthetic polypeptide
NPVSTKNTKISQNVSVKTTSWP

SEQ ID NO: 7137 - protein, 22 aa, Artificial Sequence
  Synthetic polypeptide
NPVSTKNTKISQNVSVKTTSWP

SEQ ID NO: 7138 - protein, 22 aa, Artificial Sequence
  Synthetic polypeptide
TQEAEMSCFRKSKTIQMTSWPT

SEQ ID NO: 7139 - protein, 22 aa, Artificial Sequence
  Synthetic polypeptide
CVPVITVLGTEAGESLEPRRQR

SEQ ID NO: 7140 - protein, 22 aa, Artificial Sequence
  Synthetic polypeptide
TQEAEMSCFRKSKTIQMTSWPT

SEQ ID NO: 7141 - protein, 22 aa, Artificial Sequence
  Synthetic polypeptide
CVPVITVLGTEAGESLEPRRQR

SEQ ID NO: 7142 - protein, 22 aa, Artificial Sequence
  Synthetic polypeptide
TQEAEMSCFRKSKTIQMTSWPT

SEQ ID NO: 7143 - protein, 22 aa, Artificial Sequence
  Synthetic polypeptide
CVPVITVLGTEAGESLEPRRQR

SEQ ID NO: 7144 - protein, 22 aa, Artificial Sequence
  Synthetic polypeptide
TQEAEMSCFRKSKTIQMTSWPT

SEQ ID NO: 7145 - protein, 22 aa, Artificial Sequence
  Synthetic polypeptide
CVPVITVLGTEAGESLEPRRQR

SEQ ID NO: 7146 - protein, 22 aa, Artificial Sequence
  Synthetic polypeptide
TQEAEMSCFRKSKTIQMTSWPT

SEQ ID NO: 7147 - protein, 22 aa, Artificial Sequence
  Synthetic polypeptide
CVPVITVLGTEAGESLEPRRQR

SEQ ID NO: 7148 - protein, 22 aa, Artificial Sequence
  Synthetic polypeptide
TQEAEMSCFRKSKTIQMTSWPT

SEQ ID NO: 7149 - protein, 22 aa, Artificial Sequence
  Synthetic polypeptide
CVPVITVLGTEAGESLEPRRQR

SEQ ID NO: 7150 - protein, 22 aa, Artificial Sequence
  Synthetic polypeptide
TQEAEMSCFRKSKTIQMTSWPT

SEQ ID NO: 7151 - protein, 22 aa, Artificial Sequence
  Synthetic polypeptide
CVPVITVLGTEAGESLEPRRQR

SEQ ID NO: 7152 - protein, 22 aa, Artificial Sequence
  Synthetic polypeptide
TQEAEMSCFRKSKTIQMTSWPT

SEQ ID NO: 7153 - protein, 22 aa, Artificial Sequence
  Synthetic polypeptide
CVPVITVLGTEAGESLEPRRQR

SEQ ID NO: 7154 - protein, 22 aa, Artificial Sequence
  Synthetic polypeptide
TQEAEMSCFRKSKTIQMTSWPT

SEQ ID NO: 7155 - protein, 22 aa, Artificial Sequence
  Synthetic polypeptide
CVPVITVLGTEAGESLEPRRQR

SEQ ID NO: 7156 - protein, 22 aa, Artificial Sequence
  Synthetic polypeptide
TQEAEMSCFRKSKTIQMTSWPT

SEQ ID NO: 7157 - protein, 22 aa, Artificial Sequence
  Synthetic polypeptide
CVPVITVLGTEAGESLEPRRQR

SEQ ID NO: 7158 - protein, 22 aa, Artificial Sequence
  Synthetic polypeptide
PSKNSNIICKNQEVGLRARRSL

SEQ ID NO: 7159 - protein, 22 aa, Artificial Sequence
  Synthetic polypeptide
PSKNSNIICKNQEVGLRARRSL

SEQ ID NO: 7160 - protein, 22 aa, Artificial Sequence
  Synthetic polypeptide
PSKNSNIICKNQEVGLRARRSL

SEQ ID NO: 7161 - protein, 22 aa, Artificial Sequence
  Synthetic polypeptide
PSKNSNIICKNQEVGLRARRSL

SEQ ID NO: 7162 - protein, 22 aa, Artificial Sequence
  Synthetic polypeptide
KKPDTKGHVSWDSIHVKCPKQM

SEQ ID NO: 7163 - protein, 22 aa, Artificial Sequence
  Synthetic polypeptide
KKPDTKGHVSWDSIHVKCPKQM

SEQ ID NO: 7164 - protein, 22 aa, Artificial Sequence
  Synthetic polypeptide
KKPDTKGHVSWDSIHVKCPKQM

SEQ ID NO: 7165 - protein, 22 aa, Artificial Sequence
  Synthetic polypeptide
KKPDTKGHVSWDSIHVKCPKQM

SEQ ID NO: 7166 - protein, 22 aa, Artificial Sequence
  Synthetic polypeptide
KKPDTKGHVSWDSIHVKCPKQM

SEQ ID NO: 7167 - protein, 22 aa, Artificial Sequence
  Synthetic polypeptide
MDHTTWLPMLAPPLAGLLERSS

SEQ ID NO: 7168 - protein, 22 aa, Artificial Sequence
  Synthetic polypeptide
MDHTTWLPMLAPPLAGLLERSS

SEQ ID NO: 7169 - protein, 22 aa, Artificial Sequence
  Synthetic polypeptide
MDHTTWLPMLAPPLAGLLERSS

SEQ ID NO: 7170 - protein, 22 aa, Artificial Sequence
  Synthetic polypeptide
MDHTTWLPMLAPPLAGLLERSS

SEQ ID NO: 7171 - protein, 22 aa, Artificial Sequence
  Synthetic polypeptide
LCCVSGSTLCWPIMGLQFLLHC

SEQ ID NO: 7172 - protein, 22 aa, Artificial Sequence
  Synthetic polypeptide
LCCVSGSTLCWPIMGLQFLLHC

SEQ ID NO: 7173 - protein, 22 aa, Artificial Sequence
  Synthetic polypeptide
LCCVSGSTLCWPIMGLQFLLHC

SEQ ID NO: 7174 - protein, 22 aa, Artificial Sequence
  Synthetic polypeptide
LCCVSGSTLCWPIMGLQFLLHC

SEQ ID NO: 7175 - protein, 22 aa, Artificial Sequence
  Synthetic polypeptide
KAHAPHGRHPVKSAHIQPITTL

SEQ ID NO: 7176 - protein, 22 aa, Artificial Sequence
  Synthetic polypeptide
KAHAPHGRHPVKSAHIQPITTL

SEQ ID NO: 7177 - protein, 22 aa, Artificial Sequence
  Synthetic polypeptide
KAHAPHGRHPVKSAHIQPITTL

SEQ ID NO: 7178 - protein, 22 aa, Artificial Sequence
  Synthetic polypeptide
KAHAPHGRHPVKSAHIQPITTL

SEQ ID NO: 7179 - protein, 22 aa, Artificial Sequence
  Synthetic polypeptide
KAHAPHGRHPVKSAHIQPITTL

SEQ ID NO: 7180 - protein, 22 aa, Artificial Sequence
  Synthetic polypeptide
KAHAPHGRHPVKSAHIQPITTL

SEQ ID NO: 7181 - protein, 22 aa, Artificial Sequence
  Synthetic polypeptide
KAHAPHGRHPVKSAHIQPITTL

SEQ ID NO: 7182 - protein, 22 aa, Artificial Sequence
  Synthetic polypeptide
KAHAPHGRHPVKSAHIQPITTL

SEQ ID NO: 7183 - protein, 22 aa, Artificial Sequence
  Synthetic polypeptide
TQEAAVAMSQDCATALQPGRQY

SEQ ID NO: 7184 - protein, 22 aa, Artificial Sequence
  Synthetic polypeptide
CSPLPGSFFEPGFCKAGSFSEF

SEQ ID NO: 7185 - protein, 22 aa, Artificial Sequence
  Synthetic polypeptide
CSPLPGSFFEPGFCKAGSFSEF

SEQ ID NO: 7186 - protein, 22 aa, Artificial Sequence
  Synthetic polypeptide
CSPLPGSFFEPGFCKAGSFSEF

SEQ ID NO: 7187 - protein, 22 aa, Artificial Sequence
  Synthetic polypeptide
CSPLPGSFFEPGFCKAGSFSEF

SEQ ID NO: 7188 - protein, 22 aa, Artificial Sequence
  Synthetic polypeptide
KQYGGCRCGMEVRPSKTLAVLL

SEQ ID NO: 7189 - protein, 22 aa, Artificial Sequence
  Synthetic polypeptide
KQYGGCRCGMEVRPSKTLAVLL

SEQ ID NO: 7190 - protein, 22 aa, Artificial Sequence
  Synthetic polypeptide
KQYGGCRCGMEVRPSKTLAVLL

SEQ ID NO: 7191 - protein, 22 aa, Artificial Sequence
  Synthetic polypeptide
KQYGGCRCGMEVRPSKTLAVLL

SEQ ID NO: 7192 - protein, 22 aa, Artificial Sequence
  Synthetic polypeptide
KQYGGCRCGMEVRPSKTLAVLL

SEQ ID NO: 7193 - protein, 22 aa, Artificial Sequence
  Synthetic polypeptide
KQYGGCRCGMEVRPSKTLAVLL

SEQ ID NO: 7194 - protein, 22 aa, Artificial Sequence
  Synthetic polypeptide
FPSCDTYNTCYLGRDSHWTKWL

SEQ ID NO: 7195 - protein, 22 aa, Artificial Sequence
  Synthetic polypeptide
FPSCDTYNTCYLGRDSHWTKWL

SEQ ID NO: 7196 - protein, 21 aa, Artificial Sequence
  Synthetic polypeptide
PQPGPSLAFFIFHSSFAGGGV

SEQ ID NO: 7197 - protein, 21 aa, Artificial Sequence
  Synthetic polypeptide
PQPGPSLAFFIFHSSFAGGGV

SEQ ID NO: 7198 - protein, 21 aa, Artificial Sequence
  Synthetic polypeptide
GWAQWLTPVIPHFGRLRKFLL

SEQ ID NO: 7199 - protein, 21 aa, Artificial Sequence
  Synthetic polypeptide
GWAQWLTPVIPHFGRLRKFLL

SEQ ID NO: 7200 - protein, 21 aa, Artificial Sequence
  Synthetic polypeptide
GWAQWLTPVIPHFGRLRKFLL

SEQ ID NO: 7201 - protein, 21 aa, Artificial Sequence
  Synthetic polypeptide
GWAQWLTPVIPHFGRLRKFLL

SEQ ID NO: 7202 - protein, 21 aa, Artificial Sequence
  Synthetic polypeptide
GWAQWLTPVIPHFGRLRKFLL

SEQ ID NO: 7203 - protein, 21 aa, Artificial Sequence
  Synthetic polypeptide
GWAQWLTPVIPHFGRLRKFLL

SEQ ID NO: 7204 - protein, 21 aa, Artificial Sequence
  Synthetic polypeptide
SNLFLTQQTSLITCFCEVQEN

SEQ ID NO: 7205 - protein, 21 aa, Artificial Sequence
  Synthetic polypeptide
SLLCPQRLAHSRSSVSTTPQP

SEQ ID NO: 7206 - protein, 21 aa, Artificial Sequence
  Synthetic polypeptide
SLLCPQRLAHSRSSVSTTPQP

SEQ ID NO: 7207 - protein, 21 aa, Artificial Sequence
  Synthetic polypeptide
SLLCPQRLAHSRSSVSTTPQP

SEQ ID NO: 7208 - protein, 21 aa, Artificial Sequence
  Synthetic polypeptide
SLLCPQRLAHSRSSVSTTPQP

SEQ ID NO: 7209 - protein, 21 aa, Artificial Sequence
  Synthetic polypeptide
SLGPSLTVYNTWQESWRSGMA

SEQ ID NO: 7210 - protein, 21 aa, Artificial Sequence
  Synthetic polypeptide
VRGSLGPKSTRSTLNCRSPMW

SEQ ID NO: 7211 - protein, 21 aa, Artificial Sequence
  Synthetic polypeptide
VRGSLGPKSTRSTLNCRSPMW

SEQ ID NO: 7212 - protein, 21 aa, Artificial Sequence
  Synthetic polypeptide
VRGSLGPKSTRSTLNCRSPMW

SEQ ID NO: 7213 - protein, 21 aa, Artificial Sequence
  Synthetic polypeptide
VRGSLGPKSTRSTLNCRSPMW

SEQ ID NO: 7214 - protein, 21 aa, Artificial Sequence
  Synthetic polypeptide
VRGSLGPKSTRSTLNCRSPMW

SEQ ID NO: 7215 - protein, 21 aa, Artificial Sequence
  Synthetic polypeptide
VRGSLGPKSTRSTLNCRSPMW

SEQ ID NO: 7216 - protein, 21 aa, Artificial Sequence
  Synthetic polypeptide
VRGSLGPKSTRSTLNCRSPMW

SEQ ID NO: 7217 - protein, 21 aa, Artificial Sequence
  Synthetic polypeptide
VRGSLGPKSTRSTLNCRSPMW

SEQ ID NO: 7218 - protein, 21 aa, Artificial Sequence
  Synthetic polypeptide
VRGSLGPKSTRSTLNCRSPMW

SEQ ID NO: 7219 - protein, 21 aa, Artificial Sequence
  Synthetic polypeptide
PGMVAHACNPSTLGGRVLCGH

SEQ ID NO: 7220 - protein, 21 aa, Artificial Sequence
  Synthetic polypeptide
PGMVAHACNPSTLGGRVLCGH

SEQ ID NO: 7221 - protein, 21 aa, Artificial Sequence
  Synthetic polypeptide
GKDAVSSTKKKQSGVRITKRL

SEQ ID NO: 7222 - protein, 21 aa, Artificial Sequence
  Synthetic polypeptide
GKDAVSSTKKKQSGVRITKRL

SEQ ID NO: 7223 - protein, 21 aa, Artificial Sequence
  Synthetic polypeptide
GKDAVSSTKKKQSGVRITKRL

SEQ ID NO: 7224 - protein, 21 aa, Artificial Sequence
  Synthetic polypeptide
GKDAVSSTKKKQSGVRITKRL

SEQ ID NO: 7225 - protein, 21 aa, Artificial Sequence
  Synthetic polypeptide
GKDAVSSTKKKQSGVRITKRL

SEQ ID NO: 7226 - protein, 21 aa, Artificial Sequence
  Synthetic polypeptide
PPHSAAVYSSMPPPKIFVLKS

SEQ ID NO: 7227 - protein, 21 aa, Artificial Sequence
  Synthetic polypeptide
PPHSAAVYSSMPPPKIFVLKS

SEQ ID NO: 7228 - protein, 21 aa, Artificial Sequence
  Synthetic polypeptide
PPHSAAVYSSMPPPKIFVLKS

SEQ ID NO: 7229 - protein, 21 aa, Artificial Sequence
  Synthetic polypeptide
DQPGQHVHLCRRLCPVPLDHV

SEQ ID NO: 7230 - protein, 21 aa, Artificial Sequence
  Synthetic polypeptide
PGQRGETLSLLKIQKLARCGV

SEQ ID NO: 7231 - protein, 21 aa, Artificial Sequence
  Synthetic polypeptide
PGQRGETLSLLKIQKLARCGV

SEQ ID NO: 7232 - protein, 21 aa, Artificial Sequence
  Synthetic polypeptide
PGQRGETLSLLKIQKLARCGV

SEQ ID NO: 7233 - protein, 21 aa, Artificial Sequence
  Synthetic polypeptide
PGQRGETLSLLKIQKLARCGV

SEQ ID NO: 7234 - protein, 21 aa, Artificial Sequence
  Synthetic polypeptide
PGQRGETLSLLKIQKLARCGV

SEQ ID NO: 7235 - protein, 21 aa, Artificial Sequence
  Synthetic polypeptide
PGQRGETLSLLKIQKLARCGV

SEQ ID NO: 7236 - protein, 21 aa, Artificial Sequence
  Synthetic polypeptide
PGQRGETLSLLKIQKLARCGV

SEQ ID NO: 7237 - protein, 21 aa, Artificial Sequence
  Synthetic polypeptide
PGQRGETLSLLKIQKLARCGV

SEQ ID NO: 7238 - protein, 21 aa, Artificial Sequence
  Synthetic polypeptide
PGQRGETLSLLKIQKLARCGV

SEQ ID NO: 7239 - protein, 21 aa, Artificial Sequence
  Synthetic polypeptide
PGQRGETLSLLKIQKLARCGV

SEQ ID NO: 7240 - protein, 21 aa, Artificial Sequence
  Synthetic polypeptide
PGQRGETLSLLKIQKLARCGV

SEQ ID NO: 7241 - protein, 21 aa, Artificial Sequence
  Synthetic polypeptide
PGQRGETLSLLKIQKLARCGV

SEQ ID NO: 7242 - protein, 21 aa, Artificial Sequence
  Synthetic polypeptide
FYIMRGVEQRLPCSSVASSSW

SEQ ID NO: 7243 - protein, 21 aa, Artificial Sequence
  Synthetic polypeptide
RTIAPDKHLLKLDSEHKQFAL

SEQ ID NO: 7244 - protein, 21 aa, Artificial Sequence
  Synthetic polypeptide
SLHFGRLRLADHLSTWLTVMK

SEQ ID NO: 7245 - protein, 21 aa, Artificial Sequence
  Synthetic polypeptide
SLHFGRLRLADHLSTWLTVMK

SEQ ID NO: 7246 - protein, 21 aa, Artificial Sequence
  Synthetic polypeptide
QCPGGLSMILVGKEVKEDTQV

SEQ ID NO: 7247 - protein, 21 aa, Artificial Sequence
  Synthetic polypeptide
FLHFHLSFPELWGLPIRRSWS

SEQ ID NO: 7248 - protein, 21 aa, Artificial Sequence
  Synthetic polypeptide
VEDRQLWSGCHIGGRHYIQSC

SEQ ID NO: 7249 - protein, 21 aa, Artificial Sequence
  Synthetic polypeptide
RLLLSSLRPCCHHLVPCVRPP

SEQ ID NO: 7250 - protein, 21 aa, Artificial Sequence
  Synthetic polypeptide
KIPGPWSCTDQAEAGDGRHRD

SEQ ID NO: 7251 - protein, 21 aa, Artificial Sequence
  Synthetic polypeptide
KIPGPWSCTDQAEAGDGRHRD

SEQ ID NO: 7252 - protein, 21 aa, Artificial Sequence
  Synthetic polypeptide
KIPGPWSCTDQAEAGDGRHRD

SEQ ID NO: 7253 - protein, 21 aa, Artificial Sequence
  Synthetic polypeptide
GQAQWLTPVIPALREAEMTPS

SEQ ID NO: 7254 - protein, 21 aa, Artificial Sequence
  Synthetic polypeptide
GQAQWLTPVIPALREAEMTPS

SEQ ID NO: 7255 - protein, 21 aa, Artificial Sequence
  Synthetic polypeptide
SAGALVLDFQPPELVQAAQLP

SEQ ID NO: 7256 - protein, 21 aa, Artificial Sequence
  Synthetic polypeptide
SAGALVLDFQPPELVQAAQLP

SEQ ID NO: 7257 - protein, 21 aa, Artificial Sequence
  Synthetic polypeptide
SAGALVLDFQPPELVQAAQLP

SEQ ID NO: 7258 - protein, 21 aa, Artificial Sequence
  Synthetic polypeptide
SAGALVLDFQPPELVQAAQLP

SEQ ID NO: 7259 - protein, 21 aa, Artificial Sequence
  Synthetic polypeptide
KYTLVISLQQIPRCCGHMAKP

SEQ ID NO: 7260 - protein, 21 aa, Artificial Sequence
  Synthetic polypeptide
KYTLVISLQQIPRCCGHMAKP

SEQ ID NO: 7261 - protein, 21 aa, Artificial Sequence
  Synthetic polypeptide
SRRKGWISRRCRATCSSLTTK

SEQ ID NO: 7262 - protein, 21 aa, Artificial Sequence
  Synthetic polypeptide
SRRKGWISRRCRATCSSLTTK

SEQ ID NO: 7263 - protein, 21 aa, Artificial Sequence
  Synthetic polypeptide
SRRKGWISRRCRATCSSLTTK

SEQ ID NO: 7264 - protein, 21 aa, Artificial Sequence
  Synthetic polypeptide
SRRKGWISRRCRATCSSLTTK

SEQ ID NO: 7265 - protein, 21 aa, Artificial Sequence
  Synthetic polypeptide
SRRKGWISRRCRATCSSLTTK

SEQ ID NO: 7266 - protein, 21 aa, Artificial Sequence
  Synthetic polypeptide
SRRKGWISRRCRATCSSLTTK

SEQ ID NO: 7267 - protein, 21 aa, Artificial Sequence
  Synthetic polypeptide
SRRKGWISRRCRATCSSLTTK

SEQ ID NO: 7268 - protein, 21 aa, Artificial Sequence
  Synthetic polypeptide
SRRKGWISRRCRATCSSLTTK

SEQ ID NO: 7269 - protein, 21 aa, Artificial Sequence
  Synthetic polypeptide
SRRKGWISRRCRATCSSLTTK

SEQ ID NO: 7270 - protein, 21 aa, Artificial Sequence
  Synthetic polypeptide
SRRKGWISRRCRATCSSLTTK

SEQ ID NO: 7271 - protein, 21 aa, Artificial Sequence
  Synthetic polypeptide
SLTGFHVIPTISSIVPESCLL

SEQ ID NO: 7272 - protein, 20 aa, Artificial Sequence
  Synthetic polypeptide
SLDDAGQVLQKWHCLFLKRR

SEQ ID NO: 7273 - protein, 20 aa, Artificial Sequence
  Synthetic polypeptide
SLDDAGQVLQKWHCLFLKRR

SEQ ID NO: 7274 - protein, 20 aa, Artificial Sequence
  Synthetic polypeptide
SLDDAGQVLQKWHCLFLKRR

SEQ ID NO: 7275 - protein, 20 aa, Artificial Sequence
  Synthetic polypeptide
SQHFRRPRQEEFHPPAQGAA

SEQ ID NO: 7276 - protein, 20 aa, Artificial Sequence
  Synthetic polypeptide
PWTSGPTSLNLSWPRPGLRT

SEQ ID NO: 7277 - protein, 20 aa, Artificial Sequence
  Synthetic polypeptide
PWTSGPTSLNLSWPRPGLRT

SEQ ID NO: 7278 - protein, 20 aa, Artificial Sequence
  Synthetic polypeptide
PWTSGPTSLNLSWPRPGLRT

SEQ ID NO: 7279 - protein, 20 aa, Artificial Sequence
  Synthetic polypeptide
PWTSGPTSLNLSWPRPGLRT

SEQ ID NO: 7280 - protein, 20 aa, Artificial Sequence
  Synthetic polypeptide
PWTSGPTSLNLSWPRPGLRT

SEQ ID NO: 7281 - protein, 20 aa, Artificial Sequence
  Synthetic polypeptide
PWTSGPTSLNLSWPRPGLRT

SEQ ID NO: 7282 - protein, 20 aa, Artificial Sequence
  Synthetic polypeptide
GRVQWPTPVIPALWQAELFY

SEQ ID NO: 7283 - protein, 20 aa, Artificial Sequence
  Synthetic polypeptide
PVKDSETWVQCGLSLIHHAR

SEQ ID NO: 7284 - protein, 20 aa, Artificial Sequence
  Synthetic polypeptide
AKITPLHSSLGNRARCHLKS

SEQ ID NO: 7285 - protein, 20 aa, Artificial Sequence
  Synthetic polypeptide
WETHHQRSASWGGRELGSRP

SEQ ID NO: 7286 - protein, 20 aa, Artificial Sequence
  Synthetic polypeptide
WETHHQRSASWGGRELGSRP

SEQ ID NO: 7287 - protein, 20 aa, Artificial Sequence
  Synthetic polypeptide
WETHHQRSASWGGRELGSRP

SEQ ID NO: 7288 - protein, 20 aa, Artificial Sequence
  Synthetic polypeptide
WETHHQRSASWGGRELGSRP

SEQ ID NO: 7289 - protein, 20 aa, Artificial Sequence
  Synthetic polypeptide
WETHHQRSASWGGRELGSRP

SEQ ID NO: 7290 - protein, 20 aa, Artificial Sequence
  Synthetic polypeptide
WETHHQRSASWGGRELGSRP

SEQ ID NO: 7291 - protein, 20 aa, Artificial Sequence
  Synthetic polypeptide
WETHHQRSASWGGRELGSRP

SEQ ID NO: 7292 - protein, 20 aa, Artificial Sequence
  Synthetic polypeptide
WGRRRRIWGGLQNLLCDCGW

SEQ ID NO: 7293 - protein, 20 aa, Artificial Sequence
  Synthetic polypeptide
WGRRRRIWGGLQNLLCDCGW

SEQ ID NO: 7294 - protein, 20 aa, Artificial Sequence
  Synthetic polypeptide
WGRRRRIWGGLQNLLCDCGW

SEQ ID NO: 7295 - protein, 20 aa, Artificial Sequence
  Synthetic polypeptide
WGRRRRIWGGLQNLLCDCGW

SEQ ID NO: 7296 - protein, 20 aa, Artificial Sequence
  Synthetic polypeptide
WGRRRRIWGGLQNLLCDCGW

SEQ ID NO: 7297 - protein, 20 aa, Artificial Sequence
  Synthetic polypeptide
GCPGQAPTHAITITESPRSE

SEQ ID NO: 7298 - protein, 20 aa, Artificial Sequence
  Synthetic polypeptide
GCPGQAPTHAITITESPRSE

SEQ ID NO: 7299 - protein, 20 aa, Artificial Sequence
  Synthetic polypeptide
SRTMSSLRVSTSHVGPWVSP

SEQ ID NO: 7300 - protein, 20 aa, Artificial Sequence
  Synthetic polypeptide
SRTMSSLRVSTSHVGPWVSP

SEQ ID NO: 7301 - protein, 20 aa, Artificial Sequence
  Synthetic polypeptide
VTFPFGASGSSPQNVRSRLL

SEQ ID NO: 7302 - protein, 20 aa, Artificial Sequence
  Synthetic polypeptide
VTFPFGASGSSPQNVRSRLL

SEQ ID NO: 7303 - protein, 20 aa, Artificial Sequence
  Synthetic polypeptide
VTFPFGASGSSPQNVRSRLL

SEQ ID NO: 7304 - protein, 20 aa, Artificial Sequence
  Synthetic polypeptide
VTFPFGASGSSPQNVRSRLL

SEQ ID NO: 7305 - protein, 20 aa, Artificial Sequence
  Synthetic polypeptide
VTFPFGASGSSPQNVRSRLL

SEQ ID NO: 7306 - protein, 20 aa, Artificial Sequence
  Synthetic polypeptide
VTFPFGASGSSPQNVRSRLL

SEQ ID NO: 7307 - protein, 20 aa, Artificial Sequence
  Synthetic polypeptide
PPRASAVNAVFFATYLTLAC

SEQ ID NO: 7308 - protein, 20 aa, Artificial Sequence
  Synthetic polypeptide
CARVCVSEFPAAVHKDAFYL

SEQ ID NO: 7309 - protein, 20 aa, Artificial Sequence
  Synthetic polypeptide
VAHACNPSTLGGQGLHPRGG

SEQ ID NO: 7310 - protein, 20 aa, Artificial Sequence
  Synthetic polypeptide
VAHACNPSTLGGQGLHPRGG

SEQ ID NO: 7311 - protein, 20 aa, Artificial Sequence
  Synthetic polypeptide
VAHACNPSTLGGQGLHPRGG

SEQ ID NO: 7312 - protein, 20 aa, Artificial Sequence
  Synthetic polypeptide
VAHACNPSTLGGQGLHPRGG

SEQ ID NO: 7313 - protein, 20 aa, Artificial Sequence
  Synthetic polypeptide
VAHACNPSTLGGQGLHPRGG

SEQ ID NO: 7314 - protein, 20 aa, Artificial Sequence
  Synthetic polypeptide
EVRSVSARQPPRPGGSALRS

SEQ ID NO: 7315 - protein, 20 aa, Artificial Sequence
  Synthetic polypeptide
EVRSVSARQPPRPGGSALRS

SEQ ID NO: 7316 - protein, 20 aa, Artificial Sequence
  Synthetic polypeptide
EVRSVSARQPPRPGGSALRS

SEQ ID NO: 7317 - protein, 20 aa, Artificial Sequence
  Synthetic polypeptide
EVRSVSARQPPRPGGSALRS

SEQ ID NO: 7318 - protein, 20 aa, Artificial Sequence
  Synthetic polypeptide
GLPSHVELLPCRDIQGQPGS

SEQ ID NO: 7319 - protein, 20 aa, Artificial Sequence
  Synthetic polypeptide
LKMQGPRRADHLRCSPLLGG

SEQ ID NO: 7320 - protein, 20 aa, Artificial Sequence
  Synthetic polypeptide
LKMQGPRRADHLRCSPLLGG

SEQ ID NO: 7321 - protein, 20 aa, Artificial Sequence
  Synthetic polypeptide
LKMQGPRRADHLRCSPLLGG

SEQ ID NO: 7322 - protein, 20 aa, Artificial Sequence
  Synthetic polypeptide
LKMQGPRRADHLRCSPLLGG

SEQ ID NO: 7323 - protein, 20 aa, Artificial Sequence
  Synthetic polypeptide
LKMQGPRRADHLRCSPLLGG

SEQ ID NO: 7324 - protein, 20 aa, Artificial Sequence
  Synthetic polypeptide
LKMQGPRRADHLRCSPLLGG

SEQ ID NO: 7325 - protein, 20 aa, Artificial Sequence
  Synthetic polypeptide
LKMQGPRRADHLRCSPLLGG

SEQ ID NO: 7326 - protein, 20 aa, Artificial Sequence
  Synthetic polypeptide
LKMQGPRRADHLRCSPLLGG

SEQ ID NO: 7327 - protein, 20 aa, Artificial Sequence
  Synthetic polypeptide
LKMQGPRRADHLRCSPLLGG

SEQ ID NO: 7328 - protein, 20 aa, Artificial Sequence
  Synthetic polypeptide
LKMQGPRRADHLRCSPLLGG

SEQ ID NO: 7329 - protein, 20 aa, Artificial Sequence
  Synthetic polypeptide
LKMQGPRRADHLRCSPLLGG

SEQ ID NO: 7330 - protein, 20 aa, Artificial Sequence
  Synthetic polypeptide
LKMQGPRRADHLRCSPLLGG

SEQ ID NO: 7331 - protein, 20 aa, Artificial Sequence
  Synthetic polypeptide
LKMQGPRRADHLRCSPLLGG

SEQ ID NO: 7332 - protein, 20 aa, Artificial Sequence
  Synthetic polypeptide
LKMQGPRRADHLRCSPLLGG

SEQ ID NO: 7333 - protein, 20 aa, Artificial Sequence
  Synthetic polypeptide
LKMQGPRRADHLRCSPLLGG

SEQ ID NO: 7334 - protein, 20 aa, Artificial Sequence
  Synthetic polypeptide
LKMQGPRRADHLRCSPLLGG

SEQ ID NO: 7335 - protein, 20 aa, Artificial Sequence
  Synthetic polypeptide
TLHVKMAKMVLGSSATTSSR

SEQ ID NO: 7336 - protein, 20 aa, Artificial Sequence
  Synthetic polypeptide
TLHVKMAKMVLGSSATTSSR

SEQ ID NO: 7337 - protein, 20 aa, Artificial Sequence
  Synthetic polypeptide
HSYKPRSSQDCCNPDYYGLI

SEQ ID NO: 7338 - protein, 20 aa, Artificial Sequence
  Synthetic polypeptide
HSYKPRSSQDCCNPDYYGLI

SEQ ID NO: 7339 - protein, 20 aa, Artificial Sequence
  Synthetic polypeptide
HSYKPRSSQDCCNPDYYGLI

SEQ ID NO: 7340 - protein, 20 aa, Artificial Sequence
  Synthetic polypeptide
HSYKPRSSQDCCNPDYYGLI

SEQ ID NO: 7341 - protein, 20 aa, Artificial Sequence
  Synthetic polypeptide
HSYKPRSSQDCCNPDYYGLI

SEQ ID NO: 7342 - protein, 20 aa, Artificial Sequence
  Synthetic polypeptide
PGMVYHTCNPSTLGGRDFAD

SEQ ID NO: 7343 - protein, 20 aa, Artificial Sequence
  Synthetic polypeptide
SQYFGRPRFCRLRIFKHSSI

SEQ ID NO: 7344 - protein, 19 aa, Artificial Sequence
  Synthetic polypeptide
SGNYIQLTGCRAQWPAPQL

SEQ ID NO: 7345 - protein, 19 aa, Artificial Sequence
  Synthetic polypeptide
IMHSQQTSLITCFCEVQEN

SEQ ID NO: 7346 - protein, 19 aa, Artificial Sequence
  Synthetic polypeptide
RSCHDLCCVPSAWHTVGAQ

SEQ ID NO: 7347 - protein, 19 aa, Artificial Sequence
  Synthetic polypeptide
RSCHDLCCVPSAWHTVGAQ

SEQ ID NO: 7348 - protein, 19 aa, Artificial Sequence
  Synthetic polypeptide
RSCHDLCCVPSAWHTVGAQ

SEQ ID NO: 7349 - protein, 19 aa, Artificial Sequence
  Synthetic polypeptide
RSCHDLCCVPSAWHTVGAQ

SEQ ID NO: 7350 - protein, 19 aa, Artificial Sequence
  Synthetic polypeptide
LLLEVQLPEGRVFCCVPSC

SEQ ID NO: 7351 - protein, 19 aa, Artificial Sequence
  Synthetic polypeptide
LLLEVQLPEGRVFCCVPSC

SEQ ID NO: 7352 - protein, 19 aa, Artificial Sequence
  Synthetic polypeptide
LLLEVQLPEGRVFCCVPSC

SEQ ID NO: 7353 - protein, 19 aa, Artificial Sequence
  Synthetic polypeptide
LLLEVQLPEGRVFCCVPSC

SEQ ID NO: 7354 - protein, 19 aa, Artificial Sequence
  Synthetic polypeptide
DLVSPVYHLGNASRLHTFT

SEQ ID NO: 7355 - protein, 19 aa, Artificial Sequence
  Synthetic polypeptide
DLVSPVYHLGNASRLHTFT

SEQ ID NO: 7356 - protein, 19 aa, Artificial Sequence
  Synthetic polypeptide
PGAVAHTYNPNTSGGRAPS

SEQ ID NO: 7357 - protein, 19 aa, Artificial Sequence
  Synthetic polypeptide
PGAVAHTYNPNTSGGRAPS

SEQ ID NO: 7358 - protein, 19 aa, Artificial Sequence
  Synthetic polypeptide
ARRVAHVPVIPALWKAEGG

SEQ ID NO: 7359 - protein, 19 aa, Artificial Sequence
  Synthetic polypeptide
ARRVAHVPVIPALWKAEGG

SEQ ID NO: 7360 - protein, 19 aa, Artificial Sequence
  Synthetic polypeptide
ARRVAHVPVIPALWKAEGG

SEQ ID NO: 7361 - protein, 19 aa, Artificial Sequence
  Synthetic polypeptide
WYQEGSSLVSWDKPRQGQS

SEQ ID NO: 7362 - protein, 19 aa, Artificial Sequence
  Synthetic polypeptide
PLKHAPFCTVWCWASSSLP

SEQ ID NO: 7363 - protein, 19 aa, Artificial Sequence
  Synthetic polypeptide
PLKHAPFCTVWCWASSSLP

SEQ ID NO: 7364 - protein, 19 aa, Artificial Sequence
  Synthetic polypeptide
PLKHAPFCTVWCWASSSLP

SEQ ID NO: 7365 - protein, 19 aa, Artificial Sequence
  Synthetic polypeptide
SLCFSSGSPKIQSPYSGQV

SEQ ID NO: 7366 - protein, 19 aa, Artificial Sequence
  Synthetic polypeptide
GQAWCLTPGIPALWEAEGP

SEQ ID NO: 7367 - protein, 19 aa, Artificial Sequence
  Synthetic polypeptide
ARHGVSRLESQRFGRLRVL

SEQ ID NO: 7368 - protein, 19 aa, Artificial Sequence
  Synthetic polypeptide
MQWLTPIVPALWEAEVSIS

SEQ ID NO: 7369 - protein, 19 aa, Artificial Sequence
  Synthetic polypeptide
GLPSHVELASSLTLAHHII

SEQ ID NO: 7370 - protein, 19 aa, Artificial Sequence
  Synthetic polypeptide
GLPSHVELASSLTLAHHII

SEQ ID NO: 7371 - protein, 19 aa, Artificial Sequence
  Synthetic polypeptide
MTLSPLFNIQSRQNCWASL

SEQ ID NO: 7372 - protein, 19 aa, Artificial Sequence
  Synthetic polypeptide
MTLSPLFNIQSRQNCWASL

SEQ ID NO: 7373 - protein, 19 aa, Artificial Sequence
  Synthetic polypeptide
MTLSPLFNIQSRQNCWASL

SEQ ID NO: 7374 - protein, 19 aa, Artificial Sequence
  Synthetic polypeptide
MTLSPLFNIQSRQNCWASL

SEQ ID NO: 7375 - protein, 19 aa, Artificial Sequence
  Synthetic polypeptide
LGDMWTCVDTFVAARTGGL

SEQ ID NO: 7376 - protein, 19 aa, Artificial Sequence
  Synthetic polypeptide
NLISTKNTKLARRDVLCGH

SEQ ID NO: 7377 - protein, 19 aa, Artificial Sequence
  Synthetic polypeptide
NLISTKNTKLARRDVLCGH

SEQ ID NO: 7378 - protein, 19 aa, Artificial Sequence
  Synthetic polypeptide
SQHFGRPRRADHKCAPAQT

SEQ ID NO: 7379 - protein, 19 aa, Artificial Sequence
  Synthetic polypeptide
SQHFGRPRRADHKCAPAQT

SEQ ID NO: 7380 - protein, 19 aa, Artificial Sequence
  Synthetic polypeptide
SQHFGRPRRADHKCAPAQT

SEQ ID NO: 7381 - protein, 19 aa, Artificial Sequence
  Synthetic polypeptide
SQHFGRPRRADHKCAPAQT

SEQ ID NO: 7382 - protein, 19 aa, Artificial Sequence
  Synthetic polypeptide
SQHFGRPRRADHKCAPAQT

SEQ ID NO: 7383 - protein, 19 aa, Artificial Sequence
  Synthetic polypeptide
LCDFRSFHGQQHSAGCFAA

SEQ ID NO: 7384 - protein, 19 aa, Artificial Sequence
  Synthetic polypeptide
LCDFRSFHGQQHSAGCFAA

SEQ ID NO: 7385 - protein, 19 aa, Artificial Sequence
  Synthetic polypeptide
AYETSFLYKLSNFSWKLTN

SEQ ID NO: 7386 - protein, 19 aa, Artificial Sequence
  Synthetic polypeptide
GTRGSFPELWGLPIRRSWS

SEQ ID NO: 7387 - protein, 19 aa, Artificial Sequence
  Synthetic polypeptide
GGEGRTGDVPFGEAAPSHS

SEQ ID NO: 7388 - protein, 19 aa, Artificial Sequence
  Synthetic polypeptide
VIIVPALLAIHLEKQMRVF

SEQ ID NO: 7389 - protein, 19 aa, Artificial Sequence
  Synthetic polypeptide
VIIVPALLAIHLEKQMRVF

SEQ ID NO: 7390 - protein, 19 aa, Artificial Sequence
  Synthetic polypeptide
VIIVPALLAIHLEKQMRVF

SEQ ID NO: 7391 - protein, 19 aa, Artificial Sequence
  Synthetic polypeptide
VIIVPALLAIHLEKQMRVF

SEQ ID NO: 7392 - protein, 19 aa, Artificial Sequence
  Synthetic polypeptide
VIIVPALLAIHLEKQMRVF

SEQ ID NO: 7393 - protein, 19 aa, Artificial Sequence
  Synthetic polypeptide
VIIVPALLAIHLEKQMRVF

SEQ ID NO: 7394 - protein, 19 aa, Artificial Sequence
  Synthetic polypeptide
VIIVPALLAIHLEKQMRVF

SEQ ID NO: 7395 - protein, 19 aa, Artificial Sequence
  Synthetic polypeptide
SQHFGRPRRPDHKWPAPQL

SEQ ID NO: 7396 - protein, 19 aa, Artificial Sequence
  Synthetic polypeptide
KWPYCPSQHWPVPERLLSA

SEQ ID NO: 7397 - protein, 19 aa, Artificial Sequence
  Synthetic polypeptide
KWPYCPSQHWPVPERLLSA

SEQ ID NO: 7398 - protein, 19 aa, Artificial Sequence
  Synthetic polypeptide
KWPYCPSQHWPVPERLLSA

SEQ ID NO: 7399 - protein, 19 aa, Artificial Sequence
  Synthetic polypeptide
KIPGPWSCTDQAEAGDGRH

SEQ ID NO: 7400 - protein, 19 aa, Artificial Sequence
  Synthetic polypeptide
RSRVPGAAQIKLKQEMGGI

SEQ ID NO: 7401 - protein, 19 aa, Artificial Sequence
  Synthetic polypeptide
PDTEAGWRRDPGCGPVAPP

SEQ ID NO: 7402 - protein, 19 aa, Artificial Sequence
  Synthetic polypeptide
PDTEAGWRRDPGCGPVAPP

SEQ ID NO: 7403 - protein, 19 aa, Artificial Sequence
  Synthetic polypeptide
PDTEAGWRRDPGCGPVAPP

SEQ ID NO: 7404 - protein, 19 aa, Artificial Sequence
  Synthetic polypeptide
PDTEAGWRRDPGCGPVAPP

SEQ ID NO: 7405 - protein, 19 aa, Artificial Sequence
  Synthetic polypeptide
PDTEAGWRRDPGCGPVAPP

SEQ ID NO: 7406 - protein, 19 aa, Artificial Sequence
  Synthetic polypeptide
PDTEAGWRRDPGCGPVAPP

SEQ ID NO: 7407 - protein, 19 aa, Artificial Sequence
  Synthetic polypeptide
PDTEAGWRRDPGCGPVAPP

SEQ ID NO: 7408 - protein, 19 aa, Artificial Sequence
  Synthetic polypeptide
VQELEPAVSYDCITSLQPG

SEQ ID NO: 7409 - protein, 19 aa, Artificial Sequence
  Synthetic polypeptide
VQELEPAVSYDCITSLQPG

SEQ ID NO: 7410 - protein, 19 aa, Artificial Sequence
  Synthetic polypeptide
GLPSHAELNRGCLYGLVGS

SEQ ID NO: 7411 - protein, 19 aa, Artificial Sequence
  Synthetic polypeptide
SQLLRSLRFFFGLRERYCF

SEQ ID NO: 7412 - protein, 19 aa, Artificial Sequence
  Synthetic polypeptide
SQLLRSLRFFFGLRERYCF

SEQ ID NO: 7413 - protein, 19 aa, Artificial Sequence
  Synthetic polypeptide
SQLLRSLRFFFGLRERYCF

SEQ ID NO: 7414 - protein, 19 aa, Artificial Sequence
  Synthetic polypeptide
SQLLRSLRFFFGLRERYCF

SEQ ID NO: 7415 - protein, 19 aa, Artificial Sequence
  Synthetic polypeptide
SQLLRSLRFFFGLRERYCF

SEQ ID NO: 7416 - protein, 19 aa, Artificial Sequence
  Synthetic polypeptide
SQLLRSLRFFFGLRERYCF

SEQ ID NO: 7417 - protein, 19 aa, Artificial Sequence
  Synthetic polypeptide
SQLLRSLRFFFGLRERYCF

SEQ ID NO: 7418 - protein, 19 aa, Artificial Sequence
  Synthetic polypeptide
SQLLRSLRFFFGLRERYCF

SEQ ID NO: 7419 - protein, 19 aa, Artificial Sequence
  Synthetic polypeptide
SQLLRSLRFFFGLRERYCF

SEQ ID NO: 7420 - protein, 18 aa, Artificial Sequence
  Synthetic polypeptide
LFSPFHKRNDPACVPAQL

SEQ ID NO: 7421 - protein, 18 aa, Artificial Sequence
  Synthetic polypeptide
LFSPFHKRNDPACVPAQL

SEQ ID NO: 7422 - protein, 18 aa, Artificial Sequence
  Synthetic polypeptide
LFSPFHKRNDPACVPAQL

SEQ ID NO: 7423 - protein, 18 aa, Artificial Sequence
  Synthetic polypeptide
LFSPFHKRNDPACVPAQL

SEQ ID NO: 7424 - protein, 18 aa, Artificial Sequence
  Synthetic polypeptide
VSLSGRCEKLACDVWISA

SEQ ID NO: 7425 - protein, 18 aa, Artificial Sequence
  Synthetic polypeptide
VSLSGRCEKLACDVWISA

SEQ ID NO: 7426 - protein, 18 aa, Artificial Sequence
  Synthetic polypeptide
VSLSGRCEKLACDVWISA

SEQ ID NO: 7427 - protein, 18 aa, Artificial Sequence
  Synthetic polypeptide
VSLSGRCEKLACDVWISA

SEQ ID NO: 7428 - protein, 18 aa, Artificial Sequence
  Synthetic polypeptide
VSLSGRCEKLACDVWISA

SEQ ID NO: 7429 - protein, 18 aa, Artificial Sequence
  Synthetic polypeptide
GQRRGVIQRQMDYRGREL

SEQ ID NO: 7430 - protein, 18 aa, Artificial Sequence
  Synthetic polypeptide
GQRRGVIQRQMDYRGREL

SEQ ID NO: 7431 - protein, 18 aa, Artificial Sequence
  Synthetic polypeptide
GQRRGVIQRQMDYRGREL

SEQ ID NO: 7432 - protein, 18 aa, Artificial Sequence
  Synthetic polypeptide
GQRRGVIQRQMDYRGREL

SEQ ID NO: 7433 - protein, 18 aa, Artificial Sequence
  Synthetic polypeptide
GQRRGVIQRQMDYRGREL

SEQ ID NO: 7434 - protein, 18 aa, Artificial Sequence
  Synthetic polypeptide
SQHFGRPSSKLNAPGRPS

SEQ ID NO: 7435 - protein, 18 aa, Artificial Sequence
  Synthetic polypeptide
SQHFGRPSSKLNAPGRPS

SEQ ID NO: 7436 - protein, 18 aa, Artificial Sequence
  Synthetic polypeptide
NFNISWLLESARWLIINN

SEQ ID NO: 7437 - protein, 18 aa, Artificial Sequence
  Synthetic polypeptide
NFNISWLLESARWLIINN

SEQ ID NO: 7438 - protein, 18 aa, Artificial Sequence
  Synthetic polypeptide
LFFYLSRMMISRLNLLMN

SEQ ID NO: 7439 - protein, 18 aa, Artificial Sequence
  Synthetic polypeptide
GAAKSQGLESDWLRIWRN

SEQ ID NO: 7440 - protein, 18 aa, Artificial Sequence
  Synthetic polypeptide
GAAKSQGLESDWLRIWRN

SEQ ID NO: 7441 - protein, 18 aa, Artificial Sequence
  Synthetic polypeptide
GAAKSQGLESDWLRIWRN

SEQ ID NO: 7442 - protein, 18 aa, Artificial Sequence
  Synthetic polypeptide
FQLLGRLRNHRGHINNWK

SEQ ID NO: 7443 - protein, 18 aa, Artificial Sequence
  Synthetic polypeptide
FQLLGRLRNHRGHINNWK

SEQ ID NO: 7444 - protein, 18 aa, Artificial Sequence
  Synthetic polypeptide
FQLLGRLRNHRGHINNWK

SEQ ID NO: 7445 - protein, 18 aa, Artificial Sequence
  Synthetic polypeptide
FQLLGRLRNHRGHINNWK

SEQ ID NO: 7446 - protein, 18 aa, Artificial Sequence
  Synthetic polypeptide
FQLLGRLRNHRGHINNWK

SEQ ID NO: 7447 - protein, 18 aa, Artificial Sequence
  Synthetic polypeptide
FQLLGRLRNHRGHINNWK

SEQ ID NO: 7448 - protein, 18 aa, Artificial Sequence
  Synthetic polypeptide
FQLLGRLRNHRGHINNWK

SEQ ID NO: 7449 - protein, 18 aa, Artificial Sequence
  Synthetic polypeptide
FQLLGRLRNHRGHINNWK

SEQ ID NO: 7450 - protein, 18 aa, Artificial Sequence
  Synthetic polypeptide
FQLLGRLRNHRGHINNWK

SEQ ID NO: 7451 - protein, 18 aa, Artificial Sequence
  Synthetic polypeptide
FQLLGRLRNHRGHINNWK

SEQ ID NO: 7452 - protein, 18 aa, Artificial Sequence
  Synthetic polypeptide
SQEFETSLADMACSWDLA

SEQ ID NO: 7453 - protein, 18 aa, Artificial Sequence
  Synthetic polypeptide
SQEFETSLADMACSWDLA

SEQ ID NO: 7454 - protein, 18 aa, Artificial Sequence
  Synthetic polypeptide
SFNGIIDVRHWEQSPEQV

SEQ ID NO: 7455 - protein, 18 aa, Artificial Sequence
  Synthetic polypeptide
SFNGIIDVRHWEQSPEQV

SEQ ID NO: 7456 - protein, 18 aa, Artificial Sequence
  Synthetic polypeptide
SFNGIIDVRHWEQSPEQV

SEQ ID NO: 7457 - protein, 18 aa, Artificial Sequence
  Synthetic polypeptide
SFNGIIDVRHWEQSPEQV

SEQ ID NO: 7458 - protein, 18 aa, Artificial Sequence
  Synthetic polypeptide
LHQMPPPPFPSCTKSVPL

SEQ ID NO: 7459 - protein, 18 aa, Artificial Sequence
  Synthetic polypeptide
SISLGELQGKNHVMYSFI

SEQ ID NO: 7460 - protein, 18 aa, Artificial Sequence
  Synthetic polypeptide
SISLGELQGKNHVMYSFI

SEQ ID NO: 7461 - protein, 18 aa, Artificial Sequence
  Synthetic polypeptide
TTWRNPVSTKNTKLFSHC

SEQ ID NO: 7462 - protein, 18 aa, Artificial Sequence
  Synthetic polypeptide
CLSQGQRADTSTSDCRQH

SEQ ID NO: 7463 - protein, 18 aa, Artificial Sequence
  Synthetic polypeptide
CLSQGQRADTSTSDCRQH

SEQ ID NO: 7464 - protein, 18 aa, Artificial Sequence
  Synthetic polypeptide
CLSQGQRADTSTSDCRQH

SEQ ID NO: 7465 - protein, 18 aa, Artificial Sequence
  Synthetic polypeptide
CLSQGQRADTSTSDCRQH

SEQ ID NO: 7466 - protein, 18 aa, Artificial Sequence
  Synthetic polypeptide
GVWNEVRRSRPPLLTRPL

SEQ ID NO: 7467 - protein, 18 aa, Artificial Sequence
  Synthetic polypeptide
GVWNEVRRSRPPLLTRPL

SEQ ID NO: 7468 - protein, 18 aa, Artificial Sequence
  Synthetic polypeptide
GVWNEVRRSRPPLLTRPL

SEQ ID NO: 7469 - protein, 18 aa, Artificial Sequence
  Synthetic polypeptide
GVWNEVRRSRPPLLTRPL

SEQ ID NO: 7470 - protein, 18 aa, Artificial Sequence
  Synthetic polypeptide
GVWNEVRRSRPPLLTRPL

SEQ ID NO: 7471 - protein, 18 aa, Artificial Sequence
  Synthetic polypeptide
GVWNEVRRSRPPLLTRPL

SEQ ID NO: 7472 - protein, 18 aa, Artificial Sequence
  Synthetic polypeptide
EPGHTAGGEQRALAMLSS

SEQ ID NO: 7473 - protein, 18 aa, Artificial Sequence
  Synthetic polypeptide
EPGHTAGGEQRALAMLSS

SEQ ID NO: 7474 - protein, 18 aa, Artificial Sequence
  Synthetic polypeptide
EPGHTAGGEQRALAMLSS

SEQ ID NO: 7475 - protein, 18 aa, Artificial Sequence
  Synthetic polypeptide
EPGHTAGGEQRALAMLSS

SEQ ID NO: 7476 - protein, 18 aa, Artificial Sequence
  Synthetic polypeptide
EPGHTAGGEQRALAMLSS

SEQ ID NO: 7477 - protein, 18 aa, Artificial Sequence
  Synthetic polypeptide
EPGHTAGGEQRALAMLSS

SEQ ID NO: 7478 - protein, 18 aa, Artificial Sequence
  Synthetic polypeptide
EPGHTAGGEQRALAMLSS

SEQ ID NO: 7479 - protein, 18 aa, Artificial Sequence
  Synthetic polypeptide
EPGHTAGGEQRALAMLSS

SEQ ID NO: 7480 - protein, 18 aa, Artificial Sequence
  Synthetic polypeptide
EPGHTAGGEQRALAMLSS

SEQ ID NO: 7481 - protein, 18 aa, Artificial Sequence
  Synthetic polypeptide
AMTASLHSSLGRGARHGG

SEQ ID NO: 7482 - protein, 18 aa, Artificial Sequence
  Synthetic polypeptide
AMTASLHSSLGRGARHGG

SEQ ID NO: 7483 - protein, 18 aa, Artificial Sequence
  Synthetic polypeptide
KYKKLAGHGGSQHRPARR

SEQ ID NO: 7484 - protein, 18 aa, Artificial Sequence
  Synthetic polypeptide
KYKKLAGHGGSQHRPARR

SEQ ID NO: 7485 - protein, 18 aa, Artificial Sequence
  Synthetic polypeptide
KYKKLAGHGGSQHRPARR

SEQ ID NO: 7486 - protein, 18 aa, Artificial Sequence
  Synthetic polypeptide
KYKKLAGHGGSQHRPARR

SEQ ID NO: 7487 - protein, 18 aa, Artificial Sequence
  Synthetic polypeptide
SLAPHTMPAHFHIPHHIG

SEQ ID NO: 7488 - protein, 18 aa, Artificial Sequence
  Synthetic polypeptide
SLAPHTMPAHFHIPHHIG

SEQ ID NO: 7489 - protein, 18 aa, Artificial Sequence
  Synthetic polypeptide
SLAPHTMPAHFHIPHHIG

SEQ ID NO: 7490 - protein, 18 aa, Artificial Sequence
  Synthetic polypeptide
SLAPHTMPAHFHIPHHIG

SEQ ID NO: 7491 - protein, 18 aa, Artificial Sequence
  Synthetic polypeptide
SLAPHTMPAHFHIPHHIG

SEQ ID NO: 7492 - protein, 18 aa, Artificial Sequence
  Synthetic polypeptide
SLAPHTMPAHFHIPHHIG

SEQ ID NO: 7493 - protein, 18 aa, Artificial Sequence
  Synthetic polypeptide
EAGCILYCFTAITDDSSS

SEQ ID NO: 7494 - protein, 18 aa, Artificial Sequence
  Synthetic polypeptide
EAGCILYCFTAITDDSSS

SEQ ID NO: 7495 - protein, 18 aa, Artificial Sequence
  Synthetic polypeptide
EAGCILYCFTAITDDSSS

SEQ ID NO: 7496 - protein, 18 aa, Artificial Sequence
  Synthetic polypeptide
EAGCILYCFTAITDDSSS

SEQ ID NO: 7497 - protein, 18 aa, Artificial Sequence
  Synthetic polypeptide
EAGCILYCFTAITDDSSS

SEQ ID NO: 7498 - protein, 18 aa, Artificial Sequence
  Synthetic polypeptide
KRCLLPLHLLPRFTHSWL

SEQ ID NO: 7499 - protein, 18 aa, Artificial Sequence
  Synthetic polypeptide
KRCLLPLHLLPRFTHSWL

SEQ ID NO: 7500 - protein, 18 aa, Artificial Sequence
  Synthetic polypeptide
KRCLLPLHLLPRFTHSWL

SEQ ID NO: 7501 - protein, 18 aa, Artificial Sequence
  Synthetic polypeptide
KRCLLPLHLLPRFTHSWL

SEQ ID NO: 7502 - protein, 18 aa, Artificial Sequence
  Synthetic polypeptide
KRCLLPLHLLPRFTHSWL

SEQ ID NO: 7503 - protein, 17 aa, Artificial Sequence
  Synthetic polypeptide
NQVGKNKKDCGQEVQRF

SEQ ID NO: 7504 - protein, 17 aa, Artificial Sequence
  Synthetic polypeptide
NQVGKNKKDCGQEVQRF

SEQ ID NO: 7505 - protein, 17 aa, Artificial Sequence
  Synthetic polypeptide
VNSTSFLHKSCILSKLP

SEQ ID NO: 7506 - protein, 17 aa, Artificial Sequence
  Synthetic polypeptide
SQHFGRPRQVDHLRTCW

SEQ ID NO: 7507 - protein, 17 aa, Artificial Sequence
  Synthetic polypeptide
SQHFGRPRQVDHLRTCW

SEQ ID NO: 7508 - protein, 17 aa, Artificial Sequence
  Synthetic polypeptide
SQHFGRPRQVDHLRTCW

SEQ ID NO: 7509 - protein, 17 aa, Artificial Sequence
  Synthetic polypeptide
SQHFGRPRQVDHLRTCW

SEQ ID NO: 7510 - protein, 17 aa, Artificial Sequence
  Synthetic polypeptide
SPFSTERAGLSLPQWQM

SEQ ID NO: 7511 - protein, 17 aa, Artificial Sequence
  Synthetic polypeptide
SPFSTERAGLSLPQWQM

SEQ ID NO: 7512 - protein, 17 aa, Artificial Sequence
  Synthetic polypeptide
SPFSTERAGLSLPQWQM

SEQ ID NO: 7513 - protein, 17 aa, Artificial Sequence
  Synthetic polypeptide
SPFSTERAGLSLPQWQM

SEQ ID NO: 7514 - protein, 17 aa, Artificial Sequence
  Synthetic polypeptide
SPFSTERAGLSLPQWQM

SEQ ID NO: 7515 - protein, 17 aa, Artificial Sequence
  Synthetic polypeptide
DPAIPLLGNASRLHTFT

SEQ ID NO: 7516 - protein, 17 aa, Artificial Sequence
  Synthetic polypeptide
DPAIPLLGNASRLHTFT

SEQ ID NO: 7517 - protein, 17 aa, Artificial Sequence
  Synthetic polypeptide
YSLVMHAQLPVSHANTR

SEQ ID NO: 7518 - protein, 17 aa, Artificial Sequence
  Synthetic polypeptide
YSLVMHAQLPVSHANTR

SEQ ID NO: 7519 - protein, 17 aa, Artificial Sequence
  Synthetic polypeptide
YSLVMHAQLPVSHANTR

SEQ ID NO: 7520 - protein, 17 aa, Artificial Sequence
  Synthetic polypeptide
YSLVMHAQLPVSHANTR

SEQ ID NO: 7521 - protein, 17 aa, Artificial Sequence
  Synthetic polypeptide
YSLVMHAQLPVSHANTR

SEQ ID NO: 7522 - protein, 17 aa, Artificial Sequence
  Synthetic polypeptide
YSLVMHAQLPVSHANTR

SEQ ID NO: 7523 - protein, 17 aa, Artificial Sequence
  Synthetic polypeptide
YSLVMHAQLPVSHANTR

SEQ ID NO: 7524 - protein, 17 aa, Artificial Sequence
  Synthetic polypeptide
YSLVMHAQLPVSHANTR

SEQ ID NO: 7525 - protein, 17 aa, Artificial Sequence
  Synthetic polypeptide
YSLVMHAQLPVSHANTR

SEQ ID NO: 7526 - protein, 17 aa, Artificial Sequence
  Synthetic polypeptide
YSLVMHAQLPVSHANTR

SEQ ID NO: 7527 - protein, 17 aa, Artificial Sequence
  Synthetic polypeptide
YSLVMHAQLPVSHANTR

SEQ ID NO: 7528 - protein, 17 aa, Artificial Sequence
  Synthetic polypeptide
YSLVMHAQLPVSHANTR

SEQ ID NO: 7529 - protein, 17 aa, Artificial Sequence
  Synthetic polypeptide
GRVCLSDTFTSAVPSKS

SEQ ID NO: 7530 - protein, 17 aa, Artificial Sequence
  Synthetic polypeptide
GRVCLSDTFTSAVPSKS

SEQ ID NO: 7531 - protein, 17 aa, Artificial Sequence
  Synthetic polypeptide
GRVCLSDTFTSAVPSKS

SEQ ID NO: 7532 - protein, 17 aa, Artificial Sequence
  Synthetic polypeptide
GRVCLSDTFTSAVPSKS

SEQ ID NO: 7533 - protein, 17 aa, Artificial Sequence
  Synthetic polypeptide
GRVCLSDTFTSAVPSKS

SEQ ID NO: 7534 - protein, 17 aa, Artificial Sequence
  Synthetic polypeptide
GRVCLSDTFTSAVPSKS

SEQ ID NO: 7535 - protein, 17 aa, Artificial Sequence
  Synthetic polypeptide
SQRSGRPRQVDHLRAPL

SEQ ID NO: 7536 - protein, 17 aa, Artificial Sequence
  Synthetic polypeptide
SQRSGRPRQVDHLRAPL

SEQ ID NO: 7537 - protein, 17 aa, Artificial Sequence
  Synthetic polypeptide
EHLDTGHRTACLTSSSG

SEQ ID NO: 7538 - protein, 17 aa, Artificial Sequence
  Synthetic polypeptide
EHLDTGHRTACLTSSSG

SEQ ID NO: 7539 - protein, 17 aa, Artificial Sequence
  Synthetic polypeptide
EHLDTGHRTACLTSSSG

SEQ ID NO: 7540 - protein, 17 aa, Artificial Sequence
  Synthetic polypeptide
EHLDTGHRTACLTSSSG

SEQ ID NO: 7541 - protein, 17 aa, Artificial Sequence
  Synthetic polypeptide
EHLDTGHRTACLTSSSG

SEQ ID NO: 7542 - protein, 17 aa, Artificial Sequence
  Synthetic polypeptide
PGLLQRENSNPDYYGLI

SEQ ID NO: 7543 - protein, 17 aa, Artificial Sequence
  Synthetic polypeptide
PGLLQRENSNPDYYGLI

SEQ ID NO: 7544 - protein, 17 aa, Artificial Sequence
  Synthetic polypeptide
PGLLQRENSNPDYYGLI

SEQ ID NO: 7545 - protein, 17 aa, Artificial Sequence
  Synthetic polypeptide
PGLLQRENSNPDYYGLI

SEQ ID NO: 7546 - protein, 17 aa, Artificial Sequence
  Synthetic polypeptide
PGLLQRENSNPDYYGLI

SEQ ID NO: 7547 - protein, 17 aa, Artificial Sequence
  Synthetic polypeptide
VRLTNHCSGQTSVEAGF

SEQ ID NO: 7548 - protein, 17 aa, Artificial Sequence
  Synthetic polypeptide
AHFVSPRHMLGLGCLRD

SEQ ID NO: 7549 - protein, 17 aa, Artificial Sequence
  Synthetic polypeptide
AHFVSPRHMLGLGCLRD

SEQ ID NO: 7550 - protein, 17 aa, Artificial Sequence
  Synthetic polypeptide
CIKKCLHQLMLQLNPIT

SEQ ID NO: 7551 - protein, 17 aa, Artificial Sequence
  Synthetic polypeptide
CIKKCLHQLMLQLNPIT

SEQ ID NO: 7552 - protein, 17 aa, Artificial Sequence
  Synthetic polypeptide
CIKKCLHQLMLQLNPIT

SEQ ID NO: 7553 - protein, 17 aa, Artificial Sequence
  Synthetic polypeptide
CIKKCLHQLMLQLNPIT

SEQ ID NO: 7554 - protein, 17 aa, Artificial Sequence
  Synthetic polypeptide
CIKKCLHQLMLQLNPIT

SEQ ID NO: 7555 - protein, 17 aa, Artificial Sequence
  Synthetic polypeptide
DEENQDNERRCLQRMCL

SEQ ID NO: 7556 - protein, 17 aa, Artificial Sequence
  Synthetic polypeptide
DEENQDNERRCLQRMCL

SEQ ID NO: 7557 - protein, 17 aa, Artificial Sequence
  Synthetic polypeptide
DEENQDNERRCLQRMCL

SEQ ID NO: 7558 - protein, 17 aa, Artificial Sequence
  Synthetic polypeptide
DEENQDNERRCLQRMCL

SEQ ID NO: 7559 - protein, 17 aa, Artificial Sequence
  Synthetic polypeptide
GEKKKSYAEVAKTYGVH

SEQ ID NO: 7560 - protein, 17 aa, Artificial Sequence
  Synthetic polypeptide
KEQPLVDKYPSSLTLRS

SEQ ID NO: 7561 - protein, 17 aa, Artificial Sequence
  Synthetic polypeptide
KEQPLVDKYPSSLTLRS

SEQ ID NO: 7562 - protein, 17 aa, Artificial Sequence
  Synthetic polypeptide
ESVDSWFKSWLCTQGKL

SEQ ID NO: 7563 - protein, 17 aa, Artificial Sequence
  Synthetic polypeptide
ESVDSWFKSWLCTQGKL

SEQ ID NO: 7564 - protein, 17 aa, Artificial Sequence
  Synthetic polypeptide
GKLAGIHGLPWARASSV

SEQ ID NO: 7565 - protein, 17 aa, Artificial Sequence
  Synthetic polypeptide
GKLAGIHGLPWARASSV

SEQ ID NO: 7566 - protein, 17 aa, Artificial Sequence
  Synthetic polypeptide
GKLAGIHGLPWARASSV

SEQ ID NO: 7567 - protein, 17 aa, Artificial Sequence
  Synthetic polypeptide
VKSGVGDVLCTDPELPD

SEQ ID NO: 7568 - protein, 17 aa, Artificial Sequence
  Synthetic polypeptide
VKSGVGDVLCTDPELPD

SEQ ID NO: 7569 - protein, 17 aa, Artificial Sequence
  Synthetic polypeptide
SSTLGGRAPGPWWIWSP

SEQ ID NO: 7570 - protein, 17 aa, Artificial Sequence
  Synthetic polypeptide
SSTLGGRAPGPWWIWSP

SEQ ID NO: 7571 - protein, 17 aa, Artificial Sequence
  Synthetic polypeptide
SQHLERPMQEDHLQPVF

SEQ ID NO: 7572 - protein, 17 aa, Artificial Sequence
  Synthetic polypeptide
SQHLERPMQEDHLQPVF

SEQ ID NO: 7573 - protein, 17 aa, Artificial Sequence
  Synthetic polypeptide
SQHLERPMQEDHLQPVF

SEQ ID NO: 7574 - protein, 17 aa, Artificial Sequence
  Synthetic polypeptide
SQHLERPMQEDHLQPVF

SEQ ID NO: 7575 - protein, 17 aa, Artificial Sequence
  Synthetic polypeptide
SQHLERPMQEDHLQPVF

SEQ ID NO: 7576 - protein, 17 aa, Artificial Sequence
  Synthetic polypeptide
SQHLERPMQEDHLQPVF

SEQ ID NO: 7577 - protein, 17 aa, Artificial Sequence
  Synthetic polypeptide
SQHLERPMQEDHLQPVF

SEQ ID NO: 7578 - protein, 17 aa, Artificial Sequence
  Synthetic polypeptide
SQHLERPMQEDHLQPVF

SEQ ID NO: 7579 - protein, 17 aa, Artificial Sequence
  Synthetic polypeptide
CGKALRLAQREVNQLNF

SEQ ID NO: 7580 - protein, 17 aa, Artificial Sequence
  Synthetic polypeptide
CGKALRLAQREVNQLNF

SEQ ID NO: 7581 - protein, 17 aa, Artificial Sequence
  Synthetic polypeptide
CGKALRLAQREVNQLNF

SEQ ID NO: 7582 - protein, 17 aa, Artificial Sequence
  Synthetic polypeptide
HLSFQDGCKEHRASGPQ

SEQ ID NO: 7583 - protein, 17 aa, Artificial Sequence
  Synthetic polypeptide
HLSFQDGCKEHRASGPQ

SEQ ID NO: 7584 - protein, 17 aa, Artificial Sequence
  Synthetic polypeptide
HLSFQDGCKEHRASGPQ

SEQ ID NO: 7585 - protein, 17 aa, Artificial Sequence
  Synthetic polypeptide
HLSFQDGCKEHRASGPQ

SEQ ID NO: 7586 - protein, 17 aa, Artificial Sequence
  Synthetic polypeptide
HLSFQDGCKEHRASGPQ

SEQ ID NO: 7587 - protein, 17 aa, Artificial Sequence
  Synthetic polypeptide
LKIATWTSNDCHQKETT

SEQ ID NO: 7588 - protein, 17 aa, Artificial Sequence
  Synthetic polypeptide
LKIATWTSNDCHQKETT

SEQ ID NO: 7589 - protein, 17 aa, Artificial Sequence
  Synthetic polypeptide
LKIATWTSNDCHQKETT

SEQ ID NO: 7590 - protein, 17 aa, Artificial Sequence
  Synthetic polypeptide
VREERGRRERERGGAIS

SEQ ID NO: 7591 - protein, 17 aa, Artificial Sequence
  Synthetic polypeptide
VREERGRRERERGGAIS

SEQ ID NO: 7592 - protein, 17 aa, Artificial Sequence
  Synthetic polypeptide
VREERGRRERERGGAIS

SEQ ID NO: 7593 - protein, 17 aa, Artificial Sequence
  Synthetic polypeptide
VREERGRRERERGGAIS

SEQ ID NO: 7594 - protein, 17 aa, Artificial Sequence
  Synthetic polypeptide
AKIVPLHSSLGDSWQMT

SEQ ID NO: 7595 - protein, 17 aa, Artificial Sequence
  Synthetic polypeptide
AKIVPLHSSLGDSWQMT

SEQ ID NO: 7596 - protein, 17 aa, Artificial Sequence
  Synthetic polypeptide
AKIVPLHSSLGDSWQMT

SEQ ID NO: 7597 - protein, 17 aa, Artificial Sequence
  Synthetic polypeptide
AKIVPLHSSLGDSWQMT

SEQ ID NO: 7598 - protein, 17 aa, Artificial Sequence
  Synthetic polypeptide
AKIVPLHSSLGDSWQMT

SEQ ID NO: 7599 - protein, 17 aa, Artificial Sequence
  Synthetic polypeptide
VYLLLGHVPPAVPVQCQ

SEQ ID NO: 7600 - protein, 17 aa, Artificial Sequence
  Synthetic polypeptide
VYLLLGHVPPAVPVQCQ

SEQ ID NO: 7601 - protein, 17 aa, Artificial Sequence
  Synthetic polypeptide
VYLLLGHVPPAVPVQCQ

SEQ ID NO: 7602 - protein, 17 aa, Artificial Sequence
  Synthetic polypeptide
RLKYREDLNSGNTVFNC

SEQ ID NO: 7603 - protein, 17 aa, Artificial Sequence
  Synthetic polypeptide
RLKYREDLNSGNTVFNC

SEQ ID NO: 7604 - protein, 17 aa, Artificial Sequence
  Synthetic polypeptide
RLKYREDLNSGNTVFNC

SEQ ID NO: 7605 - protein, 16 aa, Artificial Sequence
  Synthetic polypeptide
RRSWGLGTATTGSFKL

SEQ ID NO: 7606 - protein, 16 aa, Artificial Sequence
  Synthetic polypeptide
RRSWGLGTATTGSFKL

SEQ ID NO: 7607 - protein, 16 aa, Artificial Sequence
  Synthetic polypeptide
RRSWGLGTATTGSFKL

SEQ ID NO: 7608 - protein, 16 aa, Artificial Sequence
  Synthetic polypeptide
ACGRHEGAQSIKWLVF

SEQ ID NO: 7609 - protein, 16 aa, Artificial Sequence
  Synthetic polypeptide
ACGRHEGAQSIKWLVF

SEQ ID NO: 7610 - protein, 16 aa, Artificial Sequence
  Synthetic polypeptide
ACGRHEGAQSIKWLVF

SEQ ID NO: 7611 - protein, 16 aa, Artificial Sequence
  Synthetic polypeptide
ACGRHEGAQSIKWLVF

SEQ ID NO: 7612 - protein, 16 aa, Artificial Sequence
  Synthetic polypeptide
KSAGLEAEPCCRQCEP

SEQ ID NO: 7613 - protein, 16 aa, Artificial Sequence
  Synthetic polypeptide
KSAGLEAEPCCRQCEP

SEQ ID NO: 7614 - protein, 16 aa, Artificial Sequence
  Synthetic polypeptide
KSAGLEAEPCCRQCEP

SEQ ID NO: 7615 - protein, 16 aa, Artificial Sequence
  Synthetic polypeptide
FLKDCIGDHVPRTPKS

SEQ ID NO: 7616 - protein, 16 aa, Artificial Sequence
  Synthetic polypeptide
GQEFETNLANMCMADS

SEQ ID NO: 7617 - protein, 16 aa, Artificial Sequence
  Synthetic polypeptide
GQEFETNLANMCMADS

SEQ ID NO: 7618 - protein, 16 aa, Artificial Sequence
  Synthetic polypeptide
EVRSPSARQPPRLRMP

SEQ ID NO: 7619 - protein, 16 aa, Artificial Sequence
  Synthetic polypeptide
EVRSPSARQPPRLRMP

SEQ ID NO: 7620 - protein, 16 aa, Artificial Sequence
  Synthetic polypeptide
EVRSPSARQPPRLRMP

SEQ ID NO: 7621 - protein, 16 aa, Artificial Sequence
  Synthetic polypeptide
EVRSPSARQPPRLRMP

SEQ ID NO: 7622 - protein, 16 aa, Artificial Sequence
  Synthetic polypeptide
ETRPHSRRPGAQAQCH

SEQ ID NO: 7623 - protein, 16 aa, Artificial Sequence
  Synthetic polypeptide
ETRPHSRRPGAQAQCH

SEQ ID NO: 7624 - protein, 16 aa, Artificial Sequence
  Synthetic polypeptide
ETRPHSRRPGAQAQCH

SEQ ID NO: 7625 - protein, 16 aa, Artificial Sequence
  Synthetic polypeptide
ETRPHSRRPGAQAQCH

SEQ ID NO: 7626 - protein, 16 aa, Artificial Sequence
  Synthetic polypeptide
ISTRPSRFLGRYICQV

SEQ ID NO: 7627 - protein, 16 aa, Artificial Sequence
  Synthetic polypeptide
ISTRPSRFLGRYICQV

SEQ ID NO: 7628 - protein, 16 aa, Artificial Sequence
  Synthetic polypeptide
ISTRPSRFLGRYICQV

SEQ ID NO: 7629 - protein, 16 aa, Artificial Sequence
  Synthetic polypeptide
GQEFETSLANMERRSL

SEQ ID NO: 7630 - protein, 16 aa, Artificial Sequence
  Synthetic polypeptide
HPTHSVHPSRLTQRDL

SEQ ID NO: 7631 - protein, 16 aa, Artificial Sequence
  Synthetic polypeptide
WPIVGLHPVILMVWEI

SEQ ID NO: 7632 - protein, 16 aa, Artificial Sequence
  Synthetic polypeptide
KGSHLHWHWHRFLWQQ

SEQ ID NO: 7633 - protein, 16 aa, Artificial Sequence
  Synthetic polypeptide
KGSHLHWHWHRFLWQQ

SEQ ID NO: 7634 - protein, 16 aa, Artificial Sequence
  Synthetic polypeptide
KGSHLHWHWHRFLWQQ

SEQ ID NO: 7635 - protein, 16 aa, Artificial Sequence
  Synthetic polypeptide
KGSHLHWHWHRFLWQQ

SEQ ID NO: 7636 - protein, 16 aa, Artificial Sequence
  Synthetic polypeptide
KGSHLHWHWHRFLWQQ

SEQ ID NO: 7637 - protein, 16 aa, Artificial Sequence
  Synthetic polypeptide
KGSHLHWHWHRFLWQQ

SEQ ID NO: 7638 - protein, 16 aa, Artificial Sequence
  Synthetic polypeptide
LFEGSSLPCCCALTSA

SEQ ID NO: 7639 - protein, 16 aa, Artificial Sequence
  Synthetic polypeptide
LFEGSSLPCCCALTSA

SEQ ID NO: 7640 - protein, 16 aa, Artificial Sequence
  Synthetic polypeptide
LFEGSSLPCCCALTSA

SEQ ID NO: 7641 - protein, 16 aa, Artificial Sequence
  Synthetic polypeptide
LFEGSSLPCCCALTSA

SEQ ID NO: 7642 - protein, 16 aa, Artificial Sequence
  Synthetic polypeptide
LFEGSSLPCCCALTSA

SEQ ID NO: 7643 - protein, 16 aa, Artificial Sequence
  Synthetic polypeptide
DVRWRESFPVCIGSRG

SEQ ID NO: 7644 - protein, 16 aa, Artificial Sequence
  Synthetic polypeptide
TAALTGGLWNSELQLN

SEQ ID NO: 7645 - protein, 16 aa, Artificial Sequence
  Synthetic polypeptide
TAALTGGLWNSELQLN

SEQ ID NO: 7646 - protein, 16 aa, Artificial Sequence
  Synthetic polypeptide
TAALTGGLWNSELQLN

SEQ ID NO: 7647 - protein, 16 aa, Artificial Sequence
  Synthetic polypeptide
TAALTGGLWNSELQLN

SEQ ID NO: 7648 - protein, 16 aa, Artificial Sequence
  Synthetic polypeptide
EVRRPSAWQPPRLRMP

SEQ ID NO: 7649 - protein, 16 aa, Artificial Sequence
  Synthetic polypeptide
EVRRPSAWQPPRLRMP

SEQ ID NO: 7650 - protein, 16 aa, Artificial Sequence
  Synthetic polypeptide
EVRRPSAWQPPRLRMP

SEQ ID NO: 7651 - protein, 16 aa, Artificial Sequence
  Synthetic polypeptide
EVRRPSAWQPPRLRMP

SEQ ID NO: 7652 - protein, 16 aa, Artificial Sequence
  Synthetic polypeptide
HGSYSTPRMKRLWAAK

SEQ ID NO: 7653 - protein, 16 aa, Artificial Sequence
  Synthetic polypeptide
HGSYSTPRMKRLWAAK

SEQ ID NO: 7654 - protein, 16 aa, Artificial Sequence
  Synthetic polypeptide
MDHTTWLPMLAPPLAG

SEQ ID NO: 7655 - protein, 16 aa, Artificial Sequence
  Synthetic polypeptide
GQEFKTSQHNMVPRIG

SEQ ID NO: 7656 - protein, 16 aa, Artificial Sequence
  Synthetic polypeptide
GQEFKTSQHNMVPRIG

SEQ ID NO: 7657 - protein, 16 aa, Artificial Sequence
  Synthetic polypeptide
GQEFKTSQHNMVPRIG

SEQ ID NO: 7658 - protein, 16 aa, Artificial Sequence
  Synthetic polypeptide
SLTLIQVFLFYAQGGL

SEQ ID NO: 7659 - protein, 16 aa, Artificial Sequence
  Synthetic polypeptide
SKSFCFMHRVVYKILQ

SEQ ID NO: 7660 - protein, 16 aa, Artificial Sequence
  Synthetic polypeptide
SLTLIQVFLFYAQGGL

SEQ ID NO: 7661 - protein, 16 aa, Artificial Sequence
  Synthetic polypeptide
SKSFCFMHRVVYKILQ

SEQ ID NO: 7662 - protein, 16 aa, Artificial Sequence
  Synthetic polypeptide
SLTLIQVFLFYAQGGL

SEQ ID NO: 7663 - protein, 16 aa, Artificial Sequence
  Synthetic polypeptide
SKSFCFMHRVVYKILQ

SEQ ID NO: 7664 - protein, 16 aa, Artificial Sequence
  Synthetic polypeptide
SLTLIQVFLFYAQGGL

SEQ ID NO: 7665 - protein, 16 aa, Artificial Sequence
  Synthetic polypeptide
SKSFCFMHRVVYKILQ

SEQ ID NO: 7666 - protein, 16 aa, Artificial Sequence
  Synthetic polypeptide
SLTLIQVFLFYAQGGL

SEQ ID NO: 7667 - protein, 16 aa, Artificial Sequence
  Synthetic polypeptide
SKSFCFMHRVVYKILQ

SEQ ID NO: 7668 - protein, 15 aa, Artificial Sequence
  Synthetic polypeptide
ENQMRIMLGTNGLPF

SEQ ID NO: 7669 - protein, 15 aa, Artificial Sequence
  Synthetic polypeptide
ENQMRIMLGTNGLPF

SEQ ID NO: 7670 - protein, 15 aa, Artificial Sequence
  Synthetic polypeptide
QDPTSKKSIPKSSIC

SEQ ID NO: 7671 - protein, 15 aa, Artificial Sequence
  Synthetic polypeptide
QDPTSKKSIPKSSIC

SEQ ID NO: 7672 - protein, 15 aa, Artificial Sequence
  Synthetic polypeptide
QDPTSKKSIPKSSIC

SEQ ID NO: 7673 - protein, 15 aa, Artificial Sequence
  Synthetic polypeptide
QDPTSKKSIPKSSIC

SEQ ID NO: 7674 - protein, 15 aa, Artificial Sequence
  Synthetic polypeptide
QDPTSKKSIPKSSIC

SEQ ID NO: 7675 - protein, 15 aa, Artificial Sequence
  Synthetic polypeptide
CWRITRHCQWTGFHP

SEQ ID NO: 7676 - protein, 15 aa, Artificial Sequence
  Synthetic polypeptide
CWRITRHCQWTGFHP

SEQ ID NO: 7677 - protein, 15 aa, Artificial Sequence
  Synthetic polypeptide
CWRITRHCQWTGFHP

SEQ ID NO: 7678 - protein, 15 aa, Artificial Sequence
  Synthetic polypeptide
CWRITRHCQWTGFHP

SEQ ID NO: 7679 - protein, 15 aa, Artificial Sequence
  Synthetic polypeptide
PRTPWERTVQTPVTP

SEQ ID NO: 7680 - protein, 15 aa, Artificial Sequence
  Synthetic polypeptide
PRTPWERTVQTPVTP

SEQ ID NO: 7681 - protein, 15 aa, Artificial Sequence
  Synthetic polypeptide
PRTPWERTVQTPVTP

SEQ ID NO: 7682 - protein, 15 aa, Artificial Sequence
  Synthetic polypeptide
PRTPWERTVQTPVTP

SEQ ID NO: 7683 - protein, 15 aa, Artificial Sequence
  Synthetic polypeptide
PRTPWERTVQTPVTP

SEQ ID NO: 7684 - protein, 15 aa, Artificial Sequence
  Synthetic polypeptide
PRTPWERTVQTPVTP

SEQ ID NO: 7685 - protein, 15 aa, Artificial Sequence
  Synthetic polypeptide
VRGSLGPKSTRSPMW

SEQ ID NO: 7686 - protein, 15 aa, Artificial Sequence
  Synthetic polypeptide
VRGSLGPKSTRSPMW

SEQ ID NO: 7687 - protein, 15 aa, Artificial Sequence
  Synthetic polypeptide
VRGSLGPKSTRSPMW

SEQ ID NO: 7688 - protein, 15 aa, Artificial Sequence
  Synthetic polypeptide
VRGSLGPKSTRSPMW

SEQ ID NO: 7689 - protein, 15 aa, Artificial Sequence
  Synthetic polypeptide
VRGSLGPKSTRSPMW

SEQ ID NO: 7690 - protein, 15 aa, Artificial Sequence
  Synthetic polypeptide
VRGSLGPKSTRSPMW

SEQ ID NO: 7691 - protein, 15 aa, Artificial Sequence
  Synthetic polypeptide
VRGSLGPKSTRSPMW

SEQ ID NO: 7692 - protein, 15 aa, Artificial Sequence
  Synthetic polypeptide
VRGSLGPKSTRSPMW

SEQ ID NO: 7693 - protein, 15 aa, Artificial Sequence
  Synthetic polypeptide
VRGSLGPKSTRSPMW

SEQ ID NO: 7694 - protein, 15 aa, Artificial Sequence
  Synthetic polypeptide
VRGSLGPKSTRSPMW

SEQ ID NO: 7695 - protein, 15 aa, Artificial Sequence
  Synthetic polypeptide
LFFYLSRMMISRLNL

SEQ ID NO: 7696 - protein, 15 aa, Artificial Sequence
  Synthetic polypeptide
GQEIETILANKKAPC

SEQ ID NO: 7697 - protein, 15 aa, Artificial Sequence
  Synthetic polypeptide
EDHLSLEEQRLCSSP

SEQ ID NO: 7698 - protein, 15 aa, Artificial Sequence
  Synthetic polypeptide
CWHPPRGHPCQLLTQ

SEQ ID NO: 7699 - protein, 15 aa, Artificial Sequence
  Synthetic polypeptide
CWHPPRGHPCQLLTQ

SEQ ID NO: 7700 - protein, 15 aa, Artificial Sequence
  Synthetic polypeptide
PFLSLNSFNSACCSW

SEQ ID NO: 7701 - protein, 15 aa, Artificial Sequence
  Synthetic polypeptide
PFLSLNSFNSACCSW

SEQ ID NO: 7702 - protein, 15 aa, Artificial Sequence
  Synthetic polypeptide
PFLSLNSFNSACCSW

SEQ ID NO: 7703 - protein, 15 aa, Artificial Sequence
  Synthetic polypeptide
PVPWWTLDDTSRERG

SEQ ID NO: 7704 - protein, 15 aa, Artificial Sequence
  Synthetic polypeptide
SSCLGTIVKWPAPQL

SEQ ID NO: 7705 - protein, 15 aa, Artificial Sequence
  Synthetic polypeptide
LHYCTPACVTDTTPC

SEQ ID NO: 7706 - protein, 15 aa, Artificial Sequence
  Synthetic polypeptide
LHYCTPACVTDTTPC

SEQ ID NO: 7707 - protein, 15 aa, Artificial Sequence
  Synthetic polypeptide
LHYCTPACVTDTTPC

SEQ ID NO: 7708 - protein, 15 aa, Artificial Sequence
  Synthetic polypeptide
LHYCTPACVTDTTPC

SEQ ID NO: 7709 - protein, 15 aa, Artificial Sequence
  Synthetic polypeptide
SSCLGTIVKWPAPQL

SEQ ID NO: 7710 - protein, 15 aa, Artificial Sequence
  Synthetic polypeptide
SSCLGTIVKWPAPQL

SEQ ID NO: 7711 - protein, 15 aa, Artificial Sequence
  Synthetic polypeptide
SSCLGTIVKWPAPQL

SEQ ID NO: 7712 - protein, 15 aa, Artificial Sequence
  Synthetic polypeptide
SSCLGTIVKWPAPQL

SEQ ID NO: 7713 - protein, 15 aa, Artificial Sequence
  Synthetic polypeptide
SSCLGTIVKWPAPQL

SEQ ID NO: 7714 - protein, 15 aa, Artificial Sequence
  Synthetic polypeptide
SSCLGTIVKWPAPQL

SEQ ID NO: 7715 - protein, 15 aa, Artificial Sequence
  Synthetic polypeptide
LCSLCTAQQYPSERA

SEQ ID NO: 7716 - protein, 15 aa, Artificial Sequence
  Synthetic polypeptide
DLLSHAELGTDHSRT

SEQ ID NO: 7717 - protein, 15 aa, Artificial Sequence
  Synthetic polypeptide
DLLSHAELGTDHSRT

SEQ ID NO: 7718 - protein, 15 aa, Artificial Sequence
  Synthetic polypeptide
DLLSHAELGTDHSRT

SEQ ID NO: 7719 - protein, 15 aa, Artificial Sequence
  Synthetic polypeptide
DLLSHAELGTDHSRT

SEQ ID NO: 7720 - protein, 15 aa, Artificial Sequence
  Synthetic polypeptide
DLLSHAELGTDHSRT

SEQ ID NO: 7721 - protein, 15 aa, Artificial Sequence
  Synthetic polypeptide
FYVMLFTDANQFSER

SEQ ID NO: 7722 - protein, 15 aa, Artificial Sequence
  Synthetic polypeptide
FYVMLFTDANQFSER

SEQ ID NO: 7723 - protein, 15 aa, Artificial Sequence
  Synthetic polypeptide
FYVMLFTDANQFSER

SEQ ID NO: 7724 - protein, 15 aa, Artificial Sequence
  Synthetic polypeptide
FYVMLFTDANQFSER

SEQ ID NO: 7725 - protein, 15 aa, Artificial Sequence
  Synthetic polypeptide
FYVMLFTDANQFSER

SEQ ID NO: 7726 - protein, 15 aa, Artificial Sequence
  Synthetic polypeptide
FYVMLFTDANQFSER

SEQ ID NO: 7727 - protein, 15 aa, Artificial Sequence
  Synthetic polypeptide
SSCLGTIVKWPAPQL

SEQ ID NO: 7728 - protein, 15 aa, Artificial Sequence
  Synthetic polypeptide
VRLGEEARQWALLGI

SEQ ID NO: 7729 - protein, 15 aa, Artificial Sequence
  Synthetic polypeptide
VRLGEEARQWALLGI

SEQ ID NO: 7730 - protein, 15 aa, Artificial Sequence
  Synthetic polypeptide
VRLGEEARQWALLGI

SEQ ID NO: 7731 - protein, 15 aa, Artificial Sequence
  Synthetic polypeptide
VRLGEEARQWALLGI

SEQ ID NO: 7732 - protein, 15 aa, Artificial Sequence
  Synthetic polypeptide
VRLGEEARQWALLGI

SEQ ID NO: 7733 - protein, 15 aa, Artificial Sequence
  Synthetic polypeptide
SQLLWRLRSRVARGC

SEQ ID NO: 7734 - protein, 15 aa, Artificial Sequence
  Synthetic polypeptide
CVVKHFALPKERSIS

SEQ ID NO: 7735 - protein, 15 aa, Artificial Sequence
  Synthetic polypeptide
CVVKHFALPKERSIS

SEQ ID NO: 7736 - protein, 15 aa, Artificial Sequence
  Synthetic polypeptide
CVVKHFALPKERSIS

SEQ ID NO: 7737 - protein, 15 aa, Artificial Sequence
  Synthetic polypeptide
GASPPGSHLVREGVP

SEQ ID NO: 7738 - protein, 15 aa, Artificial Sequence
  Synthetic polypeptide
GASPPGSHLVREGVP

SEQ ID NO: 7739 - protein, 15 aa, Artificial Sequence
  Synthetic polypeptide
GASPPGSHLVREGVP

SEQ ID NO: 7740 - protein, 15 aa, Artificial Sequence
  Synthetic polypeptide
GASPPGSHLVREGVP

SEQ ID NO: 7741 - protein, 15 aa, Artificial Sequence
  Synthetic polypeptide
SGTSQPPEPVSMAEF

SEQ ID NO: 7742 - protein, 15 aa, Artificial Sequence
  Synthetic polypeptide
SGTSQPPEPVSMAEF

SEQ ID NO: 7743 - protein, 15 aa, Artificial Sequence
  Synthetic polypeptide
NSSWIVTKNSHLDVK

SEQ ID NO: 7744 - protein, 15 aa, Artificial Sequence
  Synthetic polypeptide
NSSWIVTKNSHLDVK

SEQ ID NO: 7745 - protein, 15 aa, Artificial Sequence
  Synthetic polypeptide
NSSWIVTKNSHLDVK

SEQ ID NO: 7746 - protein, 15 aa, Artificial Sequence
  Synthetic polypeptide
SKQYTIGPWMRWYSG

SEQ ID NO: 7747 - protein, 15 aa, Artificial Sequence
  Synthetic polypeptide
SKQYTIGPWMRWYSG

SEQ ID NO: 7748 - protein, 15 aa, Artificial Sequence
  Synthetic polypeptide
SKQYTIGPWMRWYSG

SEQ ID NO: 7749 - protein, 15 aa, Artificial Sequence
  Synthetic polypeptide
SKQYTIGPWMRWYSG

SEQ ID NO: 7750 - protein, 15 aa, Artificial Sequence
  Synthetic polypeptide
SKQYTIGPWMRWYSG

SEQ ID NO: 7751 - protein, 15 aa, Artificial Sequence
  Synthetic polypeptide
SKQYTIGPWMRWYSG

SEQ ID NO: 7752 - protein, 15 aa, Artificial Sequence
  Synthetic polypeptide
SKQYTIGPWMRWYSG

SEQ ID NO: 7753 - protein, 15 aa, Artificial Sequence
  Synthetic polypeptide
SKQYTIGPWMRWYSG

SEQ ID NO: 7754 - protein, 15 aa, Artificial Sequence
  Synthetic polypeptide
SKQYTIGPWMRWYSG

SEQ ID NO: 7755 - protein, 15 aa, Artificial Sequence
  Synthetic polypeptide
NRSWPIGNSDYQCSG

SEQ ID NO: 7756 - protein, 15 aa, Artificial Sequence
  Synthetic polypeptide
NRSWPIGNSDYQCSG

SEQ ID NO: 7757 - protein, 14 aa, Artificial Sequence
  Synthetic polypeptide
VILRSVMMSGTTTL

SEQ ID NO: 7758 - protein, 14 aa, Artificial Sequence
  Synthetic polypeptide
VILRSVMMSGTTTL

SEQ ID NO: 7759 - protein, 14 aa, Artificial Sequence
  Synthetic polypeptide
SQHFGWPTWVDHLS

SEQ ID NO: 7760 - protein, 14 aa, Artificial Sequence
  Synthetic polypeptide
SQHFGWPTWVDHLS

SEQ ID NO: 7761 - protein, 14 aa, Artificial Sequence
  Synthetic polypeptide
EDRLGPRVQGYSLP

SEQ ID NO: 7762 - protein, 14 aa, Artificial Sequence
  Synthetic polypeptide
EDRLGPRVQGYSLP

SEQ ID NO: 7763 - protein, 14 aa, Artificial Sequence
  Synthetic polypeptide
EDRLGPRVQGYSLP

SEQ ID NO: 7764 - protein, 14 aa, Artificial Sequence
  Synthetic polypeptide
EDRLGPRVQGYSLP

SEQ ID NO: 7765 - protein, 14 aa, Artificial Sequence
  Synthetic polypeptide
EDRLGPRVQGYSLP

SEQ ID NO: 7766 - protein, 14 aa, Artificial Sequence
  Synthetic polypeptide
EDRLGPRVQGYSLP

SEQ ID NO: 7767 - protein, 14 aa, Artificial Sequence
  Synthetic polypeptide
EDRLGPRVQGYSLP

SEQ ID NO: 7768 - protein, 14 aa, Artificial Sequence
  Synthetic polypeptide
EDRLGPRVQGYSLP

SEQ ID NO: 7769 - protein, 14 aa, Artificial Sequence
  Synthetic polypeptide
EDRLGPRVQGYSLP

SEQ ID NO: 7770 - protein, 14 aa, Artificial Sequence
  Synthetic polypeptide
AQELKTSLGNTGTP

SEQ ID NO: 7771 - protein, 14 aa, Artificial Sequence
  Synthetic polypeptide
AQELKTSLGNTGTP

SEQ ID NO: 7772 - protein, 14 aa, Artificial Sequence
  Synthetic polypeptide
AQELKTSLGNTGTP

SEQ ID NO: 7773 - protein, 14 aa, Artificial Sequence
  Synthetic polypeptide
DQPGQHVYGRLLTC

SEQ ID NO: 7774 - protein, 14 aa, Artificial Sequence
  Synthetic polypeptide
DQPGQHVYGRLLTC

SEQ ID NO: 7775 - protein, 14 aa, Artificial Sequence
  Synthetic polypeptide
SQHFGRPSFFIKLC

SEQ ID NO: 7776 - protein, 14 aa, Artificial Sequence
  Synthetic polypeptide
DGAAETTFLAASCC

SEQ ID NO: 7777 - protein, 14 aa, Artificial Sequence
  Synthetic polypeptide
FLHESSTCCSLGLV

SEQ ID NO: 7778 - protein, 14 aa, Artificial Sequence
  Synthetic polypeptide
STQHSPWNKRDGTM

SEQ ID NO: 7779 - protein, 14 aa, Artificial Sequence
  Synthetic polypeptide
STQHSPWNKRDGTM

SEQ ID NO: 7780 - protein, 14 aa, Artificial Sequence
  Synthetic polypeptide
STQHSPWNKRDGTM

SEQ ID NO: 7781 - protein, 14 aa, Artificial Sequence
  Synthetic polypeptide
TSSSRERPLPGGCA

SEQ ID NO: 7782 - protein, 14 aa, Artificial Sequence
  Synthetic polypeptide
IGDPMDSEHKQFAL

SEQ ID NO: 7783 - protein, 14 aa, Artificial Sequence
  Synthetic polypeptide
GIPSHVELKVPMVL

SEQ ID NO: 7784 - protein, 14 aa, Artificial Sequence
  Synthetic polypeptide
GIPSHVELKVPMVL

SEQ ID NO: 7785 - protein, 14 aa, Artificial Sequence
  Synthetic polypeptide
GIPSHVELKVPMVL

SEQ ID NO: 7786 - protein, 14 aa, Artificial Sequence
  Synthetic polypeptide
VRVCASLARPRRPW

SEQ ID NO: 7787 - protein, 14 aa, Artificial Sequence
  Synthetic polypeptide
VRVCASLARPRRPW

SEQ ID NO: 7788 - protein, 14 aa, Artificial Sequence
  Synthetic polypeptide
VRVCASLARPRRPW

SEQ ID NO: 7789 - protein, 14 aa, Artificial Sequence
  Synthetic polypeptide
VRVCASLARPRRPW

SEQ ID NO: 7790 - protein, 14 aa, Artificial Sequence
  Synthetic polypeptide
RKNQLAPYSCSAST

SEQ ID NO: 7791 - protein, 14 aa, Artificial Sequence
  Synthetic polypeptide
RKNQLAPYSCSAST

SEQ ID NO: 7792 - protein, 14 aa, Artificial Sequence
  Synthetic polypeptide
RKNQLAPYSCSAST

SEQ ID NO: 7793 - protein, 14 aa, Artificial Sequence
  Synthetic polypeptide
RKNQLAPYSCSAST

SEQ ID NO: 7794 - protein, 14 aa, Artificial Sequence
  Synthetic polypeptide
PEALAWESCRERIM

SEQ ID NO: 7795 - protein, 14 aa, Artificial Sequence
  Synthetic polypeptide
PEALAWESCRERIM

SEQ ID NO: 7796 - protein, 14 aa, Artificial Sequence
  Synthetic polypeptide
SCLGTIVKWPAPQL

SEQ ID NO: 7797 - protein, 14 aa, Artificial Sequence
  Synthetic polypeptide
SCLGTIVKWPAPQL

SEQ ID NO: 7798 - protein, 14 aa, Artificial Sequence
  Synthetic polypeptide
SCLGTIVKWPAPQL

SEQ ID NO: 7799 - protein, 14 aa, Artificial Sequence
  Synthetic polypeptide
SCLGTIVKWPAPQL

SEQ ID NO: 7800 - protein, 14 aa, Artificial Sequence
  Synthetic polypeptide
GLPRHVELKVPMVL

SEQ ID NO: 7801 - protein, 14 aa, Artificial Sequence
  Synthetic polypeptide
GLPRHVELKVPMVL

SEQ ID NO: 7802 - protein, 14 aa, Artificial Sequence
  Synthetic polypeptide
GLPRHVELKVPMVL

SEQ ID NO: 7803 - protein, 14 aa, Artificial Sequence
  Synthetic polypeptide
GAPLPGRDPVWEVH

SEQ ID NO: 7804 - protein, 14 aa, Artificial Sequence
  Synthetic polypeptide
GAPLPGRDPVWEVH

SEQ ID NO: 7805 - protein, 14 aa, Artificial Sequence
  Synthetic polypeptide
GAPLPGRDPVWEVH

SEQ ID NO: 7806 - protein, 14 aa, Artificial Sequence
  Synthetic polypeptide
STVWPSPWISSLNQ

SEQ ID NO: 7807 - protein, 14 aa, Artificial Sequence
  Synthetic polypeptide
AKIVPLHSSLGDST

SEQ ID NO: 7808 - protein, 14 aa, Artificial Sequence
  Synthetic polypeptide
KHNEGESQAFENSL

SEQ ID NO: 7809 - protein, 14 aa, Artificial Sequence
  Synthetic polypeptide
KHNEGESQAFENSL

SEQ ID NO: 7810 - protein, 13 aa, Artificial Sequence
  Synthetic polypeptide
SQHFWRPRQQLQL

SEQ ID NO: 7811 - protein, 13 aa, Artificial Sequence
  Synthetic polypeptide
SQHFWRPRQQLQL

SEQ ID NO: 7812 - protein, 13 aa, Artificial Sequence
  Synthetic polypeptide
SQHFWRPRQQLQL

SEQ ID NO: 7813 - protein, 13 aa, Artificial Sequence
  Synthetic polypeptide
SQHFWRPRQQLQL

SEQ ID NO: 7814 - protein, 13 aa, Artificial Sequence
  Synthetic polypeptide
SQHFWRPRQQLQL

SEQ ID NO: 7815 - protein, 13 aa, Artificial Sequence
  Synthetic polypeptide
SQHFWRPRQQLQL

SEQ ID NO: 7816 - protein, 13 aa, Artificial Sequence
  Synthetic polypeptide
KIHSEQFIANPVC

SEQ ID NO: 7817 - protein, 13 aa, Artificial Sequence
  Synthetic polypeptide
PRTPWERTVQTPV

SEQ ID NO: 7818 - protein, 13 aa, Artificial Sequence
  Synthetic polypeptide
PRKGLELGFLPWT

SEQ ID NO: 7819 - protein, 13 aa, Artificial Sequence
  Synthetic polypeptide
GSHPECSWHQRER

SEQ ID NO: 7820 - protein, 13 aa, Artificial Sequence
  Synthetic polypeptide
KKDLKILSFGKSR

SEQ ID NO: 7821 - protein, 13 aa, Artificial Sequence
  Synthetic polypeptide
KKDLKILSFGKSR

SEQ ID NO: 7822 - protein, 13 aa, Artificial Sequence
  Synthetic polypeptide
PGVVGIFRPAGHS

SEQ ID NO: 7823 - protein, 13 aa, Artificial Sequence
  Synthetic polypeptide
PGVVGIFRPAGHS

SEQ ID NO: 7824 - protein, 13 aa, Artificial Sequence
  Synthetic polypeptide
PGVVGIFRPAGHS

SEQ ID NO: 7825 - protein, 13 aa, Artificial Sequence
  Synthetic polypeptide
TLWASVSSPVKWG

SEQ ID NO: 7826 - protein, 13 aa, Artificial Sequence
  Synthetic polypeptide
TLWASVSSPVKWG

SEQ ID NO: 7827 - protein, 13 aa, Artificial Sequence
  Synthetic polypeptide
SQHFERPRQQSPC

SEQ ID NO: 7828 - protein, 13 aa, Artificial Sequence
  Synthetic polypeptide
GLPSHAELTHSWL

SEQ ID NO: 7829 - protein, 13 aa, Artificial Sequence
  Synthetic polypeptide
GLPSHAELTHSWL

SEQ ID NO: 7830 - protein, 13 aa, Artificial Sequence
  Synthetic polypeptide
GLPSHAELTHSWL

SEQ ID NO: 7831 - protein, 13 aa, Artificial Sequence
  Synthetic polypeptide
GLPSHAELTHSWL

SEQ ID NO: 7832 - protein, 13 aa, Artificial Sequence
  Synthetic polypeptide
GLPSHAELTHSWL

SEQ ID NO: 7833 - protein, 13 aa, Artificial Sequence
  Synthetic polypeptide
NTSKHVCWSHGRA

SEQ ID NO: 7834 - protein, 13 aa, Artificial Sequence
  Synthetic polypeptide
NTSKHVCWSHGRA

SEQ ID NO: 7835 - protein, 13 aa, Artificial Sequence
  Synthetic polypeptide
GQRHSHEQATDSR

SEQ ID NO: 7836 - protein, 13 aa, Artificial Sequence
  Synthetic polypeptide
GQRHSHEQATDSR

SEQ ID NO: 7837 - protein, 13 aa, Artificial Sequence
  Synthetic polypeptide
GQRHSHEQATDSR

SEQ ID NO: 7838 - protein, 13 aa, Artificial Sequence
  Synthetic polypeptide
SQEFKTSLGNIVG

SEQ ID NO: 7839 - protein, 13 aa, Artificial Sequence
  Synthetic polypeptide
SQEFKTSLGNIVG

SEQ ID NO: 7840 - protein, 13 aa, Artificial Sequence
  Synthetic polypeptide
SQEFKTSLGNIVG

SEQ ID NO: 7841 - protein, 13 aa, Artificial Sequence
  Synthetic polypeptide
SQEFKTSLGNIVG

SEQ ID NO: 7842 - protein, 13 aa, Artificial Sequence
  Synthetic polypeptide
SQEFKTSLGNIVG

SEQ ID NO: 7843 - protein, 13 aa, Artificial Sequence
  Synthetic polypeptide
SQEFKTSLGNIVG

SEQ ID NO: 7844 - protein, 13 aa, Artificial Sequence
  Synthetic polypeptide
SQEFKTSLGNIVG

SEQ ID NO: 7845 - protein, 13 aa, Artificial Sequence
  Synthetic polypeptide
SGGLSGISPKRSE

SEQ ID NO: 7846 - protein, 13 aa, Artificial Sequence
  Synthetic polypeptide
SGGLSGISPKRSE

SEQ ID NO: 7847 - protein, 13 aa, Artificial Sequence
  Synthetic polypeptide
KLAGHGDSRRVTH

SEQ ID NO: 7848 - protein, 13 aa, Artificial Sequence
  Synthetic polypeptide
KLAGHGDSRRVTH

SEQ ID NO: 7849 - protein, 13 aa, Artificial Sequence
  Synthetic polypeptide
KLAGHGDSRRVTH

SEQ ID NO: 7850 - protein, 13 aa, Artificial Sequence
  Synthetic polypeptide
KLAGHGDSRRVTH

SEQ ID NO: 7851 - protein, 13 aa, Artificial Sequence
  Synthetic polypeptide
PKGVTSHWVTLVQ

SEQ ID NO: 7852 - protein, 13 aa, Artificial Sequence
  Synthetic polypeptide
PKGVTSHWVTLVQ

SEQ ID NO: 7853 - protein, 13 aa, Artificial Sequence
  Synthetic polypeptide
PKGVTSHWVTLVQ

SEQ ID NO: 7854 - protein, 13 aa, Artificial Sequence
  Synthetic polypeptide
MLLGLLAKIKCFL

SEQ ID NO: 7855 - protein, 13 aa, Artificial Sequence
  Synthetic polypeptide
HPLQAARGNLEPW

SEQ ID NO: 7856 - protein, 13 aa, Artificial Sequence
  Synthetic polypeptide
HPLQAARGNLEPW

SEQ ID NO: 7857 - protein, 13 aa, Artificial Sequence
  Synthetic polypeptide
HPLQAARGNLEPW

SEQ ID NO: 7858 - protein, 13 aa, Artificial Sequence
  Synthetic polypeptide
PFRASVSSSIKQA

SEQ ID NO: 7859 - protein, 13 aa, Artificial Sequence
  Synthetic polypeptide
PFRASVSSSIKQA

SEQ ID NO: 7860 - protein, 13 aa, Artificial Sequence
  Synthetic polypeptide
DILYINAPASQGL

SEQ ID NO: 7861 - protein, 13 aa, Artificial Sequence
  Synthetic polypeptide
LLASFRARYLAPM

SEQ ID NO: 7862 - protein, 13 aa, Artificial Sequence
  Synthetic polypeptide
LLASFRARYLAPM

SEQ ID NO: 7863 - protein, 13 aa, Artificial Sequence
  Synthetic polypeptide
LLASFRARYLAPM

SEQ ID NO: 7864 - protein, 13 aa, Artificial Sequence
  Synthetic polypeptide
LLASFRARYLAPM

SEQ ID NO: 7865 - protein, 13 aa, Artificial Sequence
  Synthetic polypeptide
LLASFRARYLAPM

SEQ ID NO: 7866 - protein, 13 aa, Artificial Sequence
  Synthetic polypeptide
KCFGKHRALYKRA

SEQ ID NO: 7867 - protein, 13 aa, Artificial Sequence
  Synthetic polypeptide
KCFGKHRALYKRA

SEQ ID NO: 7868 - protein, 13 aa, Artificial Sequence
  Synthetic polypeptide
KCFGKHRALYKRA

SEQ ID NO: 7869 - protein, 13 aa, Artificial Sequence
  Synthetic polypeptide
KCFGKHRALYKRA

SEQ ID NO: 7870 - protein, 13 aa, Artificial Sequence
  Synthetic polypeptide
KCFGKHRALYKRA

SEQ ID NO: 7871 - protein, 13 aa, Artificial Sequence
  Synthetic polypeptide
EAENVSVKTTSWP

SEQ ID NO: 7872 - protein, 13 aa, Artificial Sequence
  Synthetic polypeptide
EAENVSVKTTSWP

SEQ ID NO: 7873 - protein, 13 aa, Artificial Sequence
  Synthetic polypeptide
EAENVSVKTTSWP

SEQ ID NO: 7874 - protein, 13 aa, Artificial Sequence
  Synthetic polypeptide
EAENVSVKTTSWP

SEQ ID NO: 7875 - protein, 12 aa, Artificial Sequence
  Synthetic polypeptide
LSHLLQVIMVTG

SEQ ID NO: 7876 - protein, 12 aa, Artificial Sequence
  Synthetic polypeptide
GLSGKSQRRGVL

SEQ ID NO: 7877 - protein, 12 aa, Artificial Sequence
  Synthetic polypeptide
GLSGKSQRRGVL

SEQ ID NO: 7878 - protein, 12 aa, Artificial Sequence
  Synthetic polypeptide
GLSGKSQRRGVL

SEQ ID NO: 7879 - protein, 12 aa, Artificial Sequence
  Synthetic polypeptide
GLSGKSQRRGVL

SEQ ID NO: 7880 - protein, 12 aa, Artificial Sequence
  Synthetic polypeptide
GLSGKSQRRGVL

SEQ ID NO: 7881 - protein, 12 aa, Artificial Sequence
  Synthetic polypeptide
GQEIETILANMV

SEQ ID NO: 7882 - protein, 12 aa, Artificial Sequence
  Synthetic polypeptide
GQEIETILANMV

SEQ ID NO: 7883 - protein, 12 aa, Artificial Sequence
  Synthetic polypeptide
GQEIETILANMV

SEQ ID NO: 7884 - protein, 12 aa, Artificial Sequence
  Synthetic polypeptide
VESLGDCWKGPR

SEQ ID NO: 7885 - protein, 12 aa, Artificial Sequence
  Synthetic polypeptide
VESLGDCWKGPR

SEQ ID NO: 7886 - protein, 12 aa, Artificial Sequence
  Synthetic polypeptide
EDRLGPRVQGLP

SEQ ID NO: 7887 - protein, 12 aa, Artificial Sequence
  Synthetic polypeptide
EDRLGPRVQGLP

SEQ ID NO: 7888 - protein, 12 aa, Artificial Sequence
  Synthetic polypeptide
EDRLGPRVQGLP

SEQ ID NO: 7889 - protein, 12 aa, Artificial Sequence
  Synthetic polypeptide
EDRLGPRVQGLP

SEQ ID NO: 7890 - protein, 12 aa, Artificial Sequence
  Synthetic polypeptide
EDRLGPRVQGLP

SEQ ID NO: 7891 - protein, 12 aa, Artificial Sequence
  Synthetic polypeptide
EDRLGPRVQGLP

SEQ ID NO: 7892 - protein, 12 aa, Artificial Sequence
  Synthetic polypeptide
EDRLGPRVQGLP

SEQ ID NO: 7893 - protein, 12 aa, Artificial Sequence
  Synthetic polypeptide
EDRLGPRVQGLP

SEQ ID NO: 7894 - protein, 12 aa, Artificial Sequence
  Synthetic polypeptide
EDRLGPRVQGLP

SEQ ID NO: 7895 - protein, 12 aa, Artificial Sequence
  Synthetic polypeptide
LFFGLSLPAPSW

SEQ ID NO: 7896 - protein, 12 aa, Artificial Sequence
  Synthetic polypeptide
LFFGLSLPAPSW

SEQ ID NO: 7897 - protein, 12 aa, Artificial Sequence
  Synthetic polypeptide
LFFGLSLPAPSW

SEQ ID NO: 7898 - protein, 12 aa, Artificial Sequence
  Synthetic polypeptide
LFFGLSLPAPSW

SEQ ID NO: 7899 - protein, 12 aa, Artificial Sequence
  Synthetic polypeptide
LFFGLSLPAPSW

SEQ ID NO: 7900 - protein, 12 aa, Artificial Sequence
  Synthetic polypeptide
LFFGLSLPAPSW

SEQ ID NO: 7901 - protein, 12 aa, Artificial Sequence
  Synthetic polypeptide
LFFGLSLPAPSW

SEQ ID NO: 7902 - protein, 12 aa, Artificial Sequence
  Synthetic polypeptide
LFFGLSLPAPSW

SEQ ID NO: 7903 - protein, 12 aa, Artificial Sequence
  Synthetic polypeptide
LFFGLSLPAPSW

SEQ ID NO: 7904 - protein, 12 aa, Artificial Sequence
  Synthetic polypeptide
LFFGLSLPAPSW

SEQ ID NO: 7905 - protein, 12 aa, Artificial Sequence
  Synthetic polypeptide
ILALLLPVWVSM

SEQ ID NO: 7906 - protein, 12 aa, Artificial Sequence
  Synthetic polypeptide
ILALLLPVWVSM

SEQ ID NO: 7907 - protein, 12 aa, Artificial Sequence
  Synthetic polypeptide
ILALLLPVWVSM

SEQ ID NO: 7908 - protein, 12 aa, Artificial Sequence
  Synthetic polypeptide
GQEFKTSQHNML

SEQ ID NO: 7909 - protein, 12 aa, Artificial Sequence
  Synthetic polypeptide
GQEFKTSQHNML

SEQ ID NO: 7910 - protein, 12 aa, Artificial Sequence
  Synthetic polypeptide
HFGRPRQADHKV

SEQ ID NO: 7911 - protein, 12 aa, Artificial Sequence
  Synthetic polypeptide
HFGRPRQADHKV

SEQ ID NO: 7912 - protein, 12 aa, Artificial Sequence
  Synthetic polypeptide
HFGRPRQADHKV

SEQ ID NO: 7913 - protein, 12 aa, Artificial Sequence
  Synthetic polypeptide
PSGQIRRSSVFV

SEQ ID NO: 7914 - protein, 12 aa, Artificial Sequence
  Synthetic polypeptide
PSGQIRRSSVFV

SEQ ID NO: 7915 - protein, 12 aa, Artificial Sequence
  Synthetic polypeptide
PSGQIRRSSVFV

SEQ ID NO: 7916 - protein, 12 aa, Artificial Sequence
  Synthetic polypeptide
PSGQIRRSSVFV

SEQ ID NO: 7917 - protein, 12 aa, Artificial Sequence
  Synthetic polypeptide
SQLLRRLMQENA

SEQ ID NO: 7918 - protein, 12 aa, Artificial Sequence
  Synthetic polypeptide
SQLLRRLMQENA

SEQ ID NO: 7919 - protein, 12 aa, Artificial Sequence
  Synthetic polypeptide
SQLLRRLMQENA

SEQ ID NO: 7920 - protein, 12 aa, Artificial Sequence
  Synthetic polypeptide
SQLLRRLMQENA

SEQ ID NO: 7921 - protein, 12 aa, Artificial Sequence
  Synthetic polypeptide
SQLLRRLMQENA

SEQ ID NO: 7922 - protein, 12 aa, Artificial Sequence
  Synthetic polypeptide
ILISTKDDPRIS

SEQ ID NO: 7923 - protein, 12 aa, Artificial Sequence
  Synthetic polypeptide
ILISTKDDPRIS

SEQ ID NO: 7924 - protein, 12 aa, Artificial Sequence
  Synthetic polypeptide
ILISTKDDPRIS

SEQ ID NO: 7925 - protein, 12 aa, Artificial Sequence
  Synthetic polypeptide
ILISTKDDPRIS

SEQ ID NO: 7926 - protein, 12 aa, Artificial Sequence
  Synthetic polypeptide
TSPTLMSTSQGT

SEQ ID NO: 7927 - protein, 12 aa, Artificial Sequence
  Synthetic polypeptide
TSPTLMSTSQGT

SEQ ID NO: 7928 - protein, 12 aa, Artificial Sequence
  Synthetic polypeptide
TSPTLMSTSQGT

SEQ ID NO: 7929 - protein, 12 aa, Artificial Sequence
  Synthetic polypeptide
VKKSQSQKVHPS

SEQ ID NO: 7930 - protein, 12 aa, Artificial Sequence
  Synthetic polypeptide
KKANLKRSIQAE

SEQ ID NO: 7931 - protein, 12 aa, Artificial Sequence
  Synthetic polypeptide
VKKSQSQKVHPS

SEQ ID NO: 7932 - protein, 12 aa, Artificial Sequence
  Synthetic polypeptide
KKANLKRSIQAE

SEQ ID NO: 7933 - protein, 12 aa, Artificial Sequence
  Synthetic polypeptide
SSSSKPAQSSLP

SEQ ID NO: 7934 - protein, 12 aa, Artificial Sequence
  Synthetic polypeptide
SSSSKPAQSSLP

SEQ ID NO: 7935 - protein, 12 aa, Artificial Sequence
  Synthetic polypeptide
EAEAGRSRASHG

SEQ ID NO: 7936 - protein, 12 aa, Artificial Sequence
  Synthetic polypeptide
EAEAGRSRASHG

SEQ ID NO: 7937 - protein, 12 aa, Artificial Sequence
  Synthetic polypeptide
EAEAGRSRASHG

SEQ ID NO: 7938 - protein, 12 aa, Artificial Sequence
  Synthetic polypeptide
EAEAGRSRASHG

SEQ ID NO: 7939 - protein, 12 aa, Artificial Sequence
  Synthetic polypeptide
EAEAGRSRASHG

SEQ ID NO: 7940 - protein, 12 aa, Artificial Sequence
  Synthetic polypeptide
EAEAGRSRASHG

SEQ ID NO: 7941 - protein, 12 aa, Artificial Sequence
  Synthetic polypeptide
EAEAGRSRASHG

SEQ ID NO: 7942 - protein, 12 aa, Artificial Sequence
  Synthetic polypeptide
EAEAGRSRASHG

SEQ ID NO: 7943 - protein, 12 aa, Artificial Sequence
  Synthetic polypeptide
TILTADEEFWGN

SEQ ID NO: 7944 - protein, 12 aa, Artificial Sequence
  Synthetic polypeptide
TILTADEEFWGN

SEQ ID NO: 7945 - protein, 12 aa, Artificial Sequence
  Synthetic polypeptide
ITDGRGSWLLKR

SEQ ID NO: 7946 - protein, 12 aa, Artificial Sequence
  Synthetic polypeptide
ITDGRGSWLLKR

SEQ ID NO: 7947 - protein, 12 aa, Artificial Sequence
  Synthetic polypeptide
ITDGRGSWLLKR

SEQ ID NO: 7948 - protein, 12 aa, Artificial Sequence
  Synthetic polypeptide
ITDGRGSWLLKR

SEQ ID NO: 7949 - protein, 12 aa, Artificial Sequence
  Synthetic polypeptide
ITDGRGSWLLKR

SEQ ID NO: 7950 - protein, 12 aa, Artificial Sequence
  Synthetic polypeptide
ITDGRGSWLLKR

SEQ ID NO: 7951 - protein, 11 aa, Artificial Sequence
  Synthetic polypeptide
DPTFFSLSKLP

SEQ ID NO: 7952 - protein, 11 aa, Artificial Sequence
  Synthetic polypeptide
NDDIKIKSLDE

SEQ ID NO: 7953 - protein, 11 aa, Artificial Sequence
  Synthetic polypeptide
WTLCFEQPGHQ

SEQ ID NO: 7954 - protein, 11 aa, Artificial Sequence
  Synthetic polypeptide
WTLCFEQPGHQ

SEQ ID NO: 7955 - protein, 11 aa, Artificial Sequence
  Synthetic polypeptide
WTLCFEQPGHQ

SEQ ID NO: 7956 - protein, 11 aa, Artificial Sequence
  Synthetic polypeptide
DGDEPGQHGSV

SEQ ID NO: 7957 - protein, 11 aa, Artificial Sequence
  Synthetic polypeptide
HQKETKWSQNY

SEQ ID NO: 7958 - protein, 11 aa, Artificial Sequence
  Synthetic polypeptide
HQKETKWSQNY

SEQ ID NO: 7959 - protein, 11 aa, Artificial Sequence
  Synthetic polypeptide
HQKETKWSQNY

SEQ ID NO: 7960 - protein, 11 aa, Artificial Sequence
  Synthetic polypeptide
HQKETKWSQNY

SEQ ID NO: 7961 - protein, 11 aa, Artificial Sequence
  Synthetic polypeptide
HQKETKWSQNY

SEQ ID NO: 7962 - protein, 11 aa, Artificial Sequence
  Synthetic polypeptide
FLHFHLSMLSG

SEQ ID NO: 7963 - protein, 11 aa, Artificial Sequence
  Synthetic polypeptide
FLHFHLSMLSG

SEQ ID NO: 7964 - protein, 11 aa, Artificial Sequence
  Synthetic polypeptide
FLHFHLSMLSG

SEQ ID NO: 7965 - protein, 11 aa, Artificial Sequence
  Synthetic polypeptide
FLHFHLSMLSG

SEQ ID NO: 7966 - protein, 11 aa, Artificial Sequence
  Synthetic polypeptide
SQHFGKPRNDL

SEQ ID NO: 7967 - protein, 11 aa, Artificial Sequence
  Synthetic polypeptide
SQHFGKPRNDL

SEQ ID NO: 7968 - protein, 11 aa, Artificial Sequence
  Synthetic polypeptide
SQHFGKPRNDL

SEQ ID NO: 7969 - protein, 11 aa, Artificial Sequence
  Synthetic polypeptide
SQHFGKPRNDL

SEQ ID NO: 7970 - protein, 11 aa, Artificial Sequence
  Synthetic polypeptide
GFLSPAELSQH

SEQ ID NO: 7971 - protein, 11 aa, Artificial Sequence
  Synthetic polypeptide
GFLSPAELSQH

SEQ ID NO: 7972 - protein, 11 aa, Artificial Sequence
  Synthetic polypeptide
GFLSPAELSQH

SEQ ID NO: 7973 - protein, 11 aa, Artificial Sequence
  Synthetic polypeptide
RRKALESESEF

SEQ ID NO: 7974 - protein, 11 aa, Artificial Sequence
  Synthetic polypeptide
RRKALESESEF

SEQ ID NO: 7975 - protein, 11 aa, Artificial Sequence
  Synthetic polypeptide
RRKALESESEF

SEQ ID NO: 7976 - protein, 11 aa, Artificial Sequence
  Synthetic polypeptide
RRKALESESEF

SEQ ID NO: 7977 - protein, 11 aa, Artificial Sequence
  Synthetic polypeptide
DPGSLELHRSS

SEQ ID NO: 7978 - protein, 11 aa, Artificial Sequence
  Synthetic polypeptide
DPGSLELHRSS

SEQ ID NO: 7979 - protein, 11 aa, Artificial Sequence
  Synthetic polypeptide
DPGSLELHRSS

SEQ ID NO: 7980 - protein, 11 aa, Artificial Sequence
  Synthetic polypeptide
DPGSLELHRSS

SEQ ID NO: 7981 - protein, 11 aa, Artificial Sequence
  Synthetic polypeptide
PGVTVPSGLIL

SEQ ID NO: 7982 - protein, 11 aa, Artificial Sequence
  Synthetic polypeptide
DQPGQHVLSPA

SEQ ID NO: 7983 - protein, 11 aa, Artificial Sequence
  Synthetic polypeptide
DQPGQHVLSPA

SEQ ID NO: 7984 - protein, 11 aa, Artificial Sequence
  Synthetic polypeptide
DQPGQHVLSPA

SEQ ID NO: 7985 - protein, 11 aa, Artificial Sequence
  Synthetic polypeptide
DQPGQHVLSPA

SEQ ID NO: 7986 - protein, 11 aa, Artificial Sequence
  Synthetic polypeptide
DQPGQHVLSPA

SEQ ID NO: 7987 - protein, 11 aa, Artificial Sequence
  Synthetic polypeptide
DQPGQHVLSPA

SEQ ID NO: 7988 - protein, 11 aa, Artificial Sequence
  Synthetic polypeptide
VQCGLHHGSVP

SEQ ID NO: 7989 - protein, 11 aa, Artificial Sequence
  Synthetic polypeptide
TEVSSIQLDRG

SEQ ID NO: 7990 - protein, 11 aa, Artificial Sequence
  Synthetic polypeptide
TEVSSIQLDRG

SEQ ID NO: 7991 - protein, 11 aa, Artificial Sequence
  Synthetic polypeptide
TEVSSIQLDRG

SEQ ID NO: 7992 - protein, 11 aa, Artificial Sequence
  Synthetic polypeptide
TEVSSIQLDRG

SEQ ID NO: 7993 - protein, 11 aa, Artificial Sequence
  Synthetic polypeptide
TEVSSIQLDRG

SEQ ID NO: 7994 - protein, 11 aa, Artificial Sequence
  Synthetic polypeptide
TEVSSIQLDRG

SEQ ID NO: 7995 - protein, 11 aa, Artificial Sequence
  Synthetic polypeptide
TEVSSIQLDRG

SEQ ID NO: 7996 - protein, 11 aa, Artificial Sequence
  Synthetic polypeptide
TEVSSIQLDRG

SEQ ID NO: 7997 - protein, 11 aa, Artificial Sequence
  Synthetic polypeptide
TEVSSIQLDRG

SEQ ID NO: 7998 - protein, 11 aa, Artificial Sequence
  Synthetic polypeptide
SQHFRRPRMCL

SEQ ID NO: 7999 - protein, 11 aa, Artificial Sequence
  Synthetic polypeptide
SQHFRRPRMCL

SEQ ID NO: 8000 - protein, 11 aa, Artificial Sequence
  Synthetic polypeptide
SQHFRRPRMCL

SEQ ID NO: 8001 - protein, 11 aa, Artificial Sequence
  Synthetic polypeptide
SQHFRRPRMCL

SEQ ID NO: 8002 - protein, 10 aa, Artificial Sequence
  Synthetic polypeptide
IPLWLLELEV

SEQ ID NO: 8003 - protein, 10 aa, Artificial Sequence
  Synthetic polypeptide
IPLWLLELEV

SEQ ID NO: 8004 - protein, 10 aa, Artificial Sequence
  Synthetic polypeptide
IPLWLLELEV

SEQ ID NO: 8005 - protein, 10 aa, Artificial Sequence
  Synthetic polypeptide
GNALKSAYTN

SEQ ID NO: 8006 - protein, 10 aa, Artificial Sequence
  Synthetic polypeptide
GNALKSAYTN

SEQ ID NO: 8007 - protein, 10 aa, Artificial Sequence
  Synthetic polypeptide
GNALKSAYTN

SEQ ID NO: 8008 - protein, 10 aa, Artificial Sequence
  Synthetic polypeptide
GNALKSAYTN

SEQ ID NO: 8009 - protein, 10 aa, Artificial Sequence
  Synthetic polypeptide
GNALKSAYTN

SEQ ID NO: 8010 - protein, 10 aa, Artificial Sequence
  Synthetic polypeptide
CTPWHMVNTT

SEQ ID NO: 8011 - protein, 10 aa, Artificial Sequence
  Synthetic polypeptide
DQPGQHGGSQ

SEQ ID NO: 8012 - protein, 10 aa, Artificial Sequence
  Synthetic polypeptide
DQPGQHGGSQ

SEQ ID NO: 8013 - protein, 10 aa, Artificial Sequence
  Synthetic polypeptide
CTAQGLEHSA

SEQ ID NO: 8014 - protein, 10 aa, Artificial Sequence
  Synthetic polypeptide
CTAQGLEHSA

SEQ ID NO: 8015 - protein, 10 aa, Artificial Sequence
  Synthetic polypeptide
CTAQGLEHSA

SEQ ID NO: 8016 - protein, 10 aa, Artificial Sequence
  Synthetic polypeptide
CTAQGLEHSA

SEQ ID NO: 8017 - protein, 10 aa, Artificial Sequence
  Synthetic polypeptide
SLSSSASSQP

SEQ ID NO: 8018 - protein, 10 aa, Artificial Sequence
  Synthetic polypeptide
SLSSSASSQP

SEQ ID NO: 8019 - protein, 10 aa, Artificial Sequence
  Synthetic polypeptide
SLSSSASSQP

SEQ ID NO: 8020 - protein, 10 aa, Artificial Sequence
  Synthetic polypeptide
SLSSSASSQP

SEQ ID NO: 8021 - protein, 10 aa, Artificial Sequence
  Synthetic polypeptide
SLSSSASSQP

SEQ ID NO: 8022 - protein, 10 aa, Artificial Sequence
  Synthetic polypeptide
SLSSSASSQP

SEQ ID NO: 8023 - protein, 10 aa, Artificial Sequence
  Synthetic polypeptide
LADFGTPSCN

SEQ ID NO: 8024 - protein, 10 aa, Artificial Sequence
  Synthetic polypeptide
LADFGTPSCN

SEQ ID NO: 8025 - protein, 10 aa, Artificial Sequence
  Synthetic polypeptide
LADFGTPSCN

SEQ ID NO: 8026 - protein, 10 aa, Artificial Sequence
  Synthetic polypeptide
LADFGTPSCN

SEQ ID NO: 8027 - protein, 10 aa, Artificial Sequence
  Synthetic polypeptide
LSYKRTRQAL

SEQ ID NO: 8028 - protein, 10 aa, Artificial Sequence
  Synthetic polypeptide
LSYKRTRQAL

SEQ ID NO: 8029 - protein, 10 aa, Artificial Sequence
  Synthetic polypeptide
LSYKRTRQAL

SEQ ID NO: 8030 - protein, 10 aa, Artificial Sequence
  Synthetic polypeptide
LSYKRTRQAL

SEQ ID NO: 8031 - protein, 10 aa, Artificial Sequence
  Synthetic polypeptide
LSYKRTRQAL

SEQ ID NO: 8032 - protein, 10 aa, Artificial Sequence
  Synthetic polypeptide
LSYKRTRQAL

SEQ ID NO: 8033 - protein, 10 aa, Artificial Sequence
  Synthetic polypeptide
GLFSQAEIRC

SEQ ID NO: 8034 - protein, 10 aa, Artificial Sequence
  Synthetic polypeptide
GLFSQAEIRC

SEQ ID NO: 8035 - protein, 10 aa, Artificial Sequence
  Synthetic polypeptide
KCPHSAHHNI

SEQ ID NO: 8036 - protein, 10 aa, Artificial Sequence
  Synthetic polypeptide
KCPHSAHHNI

SEQ ID NO: 8037 - protein, 10 aa, Artificial Sequence
  Synthetic polypeptide
KCPHSAHHNI

SEQ ID NO: 8038 - protein, 10 aa, Artificial Sequence
  Synthetic polypeptide
KCPHSAHHNI

SEQ ID NO: 8039 - protein, 10 aa, Artificial Sequence
  Synthetic polypeptide
KCPHSAHHNI

SEQ ID NO: 8040 - protein, 10 aa, Artificial Sequence
  Synthetic polypeptide
KCPHSAHHNI

SEQ ID NO: 8041 - protein, 10 aa, Artificial Sequence
  Synthetic polypeptide
KCPHSAHHNI

SEQ ID NO: 8042 - protein, 10 aa, Artificial Sequence
  Synthetic polypeptide
KCPHSAHHNI

SEQ ID NO: 8043 - protein, 10 aa, Artificial Sequence
  Synthetic polypeptide
ALSFLMHKIR

SEQ ID NO: 8044 - protein, 10 aa, Artificial Sequence
  Synthetic polypeptide
ALSFLMHKIR

SEQ ID NO: 8045 - protein, 10 aa, Artificial Sequence
  Synthetic polypeptide
DQPGQHGGSQ

SEQ ID NO: 8046 - protein, 10 aa, Artificial Sequence
  Synthetic polypeptide
DQPGQHGGSQ

SEQ ID NO: 8047 - protein, 10 aa, Artificial Sequence
  Synthetic polypeptide
ALAECLPRHE

SEQ ID NO: 8048 - protein, 10 aa, Artificial Sequence
  Synthetic polypeptide
ALAECLPRHE

SEQ ID NO: 8049 - protein, 10 aa, Artificial Sequence
  Synthetic polypeptide
ALAECLPRHE

SEQ ID NO: 8050 - protein, 10 aa, Artificial Sequence
  Synthetic polypeptide
ALAECLPRHE

SEQ ID NO: 8051 - protein, 10 aa, Artificial Sequence
  Synthetic polypeptide
ALAECLPRHE

SEQ ID NO: 8052 - protein, 10 aa, Artificial Sequence
  Synthetic polypeptide
ALAECLPRHE

SEQ ID NO: 8053 - protein, 9 aa, Artificial Sequence
  Synthetic polypeptide
ASFCARTKK

SEQ ID NO: 8054 - protein, 9 aa, Artificial Sequence
  Synthetic polypeptide
ASFCARTKK

SEQ ID NO: 8055 - protein, 9 aa, Artificial Sequence
  Synthetic polypeptide
LAGHHGRRQ

SEQ ID NO: 8056 - protein, 9 aa, Artificial Sequence
  Synthetic polypeptide
LAGHHGRRQ

SEQ ID NO: 8057 - protein, 9 aa, Artificial Sequence
  Synthetic polypeptide
LAGHHGRRQ

SEQ ID NO: 8058 - protein, 9 aa, Artificial Sequence
  Synthetic polypeptide
TTSTPPGRD

SEQ ID NO: 8059 - protein, 9 aa, Artificial Sequence
  Synthetic polypeptide
TTSTPPGRD

SEQ ID NO: 8060 - protein, 9 aa, Artificial Sequence
  Synthetic polypeptide
TTSTPPGRD

SEQ ID NO: 8061 - protein, 9 aa, Artificial Sequence
  Synthetic polypeptide
TTSTPPGRD

SEQ ID NO: 8062 - protein, 9 aa, Artificial Sequence
  Synthetic polypeptide
TTSTPPGRD

SEQ ID NO: 8063 - protein, 9 aa, Artificial Sequence
  Synthetic polypeptide
LIDRGSNGF

SEQ ID NO: 8064 - protein, 9 aa, Artificial Sequence
  Synthetic polypeptide
GLPSHVELH

SEQ ID NO: 8065 - protein, 9 aa, Artificial Sequence
  Synthetic polypeptide
GLPSHVELH

SEQ ID NO: 8066 - protein, 9 aa, Artificial Sequence
  Synthetic polypeptide
PTDSTLCVG

SEQ ID NO: 8067 - protein, 9 aa, Artificial Sequence
  Synthetic polypeptide
LHHLLTRSF

SEQ ID NO: 8068 - protein, 9 aa, Artificial Sequence
  Synthetic polypeptide
LHHLLTRSF

SEQ ID NO: 8069 - protein, 9 aa, Artificial Sequence
  Synthetic polypeptide
YWTSQPPEL

SEQ ID NO: 8070 - protein, 9 aa, Artificial Sequence
  Synthetic polypeptide
SWTSQPPEL

SEQ ID NO: 8071 - protein, 9 aa, Artificial Sequence
  Synthetic polypeptide
VESTANPVC

SEQ ID NO: 8072 - protein, 9 aa, Artificial Sequence
  Synthetic polypeptide
ARYGSWLEA

SEQ ID NO: 8073 - protein, 9 aa, Artificial Sequence
  Synthetic polypeptide
ARYGSWLEA

SEQ ID NO: 8074 - protein, 9 aa, Artificial Sequence
  Synthetic polypeptide
ARYGSWLEA

SEQ ID NO: 8075 - protein, 9 aa, Artificial Sequence
  Synthetic polypeptide
ARYGSWLEA

SEQ ID NO: 8076 - protein, 9 aa, Artificial Sequence
  Synthetic polypeptide
ARYGSWLEA

SEQ ID NO: 8077 - protein, 9 aa, Artificial Sequence
  Synthetic polypeptide
ARYGSWLEA

SEQ ID NO: 8078 - protein, 9 aa, Artificial Sequence
  Synthetic polypeptide
ARYGSWLEA

SEQ ID NO: 8079 - protein, 9 aa, Artificial Sequence
  Synthetic polypeptide
RKMWPAPQL

SEQ ID NO: 8080 - protein, 9 aa, Artificial Sequence
  Synthetic polypeptide
KTVWPAPQL

SEQ ID NO: 8081 - protein, 9 aa, Artificial Sequence
  Synthetic polypeptide
PSYLRWSAT

SEQ ID NO: 8082 - protein, 9 aa, Artificial Sequence
  Synthetic polypeptide
PSYLRWSAT

SEQ ID NO: 8083 - protein, 9 aa, Artificial Sequence
  Synthetic polypeptide
PSYLRWSAT

SEQ ID NO: 8084 - protein, 9 aa, Artificial Sequence
  Synthetic polypeptide
PSYLRWSAT

SEQ ID NO: 8085 - protein, 9 aa, Artificial Sequence
  Synthetic polypeptide
PSYLRWSAT

SEQ ID NO: 8086 - protein, 9 aa, Artificial Sequence
  Synthetic polypeptide
PSYLRWSAT

SEQ ID NO: 8087 - protein, 9 aa, Artificial Sequence
  Synthetic polypeptide
PSYLRWSAT

SEQ ID NO: 8088 - protein, 9 aa, Artificial Sequence
  Synthetic polypeptide
CIEQILAHR

SEQ ID NO: 8089 - protein, 9 aa, Artificial Sequence
  Synthetic polypeptide
CIEQILAHR

SEQ ID NO: 8090 - protein, 8 aa, Artificial Sequence
  Synthetic polypeptide
SQHLGRPS

SEQ ID NO: 8091 - protein, 8 aa, Artificial Sequence
  Synthetic polypeptide
SQHLGRPS

SEQ ID NO: 8092 - protein, 8 aa, Artificial Sequence
  Synthetic polypeptide
IHLSKVGF

SEQ ID NO: 8093 - protein, 8 aa, Artificial Sequence
  Synthetic polypeptide
IHLSKVGF

SEQ ID NO: 8094 - protein, 8 aa, Artificial Sequence
  Synthetic polypeptide
IHLSKVGF

SEQ ID NO: 8095 - protein, 8 aa, Artificial Sequence
  Synthetic polypeptide
IHLSKVGF

SEQ ID NO: 8096 - protein, 8 aa, Artificial Sequence
  Synthetic polypeptide
IHLSKVGF

SEQ ID NO: 8097 - protein, 8 aa, Artificial Sequence
  Synthetic polypeptide
IHLSKVGF

SEQ ID NO: 8098 - protein, 8 aa, Artificial Sequence
  Synthetic polypeptide
NDDIKIKS

SEQ ID NO: 8099 - protein, 8 aa, Artificial Sequence
  Synthetic polypeptide
LSAHPGIW

SEQ ID NO: 8100 - protein, 8 aa, Artificial Sequence
  Synthetic polypeptide
HFGRLIQH

SEQ ID NO: 8101 - protein, 8 aa, Artificial Sequence
  Synthetic polypeptide
HFGRLIQH

SEQ ID NO: 8102 - protein, 8 aa, Artificial Sequence
  Synthetic polypeptide
GLPSHVEL

SEQ ID NO: 8103 - protein, 8 aa, Artificial Sequence
  Synthetic polypeptide
GLPSHVEL

SEQ ID NO: 8104 - protein, 8 aa, Artificial Sequence
  Synthetic polypeptide
GLPSHVEL

SEQ ID NO: 8105 - protein, 8 aa, Artificial Sequence
  Synthetic polypeptide
WNLVQREE

SEQ ID NO: 8106 - protein, 8 aa, Artificial Sequence
  Synthetic polypeptide
WNLVQREE

SEQ ID NO: 8107 - protein, 8 aa, Artificial Sequence
  Synthetic polypeptide
YPASISVG

SEQ ID NO: 8108 - protein, 8 aa, Artificial Sequence
  Synthetic polypeptide
KYKIIQSL

SEQ ID NO: 8109 - protein, 8 aa, Artificial Sequence
  Synthetic polypeptide
KYKIIQSL

SEQ ID NO: 8110 - protein, 8 aa, Artificial Sequence
  Synthetic polypeptide
KYKIIQSL

SEQ ID NO: 8111 - protein, 8 aa, Artificial Sequence
  Synthetic polypeptide
SQHFGRLR

SEQ ID NO: 8112 - protein, 8 aa, Artificial Sequence
  Synthetic polypeptide
SQHFGRLR

SEQ ID NO: 8113 - protein, 8 aa, Artificial Sequence
  Synthetic polypeptide
MGLIVLQE

SEQ ID NO: 8114 - protein, 8 aa, Artificial Sequence
  Synthetic polypeptide
MGLIVLQE

SEQ ID NO: 8115 - protein, 8 aa, Artificial Sequence
  Synthetic polypeptide
QMVEGVGF

SEQ ID NO: 8116 - protein, 8 aa, Artificial Sequence
  Synthetic polypeptide
QMVEGVGF

SEQ ID NO: 8117 - protein, 8 aa, Artificial Sequence
  Synthetic polypeptide
QMVEGVGF

SEQ ID NO: 8118 - protein, 8 aa, Artificial Sequence
  Synthetic polypeptide
QMVEGVGF

SEQ ID NO: 8119 - protein, 8 aa, Artificial Sequence
  Synthetic polypeptide
QMVEGVGF

SEQ ID NO: 8120 - protein, 8 aa, Artificial Sequence
  Synthetic polypeptide
QMVEGVGF

SEQ ID NO: 8121 - protein, 8 aa, Artificial Sequence
  Synthetic polypeptide
SQHFGRPS

SEQ ID NO: 8122 - protein, 8 aa, Artificial Sequence
  Synthetic polypeptide
SQHFGRPS

SEQ ID NO: 8123 - protein, 8 aa, Artificial Sequence
  Synthetic polypeptide
SQHFGRPS

SEQ ID NO: 8124 - protein, 8 aa, Artificial Sequence
  Synthetic polypeptide
SGSQLVSL

SEQ ID NO: 8125 - protein, 8 aa, Artificial Sequence
  Synthetic polypeptide
SGSQLVSL

SEQ ID NO: 8126 - protein, 8 aa, Artificial Sequence
  Synthetic polypeptide
SGSQLVSL

SEQ ID NO: 8127 - protein, 8 aa, Artificial Sequence
  Synthetic polypeptide
SGSQLVSL

SEQ ID NO: 8128 - protein, 8 aa, Artificial Sequence
  Synthetic polypeptide
SGSQLVSL

SEQ ID NO: 8129 - protein, 8 aa, Artificial Sequence
  Synthetic polypeptide
SGSQLVSL

SEQ ID NO: 8130 - protein, 8 aa, Artificial Sequence
  Synthetic polypeptide
SGSQLVSL

SEQ ID NO: 8131 - protein, 8 aa, Artificial Sequence
  Synthetic polypeptide
SGSQLVSL

SEQ ID NO: 8132 - protein, 8 aa, Artificial Sequence
  Synthetic polypeptide
SGSQLVSL

SEQ ID NO: 8133 - protein, 8 aa, Artificial Sequence
  Synthetic polypeptide
SGSQLVSL

SEQ ID NO: 8134 - protein, 7 aa, Artificial Sequence
  Synthetic polypeptide
QRYSKLP

SEQ ID NO: 8135 - protein, 7 aa, Artificial Sequence
  Synthetic polypeptide
FGCLTVN

SEQ ID NO: 8136 - protein, 7 aa, Artificial Sequence
  Synthetic polypeptide
FGCLTVN

SEQ ID NO: 8137 - protein, 7 aa, Artificial Sequence
  Synthetic polypeptide
VPQRLYW

SEQ ID NO: 8138 - protein, 7 aa, Artificial Sequence
  Synthetic polypeptide
LPGVDSC

SEQ ID NO: 8139 - protein, 7 aa, Artificial Sequence
  Synthetic polypeptide
LPGVDSC

SEQ ID NO: 8140 - protein, 7 aa, Artificial Sequence
  Synthetic polypeptide
LPGVDSC

SEQ ID NO: 8141 - protein, 7 aa, Artificial Sequence
  Synthetic polypeptide
LPGVDSC

SEQ ID NO: 8142 - protein, 7 aa, Artificial Sequence
  Synthetic polypeptide
LPGVDSC

SEQ ID NO: 8143 - protein, 7 aa, Artificial Sequence
  Synthetic polypeptide
LPGVDSC

SEQ ID NO: 8144 - protein, 7 aa, Artificial Sequence
  Synthetic polypeptide
LPGVDSC

SEQ ID NO: 8145 - protein, 7 aa, Artificial Sequence
  Synthetic polypeptide
LPGVDSC

SEQ ID NO: 8146 - protein, 7 aa, Artificial Sequence
  Synthetic polypeptide
IPHPHRH

SEQ ID NO: 8147 - protein, 7 aa, Artificial Sequence
  Synthetic polypeptide
IPHPHRH

SEQ ID NO: 8148 - protein, 7 aa, Artificial Sequence
  Synthetic polypeptide
EGTFVKS

SEQ ID NO: 8149 - protein, 7 aa, Artificial Sequence
  Synthetic polypeptide
VRACVCV

SEQ ID NO: 8150 - protein, 7 aa, Artificial Sequence
  Synthetic polypeptide
DQLGQHG

SEQ ID NO: 8151 - protein, 7 aa, Artificial Sequence
  Synthetic polypeptide
DQLGQHG

SEQ ID NO: 8152 - protein, 7 aa, Artificial Sequence
  Synthetic polypeptide
DQLGQHG

SEQ ID NO: 8153 - protein, 7 aa, Artificial Sequence
  Synthetic polypeptide
DQLGQHG

SEQ ID NO: 8154 - protein, 7 aa, Artificial Sequence
  Synthetic polypeptide
DQLGQHG

SEQ ID NO: 8155 - protein, 7 aa, Artificial Sequence
  Synthetic polypeptide
DQLGQHG

SEQ ID NO: 8156 - protein, 7 aa, Artificial Sequence
  Synthetic polypeptide
DQLGQHG

SEQ ID NO: 8157 - protein, 6 aa, Artificial Sequence
  Synthetic polypeptide
AGQGDL

SEQ ID NO: 8158 - protein, 6 aa, Artificial Sequence
  Synthetic polypeptide
AGQGDL

SEQ ID NO: 8159 - protein, 6 aa, Artificial Sequence
  Synthetic polypeptide
AGQGDL

SEQ ID NO: 8160 - protein, 6 aa, Artificial Sequence
  Synthetic polypeptide
AGQGDL

SEQ ID NO: 8161 - protein, 6 aa, Artificial Sequence
  Synthetic polypeptide
AGQGDL

SEQ ID NO: 8162 - protein, 6 aa, Artificial Sequence
  Synthetic polypeptide
AGQGDL

SEQ ID NO: 8163 - protein, 6 aa, Artificial Sequence
  Synthetic polypeptide
AGQGDL

SEQ ID NO: 8164 - protein, 6 aa, Artificial Sequence
  Synthetic polypeptide
GQSLLS

SEQ ID NO: 8165 - protein, 6 aa, Artificial Sequence
  Synthetic polypeptide
GQSLLS

SEQ ID NO: 8166 - protein, 6 aa, Artificial Sequence
  Synthetic polypeptide
GQSLLS

SEQ ID NO: 8167 - protein, 6 aa, Artificial Sequence
  Synthetic polypeptide
GQSLLS

SEQ ID NO: 8168 - protein, 6 aa, Artificial Sequence
  Synthetic polypeptide
GQSLLS

SEQ ID NO: 8169 - protein, 6 aa, Artificial Sequence
  Synthetic polypeptide
GLGLRG

SEQ ID NO: 8170 - protein, 6 aa, Artificial Sequence
  Synthetic polypeptide
GLGLRG

SEQ ID NO: 8171 - protein, 6 aa, Artificial Sequence
  Synthetic polypeptide
GLGLRG

SEQ ID NO: 8172 - protein, 6 aa, Artificial Sequence
  Synthetic polypeptide
PGQQEM

SEQ ID NO: 8173 - protein, 6 aa, Artificial Sequence
  Synthetic polypeptide
PGQQEM

SEQ ID NO: 8174 - protein, 6 aa, Artificial Sequence
  Synthetic polypeptide
ESAWLL

SEQ ID NO: 8175 - protein, 6 aa, Artificial Sequence
  Synthetic polypeptide
ESAWLL

SEQ ID NO: 8176 - protein, 6 aa, Artificial Sequence
  Synthetic polypeptide
ESAWLL

SEQ ID NO: 8177 - protein, 6 aa, Artificial Sequence
  Synthetic polypeptide
ESAWLL

SEQ ID NO: 8178 - protein, 6 aa, Artificial Sequence
  Synthetic polypeptide
ESAWLL

SEQ ID NO: 8179 - protein, 6 aa, Artificial Sequence
  Synthetic polypeptide
ESAWLL

SEQ ID NO: 8180 - protein, 6 aa, Artificial Sequence
  Synthetic polypeptide
LERHPR

SEQ ID NO: 8181 - protein, 6 aa, Artificial Sequence
  Synthetic polypeptide
SHRSKG

SEQ ID NO: 8182 - protein, 6 aa, Artificial Sequence
  Synthetic polypeptide
IGTLIS

SEQ ID NO: 8183 - protein, 6 aa, Artificial Sequence
  Synthetic polypeptide
IGTLIS

SEQ ID NO: 8184 - protein, 6 aa, Artificial Sequence
  Synthetic polypeptide
IGTLIS

SEQ ID NO: 8185 - protein, 5 aa, Artificial Sequence
  Synthetic polypeptide
IVRGS

SEQ ID NO: 8186 - protein, 5 aa, Artificial Sequence
  Synthetic polypeptide
IVRGS

SEQ ID NO: 8187 - protein, 5 aa, Artificial Sequence
  Synthetic polypeptide
IVRGS

SEQ ID NO: 8188 - protein, 5 aa, Artificial Sequence
  Synthetic polypeptide
IVRGS

SEQ ID NO: 8189 - protein, 5 aa, Artificial Sequence
  Synthetic polypeptide
IVRGS

SEQ ID NO: 8190 - protein, 5 aa, Artificial Sequence
  Synthetic polypeptide
IVRGS

SEQ ID NO: 8191 - protein, 5 aa, Artificial Sequence
  Synthetic polypeptide
PQKGS

SEQ ID NO: 8192 - protein, 5 aa, Artificial Sequence
  Synthetic polypeptide
LLHRS

SEQ ID NO: 8193 - protein, 5 aa, Artificial Sequence
  Synthetic polypeptide
LLHRS

SEQ ID NO: 8194 - protein, 4 aa, Artificial Sequence
  Synthetic polypeptide
RIMG

SEQ ID NO: 8195 - protein, 4 aa, Artificial Sequence
  Synthetic polypeptide
RIMG

SEQ ID NO: 8196 - protein, 4 aa, Artificial Sequence
  Synthetic polypeptide
RIMG

SEQ ID NO: 8197 - protein, 4 aa, Artificial Sequence
  Synthetic polypeptide
PAEL

SEQ ID NO: 8198 - protein, 4 aa, Artificial Sequence
  Synthetic polypeptide
GWTS

SEQ ID NO: 8199 - protein, 4 aa, Artificial Sequence
  Synthetic polypeptide
GWTS

SEQ ID NO: 8200 - protein, 4 aa, Artificial Sequence
  Synthetic polypeptide
GWTS

SEQ ID NO: 8201 - protein, 4 aa, Artificial Sequence
  Synthetic polypeptide
GWTS

SEQ ID NO: 8202 - protein, 4 aa, Artificial Sequence
  Synthetic polypeptide
GWTS

SEQ ID NO: 8203 - protein, 16 aa, Artificial Sequence
  Synthetic polypeptide
NPSTLGGQASPSPSPK

SEQ ID NO: 8204 - protein, 13 aa, Artificial Sequence
  Synthetic polypeptide
TQGGSMGNSSSSR

SEQ ID NO: 8205 - protein, 16 aa, Artificial Sequence
  Synthetic polypeptide
LLLSSLSSLGDSAPER

SEQ ID NO: 8206 - protein, 8 aa, Artificial Sequence
  Synthetic polypeptide
MTDGGLAL

SEQ ID NO: 8207 - protein, 19 aa, Artificial Sequence
  Synthetic polypeptide
EAANMILVDDDFSAIIIGK

SEQ ID NO: 8208 - protein, 19 aa, Artificial Sequence
  Synthetic polypeptide
FQTSGLQNCSFKRWSMILK

SEQ ID NO: 8209 - protein, 14 aa, Artificial Sequence
  Synthetic polypeptide
GIPSQVELAWHWKR

SEQ ID NO: 8210 - protein, 28 aa, Artificial Sequence
  Synthetic polypeptide
GAILTTMLATRNFSDAVASLDPRSCDSR

SEQ ID NO: 8211 - protein, 11 aa, Artificial Sequence
  Synthetic polypeptide
IVGNMFNQMAK

SEQ ID NO: 8212 - protein, 18 aa, Artificial Sequence
  Synthetic polypeptide
NLHQSNFSLSGEAKYPPR

SEQ ID NO: 8213 - protein, 12 aa, Artificial Sequence
  Synthetic polypeptide
LGGSSCLVAYKK

SEQ ID NO: 8214 - protein, 28 aa, Artificial Sequence
  Synthetic polypeptide
QEQSSSPAMEQSWMENDFDKLTELGFRR

SEQ ID NO: 8215 - protein, 9 aa, Artificial Sequence
  Synthetic polypeptide
MGWMGEAVR

SEQ ID NO: 8216 - protein, 10 aa, Artificial Sequence
  Synthetic polypeptide
DASKGVSLHK

SEQ ID NO: 8217 - protein, 18 aa, Artificial Sequence
  Synthetic polypeptide
VIHDNFGIVEGLMTVTPK

SEQ ID NO: 8218 - protein, 10 aa, Artificial Sequence
  Synthetic polypeptide
HVVQGIQIIR

SEQ ID NO: 8219 - protein, 22 aa, Artificial Sequence
  Synthetic polypeptide
PGMMAHACNPSTLGGRGGWIMR

SEQ ID NO: 8220 - protein, 26 aa, Artificial Sequence
  Synthetic polypeptide
MSPQLLTPGSGAHSQVQLVQSGAEVK

SEQ ID NO: 8221 - protein, 24 aa, Artificial Sequence
  Synthetic polypeptide
QAPGQGLEWMGGIIPIFGTRNYRK

SEQ ID NO: 8222 - protein, 11 aa, Artificial Sequence
  Synthetic polypeptide
AEDTATSCRAK

SEQ ID NO: 8223 - protein, 11 aa, Artificial Sequence
  Synthetic polypeptide
LSWRGSGKITK

SEQ ID NO: 8224 - protein, 11 aa, Artificial Sequence
  Synthetic polypeptide
LSCAASGFTLR

SEQ ID NO: 8225 - protein, 11 aa, Artificial Sequence
  Synthetic polypeptide
LSCAASGFTVK

SEQ ID NO: 8226 - protein, 8 aa, Artificial Sequence
  Synthetic polypeptide
GLEWIGTK

SEQ ID NO: 8227 - protein, 12 aa, Artificial Sequence
  Synthetic polypeptide
AASNQISGVPSR

SEQ ID NO: 8228 - protein, 14 aa, Artificial Sequence
  Synthetic polypeptide
LLIYAASNGHSGQQ

SEQ ID NO: 8229 - protein, 10 aa, Artificial Sequence
  Synthetic polypeptide
SNLNTGVPSR

SEQ ID NO: 8230 - protein, 8 aa, Artificial Sequence
  Synthetic polypeptide
LSVLSQPK

SEQ ID NO: 8231 - protein, 20 aa, Artificial Sequence
  Synthetic polypeptide
MPSLNTSRPSGVPDRFSGSK

SEQ ID NO: 8232 - protein, 8 aa, Artificial Sequence
  Synthetic polypeptide
QVLQHPWK

SEQ ID NO: 8233 - protein, 28 aa, Artificial Sequence
  Synthetic polypeptide
LQGERISGNLDAPEGGFDAILQTAVCTK

SEQ ID NO: 8234 - protein, 7 aa, Artificial Sequence
  Synthetic polypeptide
ASVTLIR

SEQ ID NO: 8235 - protein, 15 aa, Artificial Sequence
  Synthetic polypeptide
VVSKVEFVHFLAFIK

SEQ ID NO: 8236 - protein, 19 aa, Artificial Sequence
  Synthetic polypeptide
LARHGWAEAFAGIRSSHIK

SEQ ID NO: 8237 - protein, 14 aa, Artificial Sequence
  Synthetic polypeptide
LLPVIPELWEAEMR

SEQ ID NO: 8238 - protein, 23 aa, Artificial Sequence
  Synthetic polypeptide
YLSPEAEVAVSRDCATALQPGVK

SEQ ID NO: 8239 - protein, 16 aa, Artificial Sequence
  Synthetic polypeptide
LQAEYMAASLGHGGPR

SEQ ID NO: 8240 - protein, 7 aa, Artificial Sequence
  Synthetic polypeptide
MILSSIR

SEQ ID NO: 8241 - protein, 18 aa, Artificial Sequence
  Synthetic polypeptide
QTDHLRPGVQHQSGQHSK

SEQ ID NO: 8242 - protein, 10 aa, Artificial Sequence
  Synthetic polypeptide
APVTGWQELK

SEQ ID NO: 8243 - protein, 15 aa, Artificial Sequence
  Synthetic polypeptide
TENQTPHVLTHRPPK

SEQ ID NO: 8244 - protein, 9 aa, Artificial Sequence
  Synthetic polypeptide
KKADATLLK

SEQ ID NO: 8245 - protein, 34 aa, Artificial Sequence
  Synthetic polypeptide
QVLWLMPMIPALSEAEAAGSLETSLGNMTSAWCR

SEQ ID NO: 8246 - protein, 13 aa, Artificial Sequence
  Synthetic polypeptide
MQVSLHPKCKADK

SEQ ID NO: 8247 - protein, 12 aa, Artificial Sequence
  Synthetic polypeptide
LLSSSMHTLQTK

SEQ ID NO: 8248 - protein, 14 aa, Artificial Sequence
  Synthetic polypeptide
MATVYFTRATSQCK

SEQ ID NO: 8249 - protein, 11 aa, Artificial Sequence
  Synthetic polypeptide
LASVFQLQLLR

SEQ ID NO: 8250 - protein, 10 aa, Artificial Sequence
  Synthetic polypeptide
LLITTSAGGR

SEQ ID NO: 8251 - protein, 13 aa, Artificial Sequence
  Synthetic polypeptide
FLGLGFFICNMRR

SEQ ID NO: 8252 - protein, 10 aa, Artificial Sequence
  Synthetic polypeptide
GPSPSGAEPR

SEQ ID NO: 8253 - protein, 15 aa, Artificial Sequence
  Synthetic polypeptide
ISSEQLFCFTLINPK

SEQ ID NO: 8254 - protein, 11 aa, Artificial Sequence
  Synthetic polypeptide
MISSTSVYAPK

SEQ ID NO: 8255 - protein, 12 aa, Artificial Sequence
  Synthetic polypeptide
VLILCQHEALVK

SEQ ID NO: 8256 - protein, 15 aa, Artificial Sequence
  Synthetic polypeptide
YEEASIPFVGILVEK

SEQ ID NO: 8257 - protein, 11 aa, Artificial Sequence
  Synthetic polypeptide
ATVLFYSYKPK

SEQ ID NO: 8258 - protein, 13 aa, Artificial Sequence
  Synthetic polypeptide
AIALQPGQQRETR

SEQ ID NO: 8259 - protein, 15 aa, Artificial Sequence
  Synthetic polypeptide
MLETLTLISSLGGLR

SEQ ID NO: 8260 - protein, 9 aa, Artificial Sequence
  Synthetic polypeptide
ALVVQLLGR

SEQ ID NO: 8261 - protein, 16 aa, Artificial Sequence
  Synthetic polypeptide
LQSQHFGRPSLPTCPR

SEQ ID NO: 8262 - protein, 13 aa, Artificial Sequence
  Synthetic polypeptide
LRHGWAEAFAGIR

SEQ ID NO: 8263 - protein, 16 aa, Artificial Sequence
  Synthetic polypeptide
SQHFGRPSVLYFSIHR

SEQ ID NO: 8264 - protein, 26 aa, Artificial Sequence
  Synthetic polypeptide
LEDQVGKTSLILSLVGEEFPEEPSRR

SEQ ID NO: 8265 - protein, 16 aa, Artificial Sequence
  Synthetic polypeptide
KPKLHEQTQFQGPSGK

SEQ ID NO: 8266 - protein, 9 aa, Artificial Sequence
  Synthetic polypeptide
ALVVQLLGR

SEQ ID NO: 8267 - protein, 21 aa, Artificial Sequence
  Synthetic polypeptide
LTDGQGSPLGGLGLPCGASLR

SEQ ID NO: 8268 - protein, 15 aa, Artificial Sequence
  Synthetic polypeptide
ISQLWWCMPIVPATR

SEQ ID NO: 8269 - protein, 11 aa, Artificial Sequence
  Synthetic polypeptide
SLSHSLPSSLK

SEQ ID NO: 8270 - protein, 9 aa, Artificial Sequence
  Synthetic polypeptide
ALVVQLLGR

SEQ ID NO: 8271 - protein, 16 aa, Artificial Sequence
  Synthetic polypeptide
LQSQHFGRPSLPTCPR

SEQ ID NO: 8272 - protein, 35 aa, Artificial Sequence
  Synthetic polypeptide
EVEVAVSCDGTTALQPGQQICIETPCIPPDTQSSR

SEQ ID NO: 8273 - protein, 16 aa, Artificial Sequence
  Synthetic polypeptide
SQHFGRPSVLYFSIHR

SEQ ID NO: 8274 - protein, 9 aa, Artificial Sequence
  Synthetic polypeptide
MLSFLYHQR

SEQ ID NO: 8275 - protein, 10 aa, Artificial Sequence
  Synthetic polypeptide
VNGYPNYLIR

SEQ ID NO: 8276 - protein, 7 aa, Artificial Sequence
  Synthetic polypeptide
VLGFIQR

SEQ ID NO: 8277 - protein, 16 aa, Artificial Sequence
  Synthetic polypeptide
KPKLHEQTQFQGPSGK

SEQ ID NO: 8278 - protein, 14 aa, Artificial Sequence
  Synthetic polypeptide
QDEMEGSLEHRSLK

SEQ ID NO: 8279 - protein, 15 aa, Artificial Sequence
  Synthetic polypeptide
ISQLWWCMPIVPATR

SEQ ID NO: 8280 - protein, 21 aa, Artificial Sequence
  Synthetic polypeptide
LTDGQGSPLGGLGLPCGASLR

SEQ ID NO: 8281 - protein, 14 aa, Artificial Sequence
  Synthetic polypeptide
MEYGVLDWILELKK

SEQ ID NO: 8282 - protein, 12 aa, Artificial Sequence
  Synthetic polypeptide
WVTDLVPPDWVR

SEQ ID NO: 8283 - protein, 7 aa, Artificial Sequence
  Synthetic polypeptide
KDFHLLK

SEQ ID NO: 8284 - protein, 21 aa, Artificial Sequence
  Synthetic polypeptide
GPSWLGANHPPDSSSEIWFLK

SEQ ID NO: 8285 - protein, 7 aa, Artificial Sequence
  Synthetic polypeptide
NILKSNK

SEQ ID NO: 8286 - protein, 17 aa, Artificial Sequence
  Synthetic polypeptide
VNCYGVVSAQCPFGGFK

SEQ ID NO: 8287 - protein, 14 aa, Artificial Sequence
  Synthetic polypeptide
SITVSDSCFASSLK

SEQ ID NO: 8288 - protein, 14 aa, Artificial Sequence
  Synthetic polypeptide
SITVSDSCFASSLK

SEQ ID NO: 8289 - protein, 15 aa, Artificial Sequence
  Synthetic polypeptide
GHSLGYGFVNYVTAK

SEQ ID NO: 8290 - protein, 15 aa, Artificial Sequence
  Synthetic polypeptide
GHSLGYGFVNYVTAK

SEQ ID NO: 8291 - protein, 12 aa, Artificial Sequence
  Synthetic polypeptide
QIQHPTASLIAK

SEQ ID NO: 8292 - protein, 12 aa, Artificial Sequence
  Synthetic polypeptide
KWSPLINILREK

SEQ ID NO: 8293 - protein, 12 aa, Artificial Sequence
  Synthetic polypeptide
KWSPLINILREK

SEQ ID NO: 8294 - protein, 8 aa, Artificial Sequence
  Synthetic polypeptide
LIGCIIGR

SEQ ID NO: 8295 - protein, 8 aa, Artificial Sequence
  Synthetic polypeptide
LIGCIIGR

SEQ ID NO: 8296 - protein, 8 aa, Artificial Sequence
  Synthetic polypeptide
LIGCIIGR

SEQ ID NO: 8297 - protein, 8 aa, Artificial Sequence
  Synthetic polypeptide
LIGCIIGR

SEQ ID NO: 8298 - protein, 12 aa, Artificial Sequence
  Synthetic polypeptide
KDSFRMEENIFK

SEQ ID NO: 8299 - protein, 16 aa, Artificial Sequence
  Synthetic polypeptide
QESRLNPGGGGCALKR

SEQ ID NO: 8300 - protein, 16 aa, Artificial Sequence
  Synthetic polypeptide
QESRLNPGGGGCALKR

SEQ ID NO: 8301 - protein, 16 aa, Artificial Sequence
  Synthetic polypeptide
QESRLNPGGGGCALKR

SEQ ID NO: 8302 - protein, 16 aa, Artificial Sequence
  Synthetic polypeptide
QESRLNPGGGGCALKR

SEQ ID NO: 8303 - protein, 20 aa, Artificial Sequence
  Synthetic polypeptide
DCYLVEPGLALMSLTELIWK

SEQ ID NO: 8304 - protein, 13 aa, Artificial Sequence
  Synthetic polypeptide
SVSRPGCILESQR

SEQ ID NO: 8305 - protein, 7 aa, Artificial Sequence
  Synthetic polypeptide
ELEAMSR

SEQ ID NO: 8306 - protein, 7 aa, Artificial Sequence
  Synthetic polypeptide
ELEAMSR

SEQ ID NO: 8307 - protein, 19 aa, Artificial Sequence
  Synthetic polypeptide
IILMLQANWLLVPSMLATR

SEQ ID NO: 8308 - protein, 12 aa, Artificial Sequence
  Synthetic polypeptide
KQCSTLDLLNLK

SEQ ID NO: 8309 - protein, 12 aa, Artificial Sequence
  Synthetic polypeptide
KQCSTLDLLNLK

SEQ ID NO: 8310 - protein, 21 aa, Artificial Sequence
  Synthetic polypeptide
SRSRPNCSWNTQYSSAYYTSR

SEQ ID NO: 8311 - protein, 21 aa, Artificial Sequence
  Synthetic polypeptide
SRSRPNCSWNTQYSSAYYTSR

SEQ ID NO: 8312 - protein, 22 aa, Artificial Sequence
  Synthetic polypeptide
QVVSRPSASVATPARGQPTVPR

SEQ ID NO: 8313 - protein, 12 aa, Artificial Sequence
  Synthetic polypeptide
TIHSPGKGLKAR

SEQ ID NO: 8314 - protein, 27 aa, Artificial Sequence
  Synthetic polypeptide
MGAVAHAIISALWEAEVGGSLEPRSSR

SEQ ID NO: 8315 - protein, 10 aa, Artificial Sequence
  Synthetic polypeptide
KWSPLINILR

SEQ ID NO: 8316 - protein, 10 aa, Artificial Sequence
  Synthetic polypeptide
KWSPLINILR

SEQ ID NO: 8317 - protein, 18 aa, Artificial Sequence
  Synthetic polypeptide
PGSSQRFQPGASQSTQRK

SEQ ID NO: 8318 - protein, 13 aa, Artificial Sequence
  Synthetic polypeptide
EDVTMEAEVRMVQ

SEQ ID NO: 8319 - protein, 18 aa, Artificial Sequence
  Synthetic polypeptide
ATGSPVQGPGTDLWETER

SEQ ID NO: 8320 - protein, 10 aa, Artificial Sequence
  Synthetic polypeptide
LTPVRMAIIK

SEQ ID NO: 8321 - protein, 10 aa, Artificial Sequence
  Synthetic polypeptide
LTPVRMAIIK

SEQ ID NO: 8322 - protein, 10 aa, Artificial Sequence
  Synthetic polypeptide
LTPVRMAIIK

SEQ ID NO: 8323 - protein, 7 aa, Artificial Sequence
  Synthetic polypeptide
QLLSRLR

SEQ ID NO: 8324 - protein, 7 aa, Artificial Sequence
  Synthetic polypeptide
QLLSRLR

SEQ ID NO: 8325 - protein, 7 aa, Artificial Sequence
  Synthetic polypeptide
QLLSRLR

SEQ ID NO: 8326 - protein, 7 aa, Artificial Sequence
  Synthetic polypeptide
QLLSRLR

SEQ ID NO: 8327 - protein, 7 aa, Artificial Sequence
  Synthetic polypeptide
QLLSRLR

SEQ ID NO: 8328 - protein, 7 aa, Artificial Sequence
  Synthetic polypeptide
QLLSRLR

SEQ ID NO: 8329 - protein, 7 aa, Artificial Sequence
  Synthetic polypeptide
QLLSRLR

SEQ ID NO: 8330 - protein, 7 aa, Artificial Sequence
  Synthetic polypeptide
QLLSRLR

SEQ ID NO: 8331 - protein, 7 aa, Artificial Sequence
  Synthetic polypeptide
QLLSRLR

SEQ ID NO: 8332 - protein, 7 aa, Artificial Sequence
  Synthetic polypeptide
QLLSRLR

SEQ ID NO: 8333 - protein, 7 aa, Artificial Sequence
  Synthetic polypeptide
QLLSRLR

SEQ ID NO: 8334 - protein, 7 aa, Artificial Sequence
  Synthetic polypeptide
QLLSRLR

SEQ ID NO: 8335 - protein, 7 aa, Artificial Sequence
  Synthetic polypeptide
QLLSRLR

SEQ ID NO: 8336 - protein, 7 aa, Artificial Sequence
  Synthetic polypeptide
QLLSRLR

SEQ ID NO: 8337 - protein, 22 aa, Artificial Sequence
  Synthetic polypeptide
TLNDTMGPIQSATSDAGSAPKK

SEQ ID NO: 8338 - protein, 22 aa, Artificial Sequence
  Synthetic polypeptide
TLNDTMGPIQSATSDAGSAPKK

SEQ ID NO: 8339 - protein, 22 aa, Artificial Sequence
  Synthetic polypeptide
TLNDTMGPIQSATSDAGSAPKK

SEQ ID NO: 8340 - protein, 10 aa, Artificial Sequence
  Synthetic polypeptide
KSNEMEENWK

SEQ ID NO: 8341 - protein, 10 aa, Artificial Sequence
  Synthetic polypeptide
KSNEMEENWK

SEQ ID NO: 8342 - protein, 10 aa, Artificial Sequence
  Synthetic polypeptide
KSNEMEENWK

SEQ ID NO: 8343 - protein, 24 aa, Artificial Sequence
  Synthetic polypeptide
QWSPMPGPQTGIGSLLVRNWATHR

SEQ ID NO: 8344 - protein, 13 aa, Artificial Sequence
  Synthetic polypeptide
AMIMPLHPSLSDK

SEQ ID NO: 8345 - protein, 22 aa, Artificial Sequence
  Synthetic polypeptide
PGAVAYAYNPSTLGGQGGPITR

SEQ ID NO: 8346 - protein, 14 aa, Artificial Sequence
  Synthetic polypeptide
KTDVQAATVLGGLR

SEQ ID NO: 8347 - protein, 17 aa, Artificial Sequence
  Synthetic polypeptide
LKHCPAVLLLQSPGEQR

SEQ ID NO: 8348 - protein, 17 aa, Artificial Sequence
  Synthetic polypeptide
LKHCPAVLLLQSPGEQR

SEQ ID NO: 8349 - protein, 13 aa, Artificial Sequence
  Synthetic polypeptide
WMVSAMLPVSVCR

SEQ ID NO: 8350 - protein, 13 aa, Artificial Sequence
  Synthetic polypeptide
WMVSAMLPVSVCR

SEQ ID NO: 8351 - protein, 13 aa, Artificial Sequence
  Synthetic polypeptide
WMVSAMLPVSVCR

SEQ ID NO: 8352 - protein, 13 aa, Artificial Sequence
  Synthetic polypeptide
WMVSAMLPVSVCR

SEQ ID NO: 8353 - protein, 16 aa, Artificial Sequence
  Synthetic polypeptide
WVSMWTLSLLMQNGLR

SEQ ID NO: 8354 - protein, 16 aa, Artificial Sequence
  Synthetic polypeptide
WVSMWTLSLLMQNGLR

SEQ ID NO: 8355 - protein, 12 aa, Artificial Sequence
  Synthetic polypeptide
EGLVAGNKHDQK

SEQ ID NO: 8356 - protein, 17 aa, Artificial Sequence
  Synthetic polypeptide
SLLASEMMFPWKPSRQR

SEQ ID NO: 8357 - protein, 22 aa, Artificial Sequence
  Synthetic polypeptide
PGAVAHAYNSSTLGGRVGRITR

SEQ ID NO: 8358 - protein, 13 aa, Artificial Sequence
  Synthetic polypeptide
LSCLLHCELLAGR

SEQ ID NO: 8359 - protein, 13 aa, Artificial Sequence
  Synthetic polypeptide
LSCLLHCELLAGR

SEQ ID NO: 8360 - protein, 13 aa, Artificial Sequence
  Synthetic polypeptide
LSCLLHCELLAGR

SEQ ID NO: 8361 - protein, 9 aa, Artificial Sequence
  Synthetic polypeptide
MSEPQFSLR

SEQ ID NO: 8362 - protein, 14 aa, Artificial Sequence
  Synthetic polypeptide
MLHALLRSRMPYLK

SEQ ID NO: 8363 - protein, 33 aa, Artificial Sequence
  Synthetic polypeptide
SLSRPPSAMCKMGMRAVSPSGVIGGLTAFLSAK

SEQ ID NO: 8364 - protein, 23 aa, Artificial Sequence
  Synthetic polypeptide
AQWLTPVIPALWEVEVGGSHEAR

SEQ ID NO: 8365 - protein, 23 aa, Artificial Sequence
  Synthetic polypeptide
AQWLTPVIPALWEVEVGGSHEAR

SEQ ID NO: 8366 - protein, 7 aa, Artificial Sequence
  Synthetic polypeptide
QVEVIIK

SEQ ID NO: 8367 - protein, 18 aa, Artificial Sequence
  Synthetic polypeptide
NILDFGFLDLGCSTGHGK

SEQ ID NO: 8368 - protein, 31 aa, Artificial Sequence
  Synthetic polypeptide
PGAVAHACNPSTLGGQETSAKEGLLLWCQRK

SEQ ID NO: 8369 - protein, 31 aa, Artificial Sequence; identical to SEQ ID NO: 8368
  Synthetic polypeptide

SEQ ID NO: 8370 - protein, 30 aa, Artificial Sequence
  Synthetic polypeptide
NIINSQEGVVALSTTDISPARPCHATWSLK

SEQ ID NO: 8371 - protein, 30 aa, Artificial Sequence; identical to SEQ ID NO: 8370
  Synthetic polypeptide

SEQ ID NO: 8372 - protein, 30 aa, Artificial Sequence; identical to SEQ ID NO: 8370
  Synthetic polypeptide

SEQ ID NO: 8373 - protein, 9 aa, Artificial Sequence
  Synthetic polypeptide
SIKPLFFCK

SEQ ID NO: 8374 - protein, 9 aa, Artificial Sequence
  Synthetic polypeptide
SIKPLFFCK

SEQ ID NO: 8375 - protein, 9 aa, Artificial Sequence
  Synthetic polypeptide
SIKPLFFCK

SEQ ID NO: 8376 - protein, 9 aa, Artificial Sequence
  Synthetic polypeptide
SIKPLFFCK

SEQ ID NO: 8377 - protein, 22 aa, Artificial Sequence
  Synthetic polypeptide
AGPMPDLCQWQALENISECLLR

SEQ ID NO: 8378 - protein, 15 aa, Artificial Sequence
  Synthetic polypeptide
KAREEAMTDLPAGTR

SEQ ID NO: 8379 - protein, 11 aa, Artificial Sequence
  Synthetic polypeptide
QVSRSELLSKR

SEQ ID NO: 8380 - protein, 15 aa, Artificial Sequence
  Synthetic polypeptide
GFPSHMELTIRVWLK

SEQ ID NO: 8381 - protein, 15 aa, Artificial Sequence
  Synthetic polypeptide
GFPSHMELTIRVWLK

SEQ ID NO: 8382 - protein, 10 aa, Artificial Sequence
  Synthetic polypeptide
FKTNLANMKK

SEQ ID NO: 8383 - protein, 8 aa, Artificial Sequence
  Synthetic polypeptide
KDPPWSLR

SEQ ID NO: 8384 - protein, 14 aa, Artificial Sequence
  Synthetic polypeptide
ELLCKDSTLMLGAK

SEQ ID NO: 8385 - protein, 14 aa, Artificial Sequence
  Synthetic polypeptide
ELLCKDSTLMLGAK

SEQ ID NO: 8386 - protein, 14 aa, Artificial Sequence
  Synthetic polypeptide
ELLCKDSTLMLGAK

SEQ ID NO: 8387 - protein, 14 aa, Artificial Sequence
  Synthetic polypeptide
ELLCKDSTLMLGAK

SEQ ID NO: 8388 - protein, 13 aa, Artificial Sequence
  Synthetic polypeptide
LREPIDNLTPEER

SEQ ID NO: 8389 - protein, 13 aa, Artificial Sequence
  Synthetic polypeptide
LREPIDNLTPEER

SEQ ID NO: 8390 - protein, 13 aa, Artificial Sequence
  Synthetic polypeptide
LREPIDNLTPEER

SEQ ID NO: 8391 - protein, 13 aa, Artificial Sequence
  Synthetic polypeptide
LREPIDNLTPEER

SEQ ID NO: 8392 - protein, 13 aa, Artificial Sequence
  Synthetic polypeptide
LREPIDNLTPEER

SEQ ID NO: 8393 - protein, 13 aa, Artificial Sequence
  Synthetic polypeptide
LREPIDNLTPEER

SEQ ID NO: 8394 - protein, 22 aa, Artificial Sequence
  Synthetic polypeptide
TIAQGNLSNTDVQAAKRSCSYL

SEQ ID NO: 8395 - protein, 18 aa, Artificial Sequence
  Synthetic polypeptide
RQATVSWDSGGSDEAPPK

SEQ ID NO: 8396 - protein, 18 aa, Artificial Sequence
  Synthetic polypeptide
RQATVSWDSGGSDEAPPK

SEQ ID NO: 8397 - protein, 18 aa, Artificial Sequence
  Synthetic polypeptide
RQATVSWDSGGSDEAPPK

SEQ ID NO: 8398 - protein, 18 aa, Artificial Sequence
  Synthetic polypeptide
RQATVSWDSGGSDEAPPK

SEQ ID NO: 8399 - protein, 18 aa, Artificial Sequence
  Synthetic polypeptide
RQATVSWDSGGSDEAPPK

SEQ ID NO: 8400 - protein, 18 aa, Artificial Sequence
  Synthetic polypeptide
RQATVSWDSGGSDEAPPK

SEQ ID NO: 8401 - protein, 18 aa, Artificial Sequence
  Synthetic polypeptide
RQATVSWDSGGSDEAPPK

SEQ ID NO: 8402 - protein, 9 aa, Artificial Sequence
  Synthetic polypeptide
MAHTLQYFK

SEQ ID NO: 8403 - protein, 17 aa, Artificial Sequence
  Synthetic polypeptide
TIAQMIDSTVALPLEAT

SEQ ID NO: 8404 - protein, 17 aa, Artificial Sequence
  Synthetic polypeptide
TIAQMIDSTVALPLEAT

SEQ ID NO: 8405 - protein, 17 aa, Artificial Sequence
  Synthetic polypeptide
TIAQMIDSTVALPLEAT

SEQ ID NO: 8406 - protein, 17 aa, Artificial Sequence
  Synthetic polypeptide
TIAQMIDSTVALPLEAT

SEQ ID NO: 8407 - protein, 17 aa, Artificial Sequence
  Synthetic polypeptide
TIAQMIDSTVALPLEAT

SEQ ID NO: 8408 - protein, 17 aa, Artificial Sequence
  Synthetic polypeptide
TIAQMIDSTVALPLEAT

SEQ ID NO: 8409 - protein, 17 aa, Artificial Sequence
  Synthetic polypeptide
TIAQMIDSTVALPLEAT

SEQ ID NO: 8410 - protein, 17 aa, Artificial Sequence
  Synthetic polypeptide
TIAQMIDSTVALPLEAT

SEQ ID NO: 8411 - protein, 17 aa, Artificial Sequence
  Synthetic polypeptide
TIAQMIDSTVALPLEAT

SEQ ID NO: 8412 - protein, 17 aa, Artificial Sequence
  Synthetic polypeptide
TIAQMIDSTVALPLEAT

SEQ ID NO: 8413 - protein, 17 aa, Artificial Sequence
  Synthetic polypeptide
TIAQMIDSTVALPLEAT

SEQ ID NO: 8414 - protein, 17 aa, Artificial Sequence
  Synthetic polypeptide
GLAQWLTSVIPALWEAK

SEQ ID NO: 8415 - protein, 35 aa, Artificial Sequence
  Synthetic polypeptide
EEGEEATEGEEEEETCLQPPLCRGTPSGTTWSSWR

SEQ ID NO: 8416 - protein, 10 aa, Artificial Sequence
  Synthetic polypeptide
MELTIPGVGK

SEQ ID NO: 8417 - protein, 10 aa, Artificial Sequence
  Synthetic polypeptide
MELTIPGVGK

SEQ ID NO: 8418 - protein, 22 aa, Artificial Sequence
  Synthetic polypeptide
EWSGIQKATLMDLQLSDSNFRR

SEQ ID NO: 8419 - protein, 22 aa, Artificial Sequence
  Synthetic polypeptide
EWSGIQKATLMDLQLSDSNFRR

SEQ ID NO: 8420 - protein, 18 aa, Artificial Sequence
  Synthetic polypeptide
QTQLQIFSTAADCLWDVR

SEQ ID NO: 8421 - protein, 18 aa, Artificial Sequence
  Synthetic polypeptide
QTQLQIFSTAADCLWDVR

SEQ ID NO: 8422 - protein, 18 aa, Artificial Sequence
  Synthetic polypeptide
QTQLQIFSTAADCLWDVR

SEQ ID NO: 8423 - protein, 12 aa, Artificial Sequence
  Synthetic polypeptide
LIISIFLVHSPK

SEQ ID NO: 8424 - protein, 13 aa, Artificial Sequence
  Synthetic polypeptide
INSAHLQTLSAGK

SEQ ID NO: 8425 - protein, 8 aa, Artificial Sequence
  Synthetic polypeptide
GDPGIDAR

SEQ ID NO: 8426 - protein, 12 aa, Artificial Sequence
  Synthetic polypeptide
EQLSQAEAVALK

SEQ ID NO: 8427 - protein, 12 aa, Artificial Sequence
  Synthetic polypeptide
EQLSQAEAVALK

SEQ ID NO: 8428 - protein, 25 aa, Artificial Sequence
  Synthetic polypeptide
MGAVAHTCNPSTLEGQDCPCGRPRR

SEQ ID NO: 8429 - protein, 16 aa, Artificial Sequence
  Synthetic polypeptide
GLNIFAVEVGPKSTMP

SEQ ID NO: 8430 - protein, 18 aa, Artificial Sequence
  Synthetic polypeptide
EIETLHHPSTGVILADHK

SEQ ID NO: 8431 - protein, 12 aa, Artificial Sequence
  Synthetic polypeptide
TPEVEATVPLQK

SEQ ID NO: 8432 - protein, 19 aa, Artificial Sequence
  Synthetic polypeptide
LADLFGWSQLIYNHITEYK

SEQ ID NO: 8433 - protein, 10 aa, Artificial Sequence
  Synthetic polypeptide
IRDSEELIGR

SEQ ID NO: 8434 - protein, 9 aa, Artificial Sequence
  Synthetic polypeptide
LLALLDVLK

SEQ ID NO: 8435 - protein, 15 aa, Artificial Sequence
  Synthetic polypeptide
MAHTLQYFKSSQHQR

SEQ ID NO: 8436 - protein, 16 aa, Artificial Sequence
  Synthetic polypeptide
ETDLITVTGSSFLTHR

SEQ ID NO: 8437 - protein, 24 aa, Artificial Sequence
  Synthetic polypeptide
AQWLTPVIPALWEAEAGESPERPR

SEQ ID NO: 8438 - protein, 24 aa, Artificial Sequence
  Synthetic polypeptide
AQWLTPVIPALWEAEAGESPERPR

SEQ ID NO: 8439 - protein, 16 aa, Artificial Sequence
  Synthetic polypeptide
FSEASVAMLPVQLWNR

SEQ ID NO: 8440 - protein, 10 aa, Artificial Sequence
  Synthetic polypeptide
AIAQGIQELR

SEQ ID NO: 8441 - protein, 10 aa, Artificial Sequence
  Synthetic polypeptide
AIAQGIQELR

SEQ ID NO: 8442 - protein, 10 aa, Artificial Sequence
  Synthetic polypeptide
AIAQGIQELR

SEQ ID NO: 8443 - protein, 10 aa, Artificial Sequence
  Synthetic polypeptide
AIAQGIQELR

SEQ ID NO: 8444 - protein, 10 aa, Artificial Sequence
  Synthetic polypeptide
AIAQGIQELR

SEQ ID NO: 8445 - protein, 10 aa, Artificial Sequence
  Synthetic polypeptide
AIAQGIQELR

SEQ ID NO: 8446 - protein, 14 aa, Artificial Sequence
  Synthetic polypeptide
ISQLQIWDTAGQER

SEQ ID NO: 8447 - protein, 14 aa, Artificial Sequence
  Synthetic polypeptide
ISQLQIWDTAGQER

SEQ ID NO: 8448 - protein, 14 aa, Artificial Sequence
  Synthetic polypeptide
ISQLQIWDTAGQER

SEQ ID NO: 8449 - protein, 14 aa, Artificial Sequence
  Synthetic polypeptide
ISQLQIWDTAGQER

SEQ ID NO: 8450 - protein, 9 aa, Artificial Sequence
  Synthetic polypeptide
SSTGPADLK

SEQ ID NO: 8451 - protein, 10 aa, Artificial Sequence
  Synthetic polypeptide
CLTTLFGSFR

SEQ ID NO: 8452 - protein, 10 aa, Artificial Sequence
  Synthetic polypeptide
CLTTLFGSFR

SEQ ID NO: 8453 - protein, 21 aa, Artificial Sequence
  Synthetic polypeptide
MILESTYHNTLHIAMKAPELK

SEQ ID NO: 8454 - protein, 21 aa, Artificial Sequence
  Synthetic polypeptide
MILESTYHNTLHIAMKAPELK

SEQ ID NO: 8455 - protein, 21 aa, Artificial Sequence
  Synthetic polypeptide
MILESTYHNTLHIAMKAPELK

SEQ ID NO: 8456 - protein, 21 aa, Artificial Sequence
  Synthetic polypeptide
MILESTYHNTLHIAMKAPELK

SEQ ID NO: 8457 - protein, 10 aa, Artificial Sequence
  Synthetic polypeptide
TVTVPAQELK

SEQ ID NO: 8458 - protein, 10 aa, Artificial Sequence
  Synthetic polypeptide
TVTVPAQELK

SEQ ID NO: 8459 - protein, 10 aa, Artificial Sequence
  Synthetic polypeptide
TVTVPAQELK

SEQ ID NO: 8460 - protein, 10 aa, Artificial Sequence
  Synthetic polypeptide
TVTVPAQELK

SEQ ID NO: 8461 - protein, 10 aa, Artificial Sequence
  Synthetic polypeptide
TVTVPAQELK

SEQ ID NO: 8462 - protein, 12 aa, Artificial Sequence
  Synthetic polypeptide
NMITGTSQADCA

SEQ ID NO: 8463 - protein, 20 aa, Artificial Sequence
  Synthetic polypeptide
QEGPNQMQPLDLGLPSLQNR

SEQ ID NO: 8464 - protein, 11 aa, Artificial Sequence
  Synthetic polypeptide
LLVNDPETAVK

SEQ ID NO: 8465 - protein, 11 aa, Artificial Sequence
  Synthetic polypeptide
LLVNDPETAVK

SEQ ID NO: 8466 - protein, 11 aa, Artificial Sequence
  Synthetic polypeptide
LLVNDPETAVK

SEQ ID NO: 8467 - protein, 9 aa, Artificial Sequence
  Synthetic polypeptide
NGISGQVLK

SEQ ID NO: 8468 - protein, 13 aa, Artificial Sequence
  Synthetic polypeptide
ETFFLQQQGNDAK

SEQ ID NO: 8469 - protein, 9 aa, Artificial Sequence
  Synthetic polypeptide
TLPSLDDLR

SEQ ID NO: 8470 - protein, 9 aa, Artificial Sequence
  Synthetic polypeptide
TLPSLDDLR

SEQ ID NO: 8471 - protein, 9 aa, Artificial Sequence
  Synthetic polypeptide
TLPSLDDLR

SEQ ID NO: 8472 - protein, 9 aa, Artificial Sequence
  Synthetic polypeptide
TLPSLDDLR

SEQ ID NO: 8473 - protein, 17 aa, Artificial Sequence
  Synthetic polypeptide
MLPPFVLAVTMGLSVVK

SEQ ID NO: 8474 - protein, 9 aa, Artificial Sequence
  Synthetic polypeptide
MTKLLSPIR

SEQ ID NO: 8475 - protein, 13 aa, Artificial Sequence
  Synthetic polypeptide
GLLGLAGMRPELR

SEQ ID NO: 8476 - protein, 28 aa, Artificial Sequence
  Synthetic polypeptide
TGLVGMLTHLDDLQLIVMSDHCVLSAAR

SEQ ID NO: 8477 - protein, 10 aa, Artificial Sequence
  Synthetic polypeptide
STNDELDELR

SEQ ID NO: 8478 - protein, 7 aa, Artificial Sequence
  Synthetic polypeptide
TGSIIVK

SEQ ID NO: 8479 - protein, 13 aa, Artificial Sequence
  Synthetic polypeptide
TSLHSIPVTVGRR

SEQ ID NO: 8480 - protein, 13 aa, Artificial Sequence
  Synthetic polypeptide
TSLHSIPVTVGRR

SEQ ID NO: 8481 - protein, 13 aa, Artificial Sequence
  Synthetic polypeptide
TSLHSIPVTVGRR

SEQ ID NO: 8482 - protein, 13 aa, Artificial Sequence
  Synthetic polypeptide
TSLHSIPVTVGRR

SEQ ID NO: 8483 - protein, 17 aa, Artificial Sequence
  Synthetic polypeptide
GLLTAAESAFFQSSMKK

SEQ ID NO: 8484 - protein, 14 aa, Artificial Sequence
  Synthetic polypeptide
MESQLQIEETTLLR

SEQ ID NO: 8485 - protein, 10 aa, Artificial Sequence
  Synthetic polypeptide
GQVLGPWPSR

SEQ ID NO: 8486 - protein, 13 aa, Artificial Sequence
  Synthetic polypeptide
IASTQEADVVVAR

SEQ ID NO: 8487 - protein, 13 aa, Artificial Sequence
  Synthetic polypeptide
IASTQEADVVVAR

SEQ ID NO: 8488 - protein, 7 aa, Artificial Sequence
  Synthetic polypeptide
GTSLSLR

SEQ ID NO: 8489 - protein, 10 aa, Artificial Sequence
  Synthetic polypeptide
LVSLSQYWEK

SEQ ID NO: 8490 - protein, 10 aa, Artificial Sequence
  Synthetic polypeptide
LVSLSQYWEK

SEQ ID NO: 8491 - protein, 10 aa, Artificial Sequence
  Synthetic polypeptide
LVSLSQYWEK

SEQ ID NO: 8492 - protein, 19 aa, Artificial Sequence
  Synthetic polypeptide
YPIEHGIITNWDDMEKGHG

SEQ ID NO: 8493 - protein, 21 aa, Artificial Sequence
  Synthetic polypeptide
MGAVTHIWNPRTLGGQDPDHR

SEQ ID NO: 8494 - protein, 11 aa, Artificial Sequence
  Synthetic polypeptide
TLTFLGPLQFR

SEQ ID NO: 8495 - protein, 11 aa, Artificial Sequence
  Synthetic polypeptide
TLTFLGPLQFR

SEQ ID NO: 8496 - protein, 11 aa, Artificial Sequence
  Synthetic polypeptide
TLTFLGPLQFR

SEQ ID NO: 8497 - protein, 11 aa, Artificial Sequence
  Synthetic polypeptide
TLTFLGPLQFR

SEQ ID NO: 8498 - protein, 14 aa, Artificial Sequence
  Synthetic polypeptide
TSPVAGPALPPNYK

SEQ ID NO: 8499 - protein, 21 aa, Artificial Sequence
  Synthetic polypeptide
GLSDHVQLSQSHSTSFHVSPK

SEQ ID NO: 8500 - protein, 16 aa, Artificial Sequence
  Synthetic polypeptide
FLQQCLLLLVSLEVFR

SEQ ID NO: 8501 - protein, 19 aa, Artificial Sequence
  Synthetic polypeptide
SAGITGMSHHAQPGQSMEK

SEQ ID NO: 8502 - protein, 19 aa, Artificial Sequence
  Synthetic polypeptide
SAGITGMSHHAQPGQSMEK

SEQ ID NO: 8503 - protein, 19 aa, Artificial Sequence
  Synthetic polypeptide
SAGITGMSHHAQPGQSMEK

SEQ ID NO: 8504 - protein, 14 aa, Artificial Sequence
  Synthetic polypeptide
DPAIALQPGPQSER

SEQ ID NO: 8505 - protein, 14 aa, Artificial Sequence
  Synthetic polypeptide
DPAIALQPGPQSER

SEQ ID NO: 8506 - protein, 14 aa, Artificial Sequence
  Synthetic polypeptide
DPAIALQPGPQSER

SEQ ID NO: 8507 - protein, 14 aa, Artificial Sequence
  Synthetic polypeptide
DPAIALQPGPQSER

SEQ ID NO: 8508 - protein, 17 aa, Artificial Sequence
  Synthetic polypeptide
IWLTEDATALLQRPGWR

SEQ ID NO: 8509 - protein, 16 aa, Artificial Sequence
  Synthetic polypeptide
EAEEPSDNGPLFTELK

SEQ ID NO: 8510 - protein, 19 aa, Artificial Sequence
  Synthetic polypeptide
QASRALPPCPWNTQTSGSR

SEQ ID NO: 8511 - protein, 10 aa, Artificial Sequence
  Synthetic polypeptide
AGGSLEAGGK

SEQ ID NO: 8512 - protein, 10 aa, Artificial Sequence
  Synthetic polypeptide
AGGSLEAGGK

SEQ ID NO: 8513 - protein, 10 aa, Artificial Sequence
  Synthetic polypeptide
AGGSLEAGGK

SEQ ID NO: 8514 - protein, 10 aa, Artificial Sequence
  Synthetic polypeptide
AGGSLEAGGK

SEQ ID NO: 8515 - protein, 10 aa, Artificial Sequence
  Synthetic polypeptide
AGGSLEAGGK

SEQ ID NO: 8516 - protein, 10 aa, Artificial Sequence
  Synthetic polypeptide
AGGSLEAGGK

SEQ ID NO: 8517 - protein, 16 aa, Artificial Sequence
  Synthetic polypeptide
VQLAGNTLPSTPCWTR

SEQ ID NO: 8518 - protein, 16 aa, Artificial Sequence
  Synthetic polypeptide
LPIFFFGTHETLLGGR

SEQ ID NO: 8519 - protein, 13 aa, Artificial Sequence
  Synthetic polypeptide
SQYCTPALEAETK

SEQ ID NO: 8520 - protein, 13 aa, Artificial Sequence
  Synthetic polypeptide
SQYCTPALEAETK

SEQ ID NO: 8521 - protein, 13 aa, Artificial Sequence
  Synthetic polypeptide
SQYCTPALEAETK

SEQ ID NO: 8522 - protein, 14 aa, Artificial Sequence
  Synthetic polypeptide
WLTPVIPALWEAER

SEQ ID NO: 8523 - protein, 16 aa, Artificial Sequence
  Synthetic polypeptide
LAVNSPPVEPPEQHSR

SEQ ID NO: 8524 - protein, 14 aa, Artificial Sequence
  Synthetic polypeptide
AKIAPAEGPDVSER

SEQ ID NO: 8525 - protein, 20 aa, Artificial Sequence
  Synthetic polypeptide
QLQVCVLQIMGSCVPSCPTP

SEQ ID NO: 8526 - protein, 10 aa, Artificial Sequence
  Synthetic polypeptide
MELTIPGEGK

SEQ ID NO: 8527 - protein, 10 aa, Artificial Sequence
  Synthetic polypeptide
MELTIPGEGK

SEQ ID NO: 8528 - protein, 12 aa, Artificial Sequence
  Synthetic polypeptide
HSPPGSGASFLK

SEQ ID NO: 8529 - protein, 16 aa, Artificial Sequence
  Synthetic polypeptide
MTLMAWWCMPVISATR

SEQ ID NO: 8530 - protein, 21 aa, Artificial Sequence
  Synthetic polypeptide
MGLSPASAPRPQTCFSLSTTK

SEQ ID NO: 8531 - protein, 13 aa, Artificial Sequence
  Synthetic polypeptide
YSNVLEMAWLQYA

SEQ ID NO: 8532 - protein, 18 aa, Artificial Sequence
  Synthetic polypeptide
MDAMTHAYNTSILGGQGK

SEQ ID NO: 8533 - protein, 19 aa, Artificial Sequence
  Synthetic polypeptide
MELTIPGVGHSSGSLNEGK

SEQ ID NO: 8534 - protein, 19 aa, Artificial Sequence
  Synthetic polypeptide
MELTIPGVGHSSGSLNEGK

SEQ ID NO: 8535 - protein, 17 aa, Artificial Sequence
  Synthetic polypeptide
SGVQDQPGQQGPVTLHK

SEQ ID NO: 8536 - protein, 17 aa, Artificial Sequence
  Synthetic polypeptide
SGVQDQPGQQGPVTLHK

SEQ ID NO: 8537 - protein, 9 aa, Artificial Sequence
  Synthetic polypeptide
MSIMEMQVR

SEQ ID NO: 8538 - protein, 16 aa, Artificial Sequence
  Synthetic polypeptide
MELLQTGPAPDVFPFQ

SEQ ID NO: 8539 - protein, 15 aa, Artificial Sequence
  Synthetic polypeptide
TSSGLPLILHCVYAK

SEQ ID NO: 8540 - protein, 10 aa, Artificial Sequence
  Synthetic polypeptide
DHIMFSLFEK

SEQ ID NO: 8541 - protein, 10 aa, Artificial Sequence
  Synthetic polypeptide
TSLANMDMFK

SEQ ID NO: 8542 - protein, 20 aa, Artificial Sequence
  Synthetic polypeptide
SLVLEGFLINSKPENACEPI

SEQ ID NO: 8543 - protein, 18 aa, Artificial Sequence
  Synthetic polypeptide
TGAQPPATMPLNVSFTNR

SEQ ID NO: 8544 - protein, 28 aa, Artificial Sequence
  Synthetic polypeptide
MATVAHTSLATVEDFQIRPHTLYVHSYK

SEQ ID NO: 8545 - protein, 28 aa, Artificial Sequence
  Synthetic polypeptide
MATVAHTSLATVEDFQIRPHTLYVHSYK

SEQ ID NO: 8546 - protein, 12 aa, Artificial Sequence
  Synthetic polypeptide
MACNMGLEKGEK

SEQ ID NO: 8547 - protein, 12 aa, Artificial Sequence
  Synthetic polypeptide
VSTSHVGPWVSP

SEQ ID NO: 8548 - protein, 12 aa, Artificial Sequence
  Synthetic polypeptide
SGFSFLLGIVGF

SEQ ID NO: 8549 - protein, 12 aa, Artificial Sequence
  Synthetic polypeptide
SEGIRIMEMLLK

SEQ ID NO: 8550 - protein, 9 aa, Artificial Sequence
  Synthetic polypeptide
MASICPFLK

SEQ ID NO: 8551 - protein, 13 aa, Artificial Sequence
  Synthetic polypeptide
VETLCATLWGFGK

SEQ ID NO: 8552 - protein, 17 aa, Artificial Sequence
  Synthetic polypeptide
SEEPLRPAAAPSENALR

SEQ ID NO: 8553 - protein, 11 aa, Artificial Sequence
  Synthetic polypeptide
EYLEYEDTAQR

SEQ ID NO: 8554 - protein, 11 aa, Artificial Sequence
  Synthetic polypeptide
EYLEYEDTAQR

SEQ ID NO: 8555 - protein, 20 aa, Artificial Sequence
  Synthetic polypeptide
MALHICGFLICGFNQPQIEK

SEQ ID NO: 8556 - protein, 20 aa, Artificial Sequence
  Synthetic polypeptide
MALHICGFLICGFNQPQIEK

SEQ ID NO: 8557 - protein, 20 aa, Artificial Sequence
  Synthetic polypeptide
MALHICGFLICGFNQPQIEK

SEQ ID NO: 8558 - protein, 12 aa, Artificial Sequence
  Synthetic polypeptide
VILIFFPECYAK

SEQ ID NO: 8559 - protein, 12 aa, Artificial Sequence
  Synthetic polypeptide
VILIFFPECYAK

SEQ ID NO: 8560 - protein, 12 aa, Artificial Sequence
  Synthetic polypeptide
VILIFFPECYAK

SEQ ID NO: 8561 - protein, 12 aa, Artificial Sequence
  Synthetic polypeptide
VILIFFPECYAK

SEQ ID NO: 8562 - protein, 12 aa, Artificial Sequence
  Synthetic polypeptide
APTDSTLCTLCK

SEQ ID NO: 8563 - protein, 15 aa, Artificial Sequence
  Synthetic polypeptide
TAGGQQQALPLGSPR

SEQ ID NO: 8564 - protein, 15 aa, Artificial Sequence
  Synthetic polypeptide
TAGGQQQALPLGSPR

SEQ ID NO: 8565 - protein, 15 aa, Artificial Sequence
  Synthetic polypeptide
TAGGQQQALPLGSPR

SEQ ID NO: 8566 - protein, 12 aa, Artificial Sequence
  Synthetic polypeptide
LDIGFPSLQNYR

SEQ ID NO: 8567 - protein, 15 aa, Artificial Sequence
  Synthetic polypeptide
VISAFPSELQSQCTK

SEQ ID NO: 8568 - protein, 10 aa, Artificial Sequence
  Synthetic polypeptide
MAGLVFQWLR

SEQ ID NO: 8569 - protein, 12 aa, Artificial Sequence
  Synthetic polypeptide
ELGVTAGGLPTR

SEQ ID NO: 8570 - protein, 22 aa, Artificial Sequence
  Synthetic polypeptide
MLADRSMSSSLSASQLHTVNMR

SEQ ID NO: 8571 - protein, 22 aa, Artificial Sequence
  Synthetic polypeptide
MLADRSMSSSLSASQLHTVNMR

SEQ ID NO: 8572 - protein, 23 aa, Artificial Sequence
  Synthetic polypeptide
ICRPGAAAAARHPGSPGGQLAPR

SEQ ID NO: 8573 - protein, 23 aa, Artificial Sequence
  Synthetic polypeptide
ICRPGAAAAARHPGSPGGQLAPR

SEQ ID NO: 8574 - protein, 23 aa, Artificial Sequence
  Synthetic polypeptide
ICRPGAAAAARHPGSPGGQLAPR

SEQ ID NO: 8575 - protein, 12 aa, Artificial Sequence
  Synthetic polypeptide
CPEMLPTSQTLR

SEQ ID NO: 8576 - protein, 11 aa, Artificial Sequence
  Synthetic polypeptide
MISAFPTEGQR

SEQ ID NO: 8577 - protein, 7 aa, Artificial Sequence
  Synthetic polypeptide
MGISIVK

SEQ ID NO: 8578 - protein, 12 aa, Artificial Sequence
  Synthetic polypeptide
EAPTYITWTIRR

SEQ ID NO: 8579 - protein, 27 aa, Artificial Sequence
  Synthetic polypeptide
METQADLVSQEPQALLDSALREAEAGR

SEQ ID NO: 8580 - protein, 20 aa, Artificial Sequence
  Synthetic polypeptide
METETESQIMSELPFILLQR

SEQ ID NO: 8581 - protein, 17 aa, Artificial Sequence
  Synthetic polypeptide
MDASLGNLFAGCGGLHL

SEQ ID NO: 8582 - protein, 13 aa, Artificial Sequence
  Synthetic polypeptide
AQEFETSLGNMFR

SEQ ID NO: 8583 - protein, 13 aa, Artificial Sequence
  Synthetic polypeptide
ITSVVMVDEAHER

SEQ ID NO: 8584 - protein, 11 aa, Artificial Sequence
  Synthetic polypeptide
METDLECSDSR

SEQ ID NO: 8585 - protein, 24 aa, Artificial Sequence
  Synthetic polypeptide
GLEFETSLANVVQLPNSIVFSVTR

SEQ ID NO: 8586 - protein, 16 aa, Artificial Sequence
  Synthetic polypeptide
MILESTYHNTLHIAMK

SEQ ID NO: 8587 - protein, 16 aa, Artificial Sequence
  Synthetic polypeptide
MILESTYHNTLHIAMK

SEQ ID NO: 8588 - protein, 16 aa, Artificial Sequence
  Synthetic polypeptide
MILESTYHNTLHIAMK

SEQ ID NO: 8589 - protein, 16 aa, Artificial Sequence
  Synthetic polypeptide
MILESTYHNTLHIAMK

SEQ ID NO: 8590 - protein, 16 aa, Artificial Sequence
  Synthetic polypeptide
NLLDIDAPVTGWQELK

SEQ ID NO: 8591 - protein, 16 aa, Artificial Sequence
  Synthetic polypeptide
NLLDIDAPVTGWQELK

SEQ ID NO: 8592 - protein, 11 aa, Artificial Sequence
  Synthetic polypeptide
SVSTIFLTCSR

SEQ ID NO: 8593 - protein, 10 aa, Artificial Sequence
  Synthetic polypeptide
MLTAGRGGSR

SEQ ID NO: 8594 - protein, 13 aa, Artificial Sequence
  Synthetic polypeptide
DLVGGYTPGTPYK

SEQ ID NO: 8595 - protein, 10 aa, Artificial Sequence
  Synthetic polypeptide
GIGYPAWAMK

SEQ ID NO: 8596 - protein, 18 aa, Artificial Sequence
  Synthetic polypeptide
SEHFCLSSASCQVSSLLR

SEQ ID NO: 8597 - protein, 10 aa, Artificial Sequence
  Synthetic polypeptide
TILANTVMAR

SEQ ID NO: 8598 - protein, 10 aa, Artificial Sequence
  Synthetic polypeptide
TILANTVMAR

SEQ ID NO: 8599 - protein, 10 aa, Artificial Sequence
  Synthetic polypeptide
TILANTVMAR

SEQ ID NO: 8600 - protein, 10 aa, Artificial Sequence
  Synthetic polypeptide
TILANTVMAR

SEQ ID NO: 8601 - protein, 10 aa, Artificial Sequence
  Synthetic polypeptide
TILANTVMAR

SEQ ID NO: 8602 - protein, 12 aa, Artificial Sequence
  Synthetic polypeptide
LQEMGPLGVPQR

SEQ ID NO: 8603 - protein, 15 aa, Artificial Sequence
  Synthetic polypeptide
LLNITAGLGSDGTIR

SEQ ID NO: 8604 - protein, 13 aa, Artificial Sequence
  Synthetic polypeptide
LLELQGLPLMPSR

SEQ ID NO: 8605 - protein, 13 aa, Artificial Sequence
  Synthetic polypeptide
FPSGILCVIMPGR

SEQ ID NO: 8606 - protein, 18 aa, Artificial Sequence
  Synthetic polypeptide
SQHFGRPSCVPLPATGVK

SEQ ID NO: 8607 - protein, 16 aa, Artificial Sequence
  Synthetic polypeptide
TFMMIHCHLMNNMSCR

SEQ ID NO: 8608 - protein, 16 aa, Artificial Sequence
  Synthetic polypeptide
TFMMIHCHLMNNMSCR

SEQ ID NO: 8609 - protein, 14 aa, Artificial Sequence
  Synthetic polypeptide
LLITAEDQSMWIQS

SEQ ID NO: 8610 - protein, 25 aa, Artificial Sequence
  Synthetic polypeptide
LVLSGFLASEEIYINQLEALLLIGR

SEQ ID NO: 8611 - protein, 25 aa, Artificial Sequence
  Synthetic polypeptide
LVLSGFLASEEIYINQLEALLLIGR

SEQ ID NO: 8612 - protein, 25 aa, Artificial Sequence
  Synthetic polypeptide
LVLSGFLASEEIYINQLEALLLIGR

SEQ ID NO: 8613 - protein, 25 aa, Artificial Sequence
  Synthetic polypeptide
LVLSGFLASEEIYINQLEALLLIGR

SEQ ID NO: 8614 - protein, 17 aa, Artificial Sequence
  Synthetic polypeptide
DQPGQHGPGMRPPLGLR

SEQ ID NO: 8615 - protein, 16 aa, Artificial Sequence
  Synthetic polypeptide
MAFSGSQAPYLSPDPK

SEQ ID NO: 8616 - protein, 12 aa, Artificial Sequence
  Synthetic polypeptide
GFGPSTMLGTQK

SEQ ID NO: 8617 - protein, 12 aa, Artificial Sequence
  Synthetic polypeptide
GFGPSTMLGTQK

SEQ ID NO: 8618 - protein, 13 aa, Artificial Sequence
  Synthetic polypeptide
AEIAPLHSSLGDK

SEQ ID NO: 8619 - protein, 13 aa, Artificial Sequence
  Synthetic polypeptide
AEIAPLHSSLGDK

SEQ ID NO: 8620 - protein, 13 aa, Artificial Sequence
  Synthetic polypeptide
AEIAPLHSSLGDK

SEQ ID NO: 8621 - protein, 23 aa, Artificial Sequence
  Synthetic polypeptide
LNIHLLMVTSSVTSSSILINLDR

SEQ ID NO: 8622 - protein, 15 aa, Artificial Sequence
  Synthetic polypeptide
GLGGWGGIGAMAGNR

SEQ ID NO: 8623 - protein, 10 aa, Artificial Sequence
  Synthetic polypeptide
TGIPSATLIR

SEQ ID NO: 8624 - protein, 17 aa, Artificial Sequence
  Synthetic polypeptide
SYQLRPGTMIEWGNYWR

SEQ ID NO: 8625 - protein, 17 aa, Artificial Sequence
  Synthetic polypeptide
SYQLRPGTMIEWGNYWR

SEQ ID NO: 8626 - protein, 17 aa, Artificial Sequence
  Synthetic polypeptide
SYQLRPGTMIEWGNYWR

SEQ ID NO: 8627 - protein, 18 aa, Artificial Sequence
  Synthetic polypeptide
QATGMDLEVIILSDITQK

SEQ ID NO: 8628 - protein, 13 aa, Artificial Sequence
  Synthetic polypeptide
AVTANGYQMLDGK

SEQ ID NO: 8629 - protein, 24 aa, Artificial Sequence
  Synthetic polypeptide
GQEMETIPANTLIQEDILDTGNDK

SEQ ID NO: 8630 - protein, 10 aa, Artificial Sequence
  Synthetic polypeptide
EAENEVQTAK

SEQ ID NO: 8631 - protein, 19 aa, Artificial Sequence
  Synthetic polypeptide
QAQCSTDSTLWYFMHGVCR

SEQ ID NO: 8632 - protein, 19 aa, Artificial Sequence
  Synthetic polypeptide
QAQCSTDSTLWYFMHGVCR

SEQ ID NO: 8633 - protein, 23 aa, Artificial Sequence
  Synthetic polypeptide
MGTVADTCDPSTLGGGVCDTAYR

SEQ ID NO: 8634 - protein, 17 aa, Artificial Sequence
  Synthetic polypeptide
GATWTGSSPQGSWDFTR

SEQ ID NO: 8635 - protein, 14 aa, Artificial Sequence
  Synthetic polypeptide
GTQVFVTGYTPWQR

SEQ ID NO: 8636 - protein, 15 aa, Artificial Sequence
  Synthetic polypeptide
LASTTSVSEEDVSSR

SEQ ID NO: 8637 - protein, 20 aa, Artificial Sequence
  Synthetic polypeptide
METGIISLLPPWGGRPSAVR

SEQ ID NO: 8638 - protein, 20 aa, Artificial Sequence
  Synthetic polypeptide
METGIISLLPPWGGRPSAVR

SEQ ID NO: 8639 - protein, 20 aa, Artificial Sequence
  Synthetic polypeptide
METGIISLLPPWGGRPSAVR

SEQ ID NO: 8640 - protein, 20 aa, Artificial Sequence
  Synthetic polypeptide
METGIISLLPPWGGRPSAVR

SEQ ID NO: 8641 - protein, 20 aa, Artificial Sequence
  Synthetic polypeptide
METGIISLLPPWGGRPSAVR

SEQ ID NO: 8642 - protein, 20 aa, Artificial Sequence
  Synthetic polypeptide
METGIISLLPPWGGRPSAVR

SEQ ID NO: 8643 - protein, 12 aa, Artificial Sequence
  Synthetic polypeptide
GGEFAPSWDCKP

SEQ ID NO: 8644 - protein, 24 aa, Artificial Sequence
  Synthetic polypeptide
HDYDEDLVQEASSEDVLGVHMVDK

SEQ ID NO: 8645 - protein, 24 aa, Artificial Sequence
  Synthetic polypeptide
HDYDEDLVQEASSEDVLGVHMVDK

SEQ ID NO: 8646 - protein, 24 aa, Artificial Sequence
  Synthetic polypeptide
HDYDEDLVQEASSEDVLGVHMVDK

SEQ ID NO: 8647 - protein, 24 aa, Artificial Sequence
  Synthetic polypeptide
HDYDEDLVQEASSEDVLGVHMVDK

SEQ ID NO: 8648 - protein, 16 aa, Artificial Sequence
  Synthetic polypeptide
MLAPENSDIGLAAWGR

SEQ ID NO: 8649 - protein, 17 aa, Artificial Sequence
  Synthetic polypeptide
QATVSWDSGGSDEAPPK

SEQ ID NO: 8650 - protein, 17 aa, Artificial Sequence
  Synthetic polypeptide
QATVSWDSGGSDEAPPK

SEQ ID NO: 8651 - protein, 17 aa, Artificial Sequence
  Synthetic polypeptide
QATVSWDSGGSDEAPPK

SEQ ID NO: 8652 - protein, 17 aa, Artificial Sequence
  Synthetic polypeptide
QATVSWDSGGSDEAPPK

SEQ ID NO: 8653 - protein, 17 aa, Artificial Sequence
  Synthetic polypeptide
QATVSWDSGGSDEAPPK

SEQ ID NO: 8654 - protein, 17 aa, Artificial Sequence
  Synthetic polypeptide
QATVSWDSGGSDEAPPK

SEQ ID NO: 8655 - protein, 17 aa, Artificial Sequence
  Synthetic polypeptide
QATVSWDSGGSDEAPPK

SEQ ID NO: 8656 - protein, 25 aa, Artificial Sequence
  Synthetic polypeptide
TSTDLPQIENCFQYIHQVTESQDIK

SEQ ID NO: 8657 - protein, 15 aa, Artificial Sequence
  Synthetic polypeptide
MGTVAHACNPCTLGG

SEQ ID NO: 8658 - protein, 13 aa, Artificial Sequence
  Synthetic polypeptide
TSLANMVVFPLMK

SEQ ID NO: 8659 - protein, 12 aa, Artificial Sequence
  Synthetic polypeptide
MESQMVEQLCSR

SEQ ID NO: 8660 - protein, 16 aa, Artificial Sequence
  Synthetic polypeptide
MLAPENSDIGLAAWGR

SEQ ID NO: 8661 - protein, 32 aa, Artificial Sequence
  Synthetic polypeptide
SSPQAIQMVATLGTTTCCSFDNLLEVGPICNK

SEQ ID NO: 8662 - protein, 32 aa, Artificial Sequence; identical to SEQ ID NO: 8661
  Synthetic polypeptide

SEQ ID NO: 8663 - protein, 10 aa, Artificial Sequence
  Synthetic polypeptide
GLTGEFSITR

SEQ ID NO: 8664 - protein, 21 aa, Artificial Sequence
  Synthetic polypeptide
MEDDAPVIYGLEFQEIQPLLR

SEQ ID NO: 8665 - protein, 18 aa, Artificial Sequence
  Synthetic polypeptide
GLNEAIFMIPTNPPPTFR

SEQ ID NO: 8666 - protein, 18 aa, Artificial Sequence
  Synthetic polypeptide
GLNEAIFMIPTNPPPTFR

SEQ ID NO: 8667 - protein, 7 aa, Artificial Sequence
  Synthetic polypeptide
MADPTIK

SEQ ID NO: 8668 - protein, 12 aa, Artificial Sequence
  Synthetic polypeptide
CNPSTLGDQAEK

SEQ ID NO: 8669 - protein, 18 aa, Artificial Sequence
  Synthetic polypeptide
MDLVQVSGSLGSPVLSCK

SEQ ID NO: 8670 - protein, 16 aa, Artificial Sequence
  Synthetic polypeptide
EAEASQAAQEAEINAR

SEQ ID NO: 8671 - protein, 21 aa, Artificial Sequence
  Synthetic polypeptide
MNDSCIFRPETDSDIMELTDR

SEQ ID NO: 8672 - protein, 12 aa, Artificial Sequence
  Synthetic polypeptide
EIETILANPENK

SEQ ID NO: 8673 - protein, 18 aa, Artificial Sequence
  Synthetic polypeptide
GLLWSGMALTGSLRVTQR

SEQ ID NO: 8674 - protein, 14 aa, Artificial Sequence
  Synthetic polypeptide
TAQLPEQLMTWHSR

SEQ ID NO: 8675 - protein, 14 aa, Artificial Sequence
  Synthetic polypeptide
TAQLPEQLMTWHSR

SEQ ID NO: 8676 - protein, 23 aa, Artificial Sequence
  Synthetic polypeptide
TPMELELPPASHFEFIGSSANCR

SEQ ID NO: 8677 - protein, 16 aa, Artificial Sequence
  Synthetic polypeptide
QAWWIMPIIPALWEAK

SEQ ID NO: 8678 - protein, 16 aa, Artificial Sequence
  Synthetic polypeptide
QAWWIMPIIPALWEAK

SEQ ID NO: 8679 - protein, 17 aa, Artificial Sequence
  Synthetic polypeptide
LLGAEIAPLHSSLDGLS

SEQ ID NO: 8680 - protein, 12 aa, Artificial Sequence
  Synthetic polypeptide
DSGSTTWCFIQK

SEQ ID NO: 8681 - protein, 12 aa, Artificial Sequence
  Synthetic polypeptide
DSGSTTWCFIQK

SEQ ID NO: 8682 - protein, 13 aa, Artificial Sequence
  Synthetic polypeptide
TQEAELAGVATVR

SEQ ID NO: 8683 - protein, 13 aa, Artificial Sequence
  Synthetic polypeptide
LNINYLAQYLSQK

SEQ ID NO: 8684 - protein, 13 aa, Artificial Sequence
  Synthetic polypeptide
MMAHLCIFGLQSR

SEQ ID NO: 8685 - protein, 7 aa, Artificial Sequence
  Synthetic polypeptide
IVEQTLK

SEQ ID NO: 8686 - protein, 11 aa, Artificial Sequence
  Synthetic polypeptide
MDFMNAEILLK

SEQ ID NO: 8687 - protein, 11 aa, Artificial Sequence
  Synthetic polypeptide
MDFMNAEILLK

SEQ ID NO: 8688 - protein, 19 aa, Artificial Sequence
  Synthetic polypeptide
MATDSWALAVDEQEAAAES

SEQ ID NO: 8689 - protein, 22 aa, Artificial Sequence
  Synthetic polypeptide
DLELEIPFGPAIPLLGSCSQCR

SEQ ID NO: 8690 - protein, 18 aa, Artificial Sequence
  Synthetic polypeptide
GQIGILLWNSMGTMQQPR

SEQ ID NO: 8691 - protein, 18 aa, Artificial Sequence
  Synthetic polypeptide
GQIGILLWNSMGTMQQPR

SEQ ID NO: 8692 - protein, 14 aa, Artificial Sequence
  Synthetic polypeptide
GQEMETILANMISR

SEQ ID NO: 8693 - protein, 14 aa, Artificial Sequence
  Synthetic polypeptide
GQEMETILANMISR

SEQ ID NO: 8694 - protein, 12 aa, Artificial Sequence
  Synthetic polypeptide
DAAALLLANEAR

SEQ ID NO: 8695 - protein, 12 aa, Artificial Sequence
  Synthetic polypeptide
LWTSLPAPMFSR

SEQ ID NO: 8696 - protein, 13 aa, Artificial Sequence
  Synthetic polypeptide
AEISCQQPAPGPR

SEQ ID NO: 8697 - protein, 11 aa, Artificial Sequence
  Synthetic polypeptide
ENTMAENELQV

SEQ ID NO: 8698 - protein, 21 aa, Artificial Sequence
  Synthetic polypeptide
MQENTLRAPTDSTLWHPPHYK

SEQ ID NO: 8699 - protein, 12 aa, Artificial Sequence
  Synthetic polypeptide
MACNMGLEKGEK

SEQ ID NO: 8700 - protein, 26 aa, Artificial Sequence
  Synthetic polypeptide
TVTDSTLWIASSPGGLSPADCGASFR

SEQ ID NO: 8701 - protein, 10 aa, Artificial Sequence
  Synthetic polypeptide
GPAPEPPSMR

SEQ ID NO: 8702 - protein, 12 aa, Artificial Sequence
  Synthetic polypeptide
EQTDVMHQNIYD

SEQ ID NO: 8703 - protein, 17 aa, Artificial Sequence
  Synthetic polypeptide
CMCLEYPAVVEFAPFQK

SEQ ID NO: 8704 - protein, 18 aa, Artificial Sequence
  Synthetic polypeptide
GFPSHMSLGYHFQCPIPR

SEQ ID NO: 8705 - protein, 13 aa, Artificial Sequence
  Synthetic polypeptide
SLEQLGGHHLSAR

SEQ ID NO: 8706 - protein, 24 aa, Artificial Sequence
  Synthetic polypeptide
MNLENTMPDTEDHTLHNSMSLGCK

SEQ ID NO: 8707 - protein, 24 aa, Artificial Sequence
  Synthetic polypeptide
MNLENTMPDTEDHTLHNSMSLGCK

SEQ ID NO: 8708 - protein, 24 aa, Artificial Sequence
  Synthetic polypeptide
MNLENTMPDTEDHTLHNSMSLGCK

SEQ ID NO: 8709 - protein, 24 aa, Artificial Sequence
  Synthetic polypeptide
MNLENTMPDTEDHTLHNSMSLGCK

SEQ ID NO: 8710 - protein, 24 aa, Artificial Sequence
  Synthetic polypeptide
MNLENTMPDTEDHTLHNSMSLGCK

SEQ ID NO: 8711 - protein, 24 aa, Artificial Sequence
  Synthetic polypeptide
MNLENTMPDTEDHTLHNSMSLGCK

SEQ ID NO: 8712 - protein, 24 aa, Artificial Sequence
  Synthetic polypeptide
MNLENTMPDTEDHTLHNSMSLGCK

SEQ ID NO: 8713 - protein, 24 aa, Artificial Sequence
  Synthetic polypeptide
MNLENTMPDTEDHTLHNSMSLGCK

SEQ ID NO: 8714 - protein, 24 aa, Artificial Sequence
  Synthetic polypeptide
MNLENTMPDTEDHTLHNSMSLGCK

SEQ ID NO: 8715 - protein, 24 aa, Artificial Sequence
  Synthetic polypeptide
MNLENTMPDTEDHTLHNSMSLGCK

SEQ ID NO: 8716 - protein, 16 aa, Artificial Sequence
  Synthetic polypeptide
SVERFLQEDQMFHQEK

SEQ ID NO: 8717 - protein, 16 aa, Artificial Sequence
  Synthetic polypeptide
SVERFLQEDQMFHQEK

SEQ ID NO: 8718 - protein, 16 aa, Artificial Sequence
  Synthetic polypeptide
SVERFLQEDQMFHQEK

SEQ ID NO: 8719 - protein, 16 aa, Artificial Sequence
  Synthetic polypeptide
SVERFLQEDQMFHQEK

SEQ ID NO: 8720 - protein, 16 aa, Artificial Sequence
  Synthetic polypeptide
SVERFLQEDQMFHQEK

SEQ ID NO: 8721 - protein, 16 aa, Artificial Sequence
  Synthetic polypeptide
SVERFLQEDQMFHQEK

SEQ ID NO: 8722 - protein, 23 aa, Artificial Sequence
  Synthetic polypeptide
AMSQINFFTNDPASAIGEYEDLR

SEQ ID NO: 8723 - protein, 23 aa, Artificial Sequence
  Synthetic polypeptide
AMSQINFFTNDPASAIGEYEDLR

SEQ ID NO: 8724 - protein, 23 aa, Artificial Sequence
  Synthetic polypeptide
AMSQINFFTNDPASAIGEYEDLR

SEQ ID NO: 8725 - protein, 18 aa, Artificial Sequence
  Synthetic polypeptide
MDAMTHAYNTSILGGQGK

SEQ ID NO: 8726 - protein, 19 aa, Artificial Sequence
  Synthetic polypeptide
QADHLMPGVQDQPNMTSVP

SEQ ID NO: 8727 - protein, 24 aa, Artificial Sequence
  Synthetic polypeptide
MNLENTMPDTEDHTLHNSMSLGCK

SEQ ID NO: 8728 - protein, 24 aa, Artificial Sequence
  Synthetic polypeptide
MNLENTMPDTEDHTLHNSMSLGCK

SEQ ID NO: 8729 - protein, 24 aa, Artificial Sequence
  Synthetic polypeptide
MNLENTMPDTEDHTLHNSMSLGCK

SEQ ID NO: 8730 - protein, 24 aa, Artificial Sequence
  Synthetic polypeptide
MNLENTMPDTEDHTLHNSMSLGCK

SEQ ID NO: 8731 - protein, 24 aa, Artificial Sequence
  Synthetic polypeptide
MNLENTMPDTEDHTLHNSMSLGCK

SEQ ID NO: 8732 - protein, 19 aa, Artificial Sequence
  Synthetic polypeptide
QADHLMPGVQDQPNMTSVP

SEQ ID NO: 8733 - protein, 10 aa, Artificial Sequence
  Synthetic polypeptide
QNLHEIGLWR

SEQ ID NO: 8734 - protein, 10 aa, Artificial Sequence
  Synthetic polypeptide
QNLHEIGLWR

SEQ ID NO: 8735 - protein, 10 aa, Artificial Sequence
  Synthetic polypeptide
QNLHEIGLWR

SEQ ID NO: 8736 - protein, 10 aa, Artificial Sequence
  Synthetic polypeptide
QNLHEIGLWR

SEQ ID NO: 8737 - protein, 10 aa, Artificial Sequence
  Synthetic polypeptide
QNLHEIGLWR

SEQ ID NO: 8738 - protein, 10 aa, Artificial Sequence
  Synthetic polypeptide
QNLHEIGLWR

SEQ ID NO: 8739 - protein, 10 aa, Artificial Sequence
  Synthetic polypeptide
QNLHEIGLWR

SEQ ID NO: 8740 - protein, 10 aa, Artificial Sequence
  Synthetic polypeptide
QNLHEIGLWR

SEQ ID NO: 8741 - protein, 19 aa, Artificial Sequence
  Synthetic polypeptide
LLRELQVMYGMLVFTLVLR

SEQ ID NO: 8742 - protein, 19 aa, Artificial Sequence
  Synthetic polypeptide
LLRELQVMYGMLVFTLVLR

SEQ ID NO: 8743 - protein, 15 aa, Artificial Sequence
  Synthetic polypeptide
ITSPAFWLITSCLVP

SEQ ID NO: 8744 - protein, 21 aa, Artificial Sequence
  Synthetic polypeptide
DGDHPSQHDGVLLCCPGWSTM

SEQ ID NO: 8745 - protein, 16 aa, Artificial Sequence
  Synthetic polypeptide
DSNLRIDACYQVVQMV

SEQ ID NO: 8746 - protein, 14 aa, Artificial Sequence
  Synthetic polypeptide
KQAQKDCPTHSGVS

SEQ ID NO: 8747 - protein, 25 aa, Artificial Sequence
  Synthetic polypeptide
EGDVVLYCSSATFCATSQSGTGEVR

SEQ ID NO: 8748 - protein, 15 aa, Artificial Sequence
  Synthetic polypeptide
FVDVTECQACSANSR

SEQ ID NO: 8749 - protein, 21 aa, Artificial Sequence
  Synthetic polypeptide
QHFICCISSFQYQLTYKDFTK

SEQ ID NO: 8750 - protein, 21 aa, Artificial Sequence
  Synthetic polypeptide
QHFICCISSFQYQLTYKDFTK

SEQ ID NO: 8751 - protein, 21 aa, Artificial Sequence
  Synthetic polypeptide
QHFICCISSFQYQLTYKDFTK

SEQ ID NO: 8752 - protein, 11 aa, Artificial Sequence
  Synthetic polypeptide
LAGDGVGAVNI

SEQ ID NO: 8753 - protein, 7 aa, Artificial Sequence
  Synthetic polypeptide
TLLQGIK

SEQ ID NO: 8754 - protein, 12 aa, Artificial Sequence
  Synthetic polypeptide
AAAGTEPGVGAR

SEQ ID NO: 8755 - protein, 12 aa, Artificial Sequence
  Synthetic polypeptide
AAAGTEPGVGAR

SEQ ID NO: 8756 - protein, 17 aa, Artificial Sequence
  Synthetic polypeptide
GAETGQGASACSVTSAR

SEQ ID NO: 8757 - protein, 7 aa, Artificial Sequence
  Synthetic polypeptide
ITTLGIK

SEQ ID NO: 8758 - protein, 10 aa, Artificial Sequence
  Synthetic polypeptide
AAAIPPIVTK

SEQ ID NO: 8759 - protein, 10 aa, Artificial Sequence
  Synthetic polypeptide
AAAIPPIVTK

SEQ ID NO: 8760 - protein, 10 aa, Artificial Sequence
  Synthetic polypeptide
AAAIPPIVTK

SEQ ID NO: 8761 - protein, 11 aa, Artificial Sequence
  Synthetic polypeptide
RTPSSSTPASR

SEQ ID NO: 8762 - protein, 13 aa, Artificial Sequence
  Synthetic polypeptide
REEFLSIQWVQAQ

SEQ ID NO: 8763 - protein, 9 aa, Artificial Sequence
  Synthetic polypeptide
GGAGVGSMT

SEQ ID NO: 8764 - protein, 10 aa, Artificial Sequence
  Synthetic polypeptide
AVDSATAPDK

SEQ ID NO: 8765 - protein, 9 aa, Artificial Sequence
  Synthetic polypeptide
GGAGVGSMT

SEQ ID NO: 8766 - protein, 12 aa, Artificial Sequence
  Synthetic polypeptide
AILARLGPLGRR

SEQ ID NO: 8767 - protein, 12 aa, Artificial Sequence
  Synthetic polypeptide
AILARLGPLGRR

SEQ ID NO: 8768 - protein, 12 aa, Artificial Sequence
  Synthetic polypeptide
AILARLGPLGRR

SEQ ID NO: 8769 - protein, 12 aa, Artificial Sequence
  Synthetic polypeptide
AILARLGPLGRR

SEQ ID NO: 8770 - protein, 12 aa, Artificial Sequence
  Synthetic polypeptide
AILARLGPLGRR

SEQ ID NO: 8771 - protein, 12 aa, Artificial Sequence
  Synthetic polypeptide
AILARLGPLGRR

SEQ ID NO: 8772 - protein, 14 aa, Artificial Sequence
  Synthetic polypeptide
KLTQQMESSTSSIM

SEQ ID NO: 8773 - protein, 18 aa, Artificial Sequence
  Synthetic polypeptide
MTYAANAGPCPENLLPPK

SEQ ID NO: 8774 - protein, 7 aa, Artificial Sequence
  Synthetic polypeptide
IIIQIDK

SEQ ID NO: 8775 - protein, 15 aa, Artificial Sequence
  Synthetic polypeptide
RAAQVSRDPQSCTPK

SEQ ID NO: 8776 - protein, 11 aa, Artificial Sequence
  Synthetic polypeptide
LAGGGANLMVK

SEQ ID NO: 8777 - protein, 14 aa, Artificial Sequence
  Synthetic polypeptide
REIITPCLLPWHFR

SEQ ID NO: 8778 - protein, 9 aa, Artificial Sequence
  Synthetic polypeptide
GAEPLVAGR

SEQ ID NO: 8779 - protein, 11 aa, Artificial Sequence
  Synthetic polypeptide
ISTVAHSDSSK

SEQ ID NO: 8780 - protein, 11 aa, Artificial Sequence
  Synthetic polypeptide
ISTVAHSDSSK

SEQ ID NO: 8781 - protein, 10 aa, Artificial Sequence
  Synthetic polypeptide
SLPLLVLDLK

SEQ ID NO: 8782 - protein, 7 aa, Artificial Sequence
  Synthetic polypeptide
VEPAILR

SEQ ID NO: 8783 - protein, 11 aa, Artificial Sequence
  Synthetic polypeptide
LFTMEELQDMK

SEQ ID NO: 8784 - protein, 18 aa, Artificial Sequence
  Synthetic polypeptide
MTLATDGTADMFGIRFKR

SEQ ID NO: 8785 - protein, 9 aa, Artificial Sequence
  Synthetic polypeptide
KPYQSVQYK

SEQ ID NO: 8786 - protein, 9 aa, Artificial Sequence
  Synthetic polypeptide
KPYQSVQYK

SEQ ID NO: 8787 - protein, 12 aa, Artificial Sequence
  Synthetic polypeptide
ICQLVGFSQNQR

SEQ ID NO: 8788 - protein, 10 aa, Artificial Sequence
  Synthetic polypeptide
GAGPGTPAAR

SEQ ID NO: 8789 - protein, 16 aa, Artificial Sequence
  Synthetic polypeptide
VFLAVNGTVGSDHWSR

SEQ ID NO: 8790 - protein, 12 aa, Artificial Sequence
  Synthetic polypeptide
SQTSPHLLVGTK

SEQ ID NO: 8791 - protein, 8 aa, Artificial Sequence
  Synthetic polypeptide
MMEAEDRK

SEQ ID NO: 8792 - protein, 11 aa, Artificial Sequence
  Synthetic polypeptide
VEEMIVCGTCK

SEQ ID NO: 8793 - protein, 13 aa, Artificial Sequence
  Synthetic polypeptide
GTALASEIVGGRR

SEQ ID NO: 8794 - protein, 14 aa, Artificial Sequence
  Synthetic polypeptide
TAGSGGSCAAAAAR

SEQ ID NO: 8795 - protein, 14 aa, Artificial Sequence
  Synthetic polypeptide
TAGSGGSCAAAAAR

SEQ ID NO: 8796 - protein, 12 aa, Artificial Sequence
  Synthetic polypeptide
TQEEMDKIPYIK

SEQ ID NO: 8797 - protein, 12 aa, Artificial Sequence
  Synthetic polypeptide
TQEEMDKIPYIK

SEQ ID NO: 8798 - protein, 12 aa, Artificial Sequence
  Synthetic polypeptide
TQEEMDKIPYIK

SEQ ID NO: 8799 - protein, 12 aa, Artificial Sequence
  Synthetic polypeptide
TQEEMDKIPYIK

SEQ ID NO: 8800 - protein, 17 aa, Artificial Sequence
  Synthetic polypeptide
MTTGLSDQQVVCDLDHR

SEQ ID NO: 8801 - protein, 17 aa, Artificial Sequence
  Synthetic polypeptide
MTTGLSDQQVVCDLDHR

SEQ ID NO: 8802 - protein, 9 aa, Artificial Sequence
  Synthetic polypeptide
LICMTCSWK

SEQ ID NO: 8803 - protein, 10 aa, Artificial Sequence
  Synthetic polypeptide
VPTFTISAFK

SEQ ID NO: 8804 - protein, 10 aa, Artificial Sequence
  Synthetic polypeptide
VPTFTISAFK

SEQ ID NO: 8805 - protein, 14 aa, Artificial Sequence
  Synthetic polypeptide
LGGGGGPVQHTATR

SEQ ID NO: 8806 - protein, 18 aa, Artificial Sequence
  Synthetic polypeptide
GLSSASGDLTILLCLCVK

SEQ ID NO: 8807 - protein, 20 aa, Artificial Sequence
  Synthetic polypeptide
LGAAAGANLSQLASSQRPLR

SEQ ID NO: 8808 - protein, 8 aa, Artificial Sequence
  Synthetic polypeptide
LVISTSPR

SEQ ID NO: 8809 - protein, 19 aa, Artificial Sequence
  Synthetic polypeptide
EGTVTDPKMATIQMVTMIR

SEQ ID NO: 8810 - protein, 9 aa, Artificial Sequence
  Synthetic polypeptide
LVATWCPTR

SEQ ID NO: 8811 - protein, 14 aa, Artificial Sequence
  Synthetic polypeptide
EISSLLSVHNNFPK

SEQ ID NO: 8812 - protein, 14 aa, Artificial Sequence
  Synthetic polypeptide
ISSVLSVGMSLLCR

SEQ ID NO: 8813 - protein, 14 aa, Artificial Sequence
  Synthetic polypeptide
EYFTATWSTPDCVV

SEQ ID NO: 8814 - protein, 13 aa, Artificial Sequence
  Synthetic polypeptide
SSFLSVPHWIEDV

SEQ ID NO: 8815 - protein, 11 aa, Artificial Sequence
  Synthetic polypeptide
VTLCPWGPQTK

SEQ ID NO: 8816 - protein, 11 aa, Artificial Sequence
  Synthetic polypeptide
MSLETTGPQER

SEQ ID NO: 8817 - protein, 14 aa, Artificial Sequence
  Synthetic polypeptide
LGSSQPTLCLGFSR

SEQ ID NO: 8818 - protein, 8 aa, Artificial Sequence
  Synthetic polypeptide
MIQQEEIR

SEQ ID NO: 8819 - protein, 8 aa, Artificial Sequence
  Synthetic polypeptide
MIQQEEIR

SEQ ID NO: 8820 - protein, 17 aa, Artificial Sequence
  Synthetic polypeptide
SSMRYQSLWPTTSLWRR

SEQ ID NO: 8821 - protein, 14 aa, Artificial Sequence
  Synthetic polypeptide
MAQPHTTSVPYFAR

SEQ ID NO: 8822 - protein, 14 aa, Artificial Sequence
  Synthetic polypeptide
MAQPHTTSVPYFAR

SEQ ID NO: 8823 - protein, 13 aa, Artificial Sequence
  Synthetic polypeptide
QLLSIPQTWCSLK

SEQ ID NO: 8824 - protein, 10 aa, Artificial Sequence
  Synthetic polypeptide
ALQCLSMLAR

SEQ ID NO: 8825 - protein, 35 aa, Artificial Sequence
  Synthetic polypeptide
AIAESLNSSQGIVEETSEEGNSVPASQSVAALTSK

SEQ ID NO: 8826 - protein, 8 aa, Artificial Sequence
  Synthetic polypeptide
LLGATPVR

SEQ ID NO: 8827 - protein, 13 aa, Artificial Sequence
  Synthetic polypeptide
SAATSAALLTTAR

SEQ ID NO: 8828 - protein, 7 aa, Artificial Sequence
  Synthetic polypeptide
RGLPLTK

SEQ ID NO: 8829 - protein, 12 aa, Artificial Sequence
  Synthetic polypeptide
SFTSWAPVSGPR

SEQ ID NO: 8830 - protein, 23 aa, Artificial Sequence
  Synthetic polypeptide
MDTSPDPVCGGSHTSHVLLHDAR

SEQ ID NO: 8831 - protein, 23 aa, Artificial Sequence
  Synthetic polypeptide
MDTSPDPVCGGSHTSHVLLHDAR

SEQ ID NO: 8832 - protein, 13 aa, Artificial Sequence
  Synthetic polypeptide
ILTSCHHLPTNEK

SEQ ID NO: 8833 - protein, 13 aa, Artificial Sequence
  Synthetic polypeptide
ILTSCHHLPTNEK

SEQ ID NO: 8834 - protein, 17 aa, Artificial Sequence
  Synthetic polypeptide
MAGGGGSSDGSGRAAGR

SEQ ID NO: 8835 - protein, 12 aa, Artificial Sequence
  Synthetic polypeptide
SYWGHQPPAPPK

SEQ ID NO: 8836 - protein, 14 aa, Artificial Sequence
  Synthetic polypeptide
GLPQSMSQWGHPAR

SEQ ID NO: 8837 - protein, 11 aa, Artificial Sequence
  Synthetic polypeptide
SMPQDLSEALK

SEQ ID NO: 8838 - protein, 11 aa, Artificial Sequence
  Synthetic polypeptide
SMPQDLSEALK

SEQ ID NO: 8839 - protein, 17 aa, Artificial Sequence
  Synthetic polypeptide
QLLHVQCFQWVFWRPVA

SEQ ID NO: 8840 - protein, 20 aa, Artificial Sequence
  Synthetic polypeptide
MVLELPIQNEPPGQAAAEEK

SEQ ID NO: 8841 - protein, 8 aa, Artificial Sequence
  Synthetic polypeptide
VGTDWDAK

SEQ ID NO: 8842 - protein, 8 aa, Artificial Sequence
  Synthetic polypeptide
DLLVLLIK

SEQ ID NO: 8843 - protein, 8 aa, Artificial Sequence
  Synthetic polypeptide
DLLVLLIK

SEQ ID NO: 8844 - protein, 8 aa, Artificial Sequence
  Synthetic polypeptide
DLLVLLIK

SEQ ID NO: 8845 - protein, 18 aa, Artificial Sequence
  Synthetic polypeptide
ELFGSVGVIGGHSSFVAV

SEQ ID NO: 8846 - protein, 16 aa, Artificial Sequence
  Synthetic polypeptide
DLSMLFAFISLLVMLP

SEQ ID NO: 8847 - protein, 17 aa, Artificial Sequence
  Synthetic polypeptide
LAGGGGAPLSQPDLGDR

SEQ ID NO: 8848 - protein, 10 aa, Artificial Sequence
  Synthetic polypeptide
LQTWISTSWR

SEQ ID NO: 8849 - protein, 10 aa, Artificial Sequence
  Synthetic polypeptide
LQTWISTSWR

SEQ ID NO: 8850 - protein, 8 aa, Artificial Sequence
  Synthetic polypeptide
TLPSASLK

SEQ ID NO: 8851 - protein, 10 aa, Artificial Sequence
  Synthetic polypeptide
SLWLYTFCSR

SEQ ID NO: 8852 - protein, 14 aa, Artificial Sequence
  Synthetic polypeptide
ISSVLSVGMSLLCR

SEQ ID NO: 8853 - protein, 18 aa, Artificial Sequence
  Synthetic polypeptide
TNTFPLLEDEDDLFTDQK

SEQ ID NO: 8854 - protein, 18 aa, Artificial Sequence
  Synthetic polypeptide
TNTFPLLEDEDDLFTDQK

SEQ ID NO: 8855 - protein, 18 aa, Artificial Sequence
  Synthetic polypeptide
TNTFPLLEDEDDLFTDQK

SEQ ID NO: 8856 - protein, 18 aa, Artificial Sequence
  Synthetic polypeptide
TNTFPLLEDEDDLFTDQK

SEQ ID NO: 8857 - protein, 12 aa, Artificial Sequence
  Synthetic polypeptide
EFIMASSIDHYK

SEQ ID NO: 8858 - protein, 12 aa, Artificial Sequence
  Synthetic polypeptide
ASLSSPPPWTPR

SEQ ID NO: 8859 - protein, 17 aa, Artificial Sequence
  Synthetic polypeptide
GLITLCSQTSGAWDCLW

SEQ ID NO: 8860 - protein, 13 aa, Artificial Sequence
  Synthetic polypeptide
RPLGTSASLVPLR

SEQ ID NO: 8861 - protein, 8 aa, Artificial Sequence
  Synthetic polypeptide
MLPILVSK

SEQ ID NO: 8862 - protein, 16 aa, Artificial Sequence
  Synthetic polypeptide
MYPELQITNVMEANQR

SEQ ID NO: 8863 - protein, 12 aa, Artificial Sequence
  Synthetic polypeptide
VSLLFEDDVDSR

SEQ ID NO: 8864 - protein, 12 aa, Artificial Sequence
  Synthetic polypeptide
VSLLFEDDVDSR

SEQ ID NO: 8865 - protein, 12 aa, Artificial Sequence
  Synthetic polypeptide
VSLLFEDDVDSR

SEQ ID NO: 8866 - protein, 12 aa, Artificial Sequence
  Synthetic polypeptide
VSLLFEDDVDSR

SEQ ID NO: 8867 - protein, 16 aa, Artificial Sequence
  Synthetic polypeptide
ILNCCLAYNVGLPEAK

SEQ ID NO: 8868 - protein, 16 aa, Artificial Sequence
  Synthetic polypeptide
ILNCCLAYNVGLPEAK

SEQ ID NO: 8869 - protein, 16 aa, Artificial Sequence
  Synthetic polypeptide
ILNCCLAYNVGLPEAK

SEQ ID NO: 8870 - protein, 16 aa, Artificial Sequence
  Synthetic polypeptide
ILNCCLAYNVGLPEAK

SEQ ID NO: 8871 - protein, 16 aa, Artificial Sequence
  Synthetic polypeptide
ILNCCLAYNVGLPEAK

SEQ ID NO: 8872 - protein, 9 aa, Artificial Sequence
  Synthetic polypeptide
LLSSPSLVR

SEQ ID NO: 8873 - protein, 14 aa, Artificial Sequence
  Synthetic polypeptide
HQVHPSWSLLTLQK

SEQ ID NO: 8874 - protein, 14 aa, Artificial Sequence
  Synthetic polypeptide
HQVHPSWSLLTLQK

SEQ ID NO: 8875 - protein, 11 aa, Artificial Sequence
  Synthetic polypeptide
DLYLWNPRILK

SEQ ID NO: 8876 - protein, 35 aa, Artificial Sequence
  Synthetic polypeptide
MTEQTPALLGNMAMATSLMDIGDSFGHPACPLVSR

SEQ ID NO: 8877 - protein, 14 aa, Artificial Sequence
  Synthetic polypeptide
SCHPQSLIHLSWAK

SEQ ID NO: 8878 - protein, 19 aa, Artificial Sequence
  Synthetic polypeptide
GTQEVQLSGRLACAVHSTR

SEQ ID NO: 8879 - protein, 19 aa, Artificial Sequence
  Synthetic polypeptide
GTQEVQLSGRLACAVHSTR

SEQ ID NO: 8880 - protein, 19 aa, Artificial Sequence
  Synthetic polypeptide
GTQEVQLSGRLACAVHSTR

SEQ ID NO: 8881 - protein, 13 aa, Artificial Sequence
  Synthetic polypeptide
VAVTFGLGQLQER

SEQ ID NO: 8882 - protein, 11 aa, Artificial Sequence
  Synthetic polypeptide
GAAGGDPQDSN

SEQ ID NO: 8883 - protein, 11 aa, Artificial Sequence
  Synthetic polypeptide
GAAGGDPQDSN

SEQ ID NO: 8884 - protein, 12 aa, Artificial Sequence
  Synthetic polypeptide
MLGIWHTVPSCR

SEQ ID NO: 8885 - protein, 11 aa, Artificial Sequence
  Synthetic polypeptide
LLEDLAQGAAR

SEQ ID NO: 8886 - protein, 16 aa, Artificial Sequence
  Synthetic polypeptide
RPPPEELPEDGLRTQR

SEQ ID NO: 8887 - protein, 16 aa, Artificial Sequence
  Synthetic polypeptide
RPPPEELPEDGLRTQR

SEQ ID NO: 8888 - protein, 11 aa, Artificial Sequence
  Synthetic polypeptide
GISMEAMSENK

SEQ ID NO: 8889 - protein, 11 aa, Artificial Sequence
  Synthetic polypeptide
GISMEAMSENK

SEQ ID NO: 8890 - protein, 11 aa, Artificial Sequence
  Synthetic polypeptide
GISMEAMSENK

SEQ ID NO: 8891 - protein, 12 aa, Artificial Sequence
  Synthetic polypeptide
VSLCQHPACPAK

SEQ ID NO: 8892 - protein, 20 aa, Artificial Sequence
  Synthetic polypeptide
GIILQWGYWTDFSYAGMCLR

SEQ ID NO: 8893 - protein, 13 aa, Artificial Sequence
  Synthetic polypeptide
ENSDKHLAESMST

SEQ ID NO: 8894 - protein, 14 aa, Artificial Sequence
  Synthetic polypeptide
GGSSVLAFSADQSR

SEQ ID NO: 8895 - protein, 16 aa, Artificial Sequence
  Synthetic polypeptide
WDLGSWPAPGLSAPHR

SEQ ID NO: 8896 - protein, 16 aa, Artificial Sequence
  Synthetic polypeptide
WDLGSWPAPGLSAPHR

SEQ ID NO: 8897 - protein, 12 aa, Artificial Sequence
  Synthetic polypeptide
GLSMGCGAAVGR

SEQ ID NO: 8898 - protein, 10 aa, Artificial Sequence
  Synthetic polypeptide
GPMGDLSSSK

SEQ ID NO: 8899 - protein, 20 aa, Artificial Sequence
  Synthetic polypeptide
MIAVSTANGYILFFHITSTR

SEQ ID NO: 8900 - protein, 20 aa, Artificial Sequence
  Synthetic polypeptide
MIAVSTANGYILFFHITSTR

SEQ ID NO: 8901 - protein, 20 aa, Artificial Sequence
  Synthetic polypeptide
MIAVSTANGYILFFHITSTR

SEQ ID NO: 8902 - protein, 20 aa, Artificial Sequence
  Synthetic polypeptide
SVLWMTTSAWPLQASPPMQG

SEQ ID NO: 8903 - protein, 13 aa, Artificial Sequence
  Synthetic polypeptide
CMQHLLTSSTTPR

SEQ ID NO: 8904 - protein, 16 aa, Artificial Sequence
  Synthetic polypeptide
KLPGPDSAPVVPATQK

SEQ ID NO: 8905 - protein, 14 aa, Artificial Sequence
  Synthetic polypeptide
LSSEGTGNLQNGEK

SEQ ID NO: 8906 - protein, 14 aa, Artificial Sequence
  Synthetic polypeptide
LSSEGTGNLQNGEK

SEQ ID NO: 8907 - protein, 7 aa, Artificial Sequence
  Synthetic polypeptide
GGCPSLK

SEQ ID NO: 8908 - protein, 7 aa, Artificial Sequence
  Synthetic polypeptide
LQENNLR

SEQ ID NO: 8909 - protein, 7 aa, Artificial Sequence
  Synthetic polypeptide
ETTLAFK

SEQ ID NO: 8910 - protein, 15 aa, Artificial Sequence
  Synthetic polypeptide
ISLAWWHVPVIPVTR

SEQ ID NO: 8911 - protein, 7 aa, Artificial Sequence
  Synthetic polypeptide
NLAAEKR

SEQ ID NO: 8912 - protein, 9 aa, Artificial Sequence
  Synthetic polypeptide
GLNSCLSSK

SEQ ID NO: 8913 - protein, 9 aa, Artificial Sequence
  Synthetic polypeptide
GLNSCLSSK

SEQ ID NO: 8914 - protein, 8 aa, Artificial Sequence
  Synthetic polypeptide
ALLDSVIR

SEQ ID NO: 8915 - protein, 11 aa, Artificial Sequence
  Synthetic polypeptide
MERTLAQESQR

SEQ ID NO: 8916 - protein, 12 aa, Artificial Sequence
  Synthetic polypeptide
KLIPALMDDFER

SEQ ID NO: 8917 - protein, 12 aa, Artificial Sequence
  Synthetic polypeptide
SLNRPITMEGIK

SEQ ID NO: 8918 - protein, 12 aa, Artificial Sequence
  Synthetic polypeptide
SLNRPITMEGIK

SEQ ID NO: 8919 - protein, 21 aa, Artificial Sequence
  Synthetic polypeptide
IILLSCLSVLYTLPGHCCGRK

SEQ ID NO: 8920 - protein, 8 aa, Artificial Sequence
  Synthetic polypeptide
GGFHHDCK

SEQ ID NO: 8921 - protein, 8 aa, Artificial Sequence
  Synthetic polypeptide
GGFHHDCK

SEQ ID NO: 8922 - protein, 11 aa, Artificial Sequence
  Synthetic polypeptide
GNLLIISLDAK

SEQ ID NO: 8923 - protein, 10 aa, Artificial Sequence
  Synthetic polypeptide
LSAASLLSQR

SEQ ID NO: 8924 - protein, 12 aa, Artificial Sequence
  Synthetic polypeptide
VALLTSILMPTR

SEQ ID NO: 8925 - protein, 11 aa, Artificial Sequence
  Synthetic polypeptide
GAEAGGSSEPR

SEQ ID NO: 8926 - protein, 11 aa, Artificial Sequence
  Synthetic polypeptide
GAEAGGSSEPR

SEQ ID NO: 8927 - protein, 11 aa, Artificial Sequence
  Synthetic polypeptide
GAEAGGSSEPR

SEQ ID NO: 8928 - protein, 7 aa, Artificial Sequence
  Synthetic polypeptide
GPTDPLK

SEQ ID NO: 8929 - protein, 7 aa, Artificial Sequence
  Synthetic polypeptide
GPTDPLK

SEQ ID NO: 8930 - protein, 7 aa, Artificial Sequence
  Synthetic polypeptide
GPTDPLK

SEQ ID NO: 8931 - protein, 18 aa, Artificial Sequence
  Synthetic polypeptide
SVGEGTINGLLGELLETR

SEQ ID NO: 8932 - protein, 11 aa, Artificial Sequence
  Synthetic polypeptide
MAAVTHACNPR

SEQ ID NO: 8933 - protein, 8 aa, Artificial Sequence
  Synthetic polypeptide
ATALQPGR

SEQ ID NO: 8934 - protein, 8 aa, Artificial Sequence
  Synthetic polypeptide
ATALQPGR

SEQ ID NO: 8935 - protein, 8 aa, Artificial Sequence
  Synthetic polypeptide
ATALQPGR

SEQ ID NO: 8936 - protein, 8 aa, Artificial Sequence
  Synthetic polypeptide
ATALQPGR

SEQ ID NO: 8937 - protein, 8 aa, Artificial Sequence
  Synthetic polypeptide
ATALQPGR

SEQ ID NO: 8938 - protein, 8 aa, Artificial Sequence
  Synthetic polypeptide
ATALQPGR

SEQ ID NO: 8939 - protein, 8 aa, Artificial Sequence
  Synthetic polypeptide
ATALQPGR

SEQ ID NO: 8940 - protein, 8 aa, Artificial Sequence
  Synthetic polypeptide
ATALQPGR

SEQ ID NO: 8941 - protein, 8 aa, Artificial Sequence
  Synthetic polypeptide
ATALQPGR

SEQ ID NO: 8942 - protein, 8 aa, Artificial Sequence
  Synthetic polypeptide
ATALQPGR

SEQ ID NO: 8943 - protein, 8 aa, Artificial Sequence
  Synthetic polypeptide
ATALQPGR

SEQ ID NO: 8944 - protein, 12 aa, Artificial Sequence
  Synthetic polypeptide
DLGLCRMCFANK

SEQ ID NO: 8945 - protein, 13 aa, Artificial Sequence
  Synthetic polypeptide
WAGHSASCSSLRK

SEQ ID NO: 8946 - protein, 16 aa, Artificial Sequence
  Synthetic polypeptide
PGAWLMPVIPALWEAK

SEQ ID NO: 8947 - protein, 9 aa, Artificial Sequence
  Synthetic polypeptide
GVGGGLGGK

SEQ ID NO: 8948 - protein, 15 aa, Artificial Sequence
  Synthetic polypeptide
MLLHMRSMDSQHQHR

SEQ ID NO: 8949 - protein, 8 aa, Artificial Sequence
  Synthetic polypeptide
TLLPGTLR

SEQ ID NO: 8950 - protein, 15 aa, Artificial Sequence
  Synthetic polypeptide
GALQLPQLSDCEERR

SEQ ID NO: 8951 - protein, 21 aa, Artificial Sequence
  Synthetic polypeptide
VLDMFYTLLWLVSTWIYTYVK

SEQ ID NO: 8952 - protein, 16 aa, Artificial Sequence
  Synthetic polypeptide
VDSVGIELEETLVVGR

SEQ ID NO: 8953 - protein, 16 aa, Artificial Sequence
  Synthetic polypeptide
VDSVGIELEETLVVGR

SEQ ID NO: 8954 - protein, 16 aa, Artificial Sequence
  Synthetic polypeptide
VDSVGIELEETLVVGR

SEQ ID NO: 8955 - protein, 8 aa, Artificial Sequence
  Synthetic polypeptide
LNTLGSLR

SEQ ID NO: 8956 - protein, 9 aa, Artificial Sequence
  Synthetic polypeptide
CENATVMDK

SEQ ID NO: 8957 - protein, 23 aa, Artificial Sequence
  Synthetic polypeptide
AGALLQALDQTSSLQRGLPDCPV

SEQ ID NO: 8958 - protein, 23 aa, Artificial Sequence
  Synthetic polypeptide
AGALLQALDQTSSLQRGLPDCPV

SEQ ID NO: 8959 - protein, 12 aa, Artificial Sequence
  Synthetic polypeptide
MILDQLDIHVKK

SEQ ID NO: 8960 - protein, 11 aa, Artificial Sequence
  Synthetic polypeptide
TLTFMNCLFLK

SEQ ID NO: 8961 - protein, 11 aa, Artificial Sequence
  Synthetic polypeptide
TLTFMNCLFLK

SEQ ID NO: 8962 - protein, 16 aa, Artificial Sequence
  Synthetic polypeptide
MTLEHMGSNCVGPLIR

SEQ ID NO: 8963 - protein, 8 aa, Artificial Sequence
  Synthetic polypeptide
IAGAQELK

SEQ ID NO: 8964 - protein, 8 aa, Artificial Sequence
  Synthetic polypeptide
IAGAQELK

SEQ ID NO: 8965 - protein, 14 aa, Artificial Sequence
  Synthetic polypeptide
MTLSPFVQCTLLAK

SEQ ID NO: 8966 - protein, 11 aa, Artificial Sequence
  Synthetic polypeptide
KESLEASMMLK

SEQ ID NO: 8967 - protein, 11 aa, Artificial Sequence
  Synthetic polypeptide
KESLEASMMLK

SEQ ID NO: 8968 - protein, 12 aa, Artificial Sequence
  Synthetic polypeptide
AASLSLGCLNNK

SEQ ID NO: 8969 - protein, 8 aa, Artificial Sequence
  Synthetic polypeptide
VLASMWTK

SEQ ID NO: 8970 - protein, 13 aa, Artificial Sequence
  Synthetic polypeptide
TSITCSHVYMGAK

SEQ ID NO: 8971 - protein, 10 aa, Artificial Sequence
  Synthetic polypeptide
LLEDVFCLPK

SEQ ID NO: 8972 - protein, 10 aa, Artificial Sequence
  Synthetic polypeptide
LLEDVFCLPK

SEQ ID NO: 8973 - protein, 10 aa, Artificial Sequence
  Synthetic polypeptide
LLEDVFCLPK

SEQ ID NO: 8974 - protein, 10 aa, Artificial Sequence
  Synthetic polypeptide
LLEDVFCLPK

SEQ ID NO: 8975 - protein, 9 aa, Artificial Sequence
  Synthetic polypeptide
SLSARPPIV

SEQ ID NO: 8976 - protein, 12 aa, Artificial Sequence
  Synthetic polypeptide
LNLGGRGCSESR

SEQ ID NO: 8977 - protein, 12 aa, Artificial Sequence
  Synthetic polypeptide
LNLGGRGCSESR

SEQ ID NO: 8978 - protein, 13 aa, Artificial Sequence
  Synthetic polypeptide
LAWATWGEPVSAK

SEQ ID NO: 8979 - protein, 13 aa, Artificial Sequence
  Synthetic polypeptide
LAWATWGEPVSAK

SEQ ID NO: 8980 - protein, 13 aa, Artificial Sequence
  Synthetic polypeptide
LAWATWGEPVSAK

SEQ ID NO: 8981 - protein, 13 aa, Artificial Sequence
  Synthetic polypeptide
LAWATWGEPVSAK

SEQ ID NO: 8982 - protein, 12 aa, Artificial Sequence
  Synthetic polypeptide
HSPPGSGASFLK

SEQ ID NO: 8983 - protein, 12 aa, Artificial Sequence
  Synthetic polypeptide
GNLDTKTPGMPK

SEQ ID NO: 8984 - protein, 12 aa, Artificial Sequence
  Synthetic polypeptide
GNLDTKTPGMPK

SEQ ID NO: 8985 - protein, 16 aa, Artificial Sequence
  Synthetic polypeptide
MGTVAHAYNPSTLGGR

SEQ ID NO: 8986 - protein, 16 aa, Artificial Sequence
  Synthetic polypeptide
MGTVAHAYNPSTLGGR

SEQ ID NO: 8987 - protein, 11 aa, Artificial Sequence
  Synthetic polypeptide
EETPDTSEHLK

SEQ ID NO: 8988 - protein, 11 aa, Artificial Sequence
  Synthetic polypeptide
EETPDTSEHLK

SEQ ID NO: 8989 - protein, 11 aa, Artificial Sequence
  Synthetic polypeptide
EETPDTSEHLK

SEQ ID NO: 8990 - protein, 23 aa, Artificial Sequence
  Synthetic polypeptide
TVTGINNDFSGGLGQSQLLTFWK

SEQ ID NO: 8991 - protein, 16 aa, Artificial Sequence
  Synthetic polypeptide
MPQYDNMTHASQTNIK

SEQ ID NO: 8992 - protein, 13 aa, Artificial Sequence
  Synthetic polypeptide
ATSLWYFMAAQAK

SEQ ID NO: 8993 - protein, 13 aa, Artificial Sequence
  Synthetic polypeptide
ATSLWYFMAAQAK

SEQ ID NO: 8994 - protein, 13 aa, Artificial Sequence
  Synthetic polypeptide
ATSLWYFMAAQAK

SEQ ID NO: 8995 - protein, 17 aa, Artificial Sequence
  Synthetic polypeptide
IAGPGPDQLNQNLHFNK

SEQ ID NO: 8996 - protein, 17 aa, Artificial Sequence
  Synthetic polypeptide
IAGPGPDQLNQNLHFNK

SEQ ID NO: 8997 - protein, 18 aa, Artificial Sequence
  Synthetic polypeptide
AGVVAHACNPDTLGGQGR

SEQ ID NO: 8998 - protein, 10 aa, Artificial Sequence
  Synthetic polypeptide
DHIMFSLFEK

SEQ ID NO: 8999 - protein, 11 aa, Artificial Sequence
  Synthetic polypeptide
AHELEISLGNK

SEQ ID NO: 9000 - protein, 10 aa, Artificial Sequence
  Synthetic polypeptide
TQEVEVAVNR

SEQ ID NO: 9001 - protein, 10 aa, Artificial Sequence
  Synthetic polypeptide
TQEVEVAVNR

SEQ ID NO: 9002 - protein, 15 aa, Artificial Sequence
  Synthetic polypeptide
TSRSCVAGVSFTLAK

SEQ ID NO: 9003 - protein, 15 aa, Artificial Sequence
  Synthetic polypeptide
GGGGGGRGGGGGGGR

SEQ ID NO: 9004 - protein, 21 aa, Artificial Sequence
  Synthetic polypeptide
TDYDLHVLSLGSSISLQKSHR

SEQ ID NO: 9005 - protein, 19 aa, Artificial Sequence
  Synthetic polypeptide
MGTVAHVCNPSTLGGQGRR

SEQ ID NO: 9006 - protein, 22 aa, Artificial Sequence
  Synthetic polypeptide
MGTVAHACNPRTLGGREVWITR

SEQ ID NO: 9007 - protein, 12 aa, Artificial Sequence
  Synthetic polypeptide
LFLVSGHIMLFR

SEQ ID NO: 9008 - protein, 12 aa, Artificial Sequence
  Synthetic polypeptide
GILEMNEGMMSK

SEQ ID NO: 9009 - protein, 16 aa, Artificial Sequence
  Synthetic polypeptide
MGTVAHTYNPSTLGGR

SEQ ID NO: 9010 - protein, 10 aa, Artificial Sequence
  Synthetic polypeptide
MEVICSPPPR

SEQ ID NO: 9011 - protein, 9 aa, Artificial Sequence
  Synthetic polypeptide
MASASPTIK

SEQ ID NO: 9012 - protein, 9 aa, Artificial Sequence
  Synthetic polypeptide
MASASPTIK

SEQ ID NO: 9013 - protein, 15 aa, Artificial Sequence
  Synthetic polypeptide
NQSQSHLNVGLLASR

SEQ ID NO: 9014 - protein, 15 aa, Artificial Sequence
  Synthetic polypeptide
NQSQSHLNVGLLASR

SEQ ID NO: 9015 - protein, 15 aa, Artificial Sequence
  Synthetic polypeptide
NQSQSHLNVGLLASR

SEQ ID NO: 9016 - protein, 15 aa, Artificial Sequence
  Synthetic polypeptide
NQSQSHLNVGLLASR

SEQ ID NO: 9017 - protein, 15 aa, Artificial Sequence
  Synthetic polypeptide
NQSQSHLNVGLLASR

SEQ ID NO: 9018 - protein, 22 aa, Artificial Sequence
  Synthetic polypeptide
VISAFPSEVPGSSHSGVPDSGR

SEQ ID NO: 9019 - protein, 22 aa, Artificial Sequence
  Synthetic polypeptide
VISAFPSEVPGSSHSGVPDSGR

SEQ ID NO: 9020 - protein, 10 aa, Artificial Sequence
  Synthetic polypeptide
RDLFLLAFCR

SEQ ID NO: 9021 - protein, 16 aa, Artificial Sequence
  Synthetic polypeptide
WGGQAPPGQPPRPGGR

SEQ ID NO: 9022 - protein, 16 aa, Artificial Sequence
  Synthetic polypeptide
WGGQAPPGQPPRPGGR

SEQ ID NO: 9023 - protein, 16 aa, Artificial Sequence
  Synthetic polypeptide
WGGQAPPGQPPRPGGR

SEQ ID NO: 9024 - protein, 15 aa, Artificial Sequence
  Synthetic polypeptide
DLFASLSTTIVSFLR

SEQ ID NO: 9025 - protein, 9 aa, Artificial Sequence
  Synthetic polypeptide
HFIAMMYFK

SEQ ID NO: 9026 - protein, 18 aa, Artificial Sequence
  Synthetic polypeptide
NLDILSGSPTDWLCNLGR

SEQ ID NO: 9027 - protein, 18 aa, Artificial Sequence
  Synthetic polypeptide
NLDILSGSPTDWLCNLGR

SEQ ID NO: 9028 - protein, 18 aa, Artificial Sequence
  Synthetic polypeptide
NLDILSGSPTDWLCNLGR

SEQ ID NO: 9029 - protein, 18 aa, Artificial Sequence
  Synthetic polypeptide
NLDILSGSPTDWLCNLGR

SEQ ID NO: 9030 - protein, 18 aa, Artificial Sequence
  Synthetic polypeptide
NLDILSGSPTDWLCNLGR

SEQ ID NO: 9031 - protein, 18 aa, Artificial Sequence
  Synthetic polypeptide
NLDILSGSPTDWLCNLGR

SEQ ID NO: 9032 - protein, 18 aa, Artificial Sequence
  Synthetic polypeptide
NLDILSGSPTDWLCNLGR

SEQ ID NO: 9033 - protein, 18 aa, Artificial Sequence
  Synthetic polypeptide
NLDILSGSPTDWLCNLGR

SEQ ID NO: 9034 - protein, 13 aa, Artificial Sequence
  Synthetic polypeptide
MGIGAPNQQVLSR

SEQ ID NO: 9035 - protein, 11 aa, Artificial Sequence
  Synthetic polypeptide
VNILFGYTIWK

SEQ ID NO: 9036 - protein, 10 aa, Artificial Sequence
  Synthetic polypeptide
TAINSNFSGR

SEQ ID NO: 9037 - protein, 10 aa, Artificial Sequence
  Synthetic polypeptide
TAINSNFSGR

SEQ ID NO: 9038 - protein, 10 aa, Artificial Sequence
  Synthetic polypeptide
TAINSNFSGR

SEQ ID NO: 9039 - protein, 10 aa, Artificial Sequence
  Synthetic polypeptide
TAINSNFSGR

SEQ ID NO: 9040 - protein, 10 aa, Artificial Sequence
  Synthetic polypeptide
TAINSNFSGR

SEQ ID NO: 9041 - protein, 10 aa, Artificial Sequence
  Synthetic polypeptide
GVFPSAMTNK

SEQ ID NO: 9042 - protein, 7 aa, Artificial Sequence
  Synthetic polypeptide
ENDCQPR

SEQ ID NO: 9043 - protein, 15 aa, Artificial Sequence
  Synthetic polypeptide
DLLCFPFCHDLSFLK

SEQ ID NO: 9044 - protein, 11 aa, Artificial Sequence
  Synthetic polypeptide
IHLSIHYNNLK

SEQ ID NO: 9045 - protein, 17 aa, Artificial Sequence
  Synthetic polypeptide
SLSNPFLLFLCSVLYCR

SEQ ID NO: 9046 - protein, 9 aa, Artificial Sequence
  Synthetic polypeptide
HEDDLKPEV

SEQ ID NO: 9047 - protein, 11 aa, Artificial Sequence
  Synthetic polypeptide
GDACLWSQLFR

SEQ ID NO: 9048 - protein, 20 aa, Artificial Sequence
  Synthetic polypeptide
ILENANSSIVTTDLYLPGHR

SEQ ID NO: 9049 - protein, 20 aa, Artificial Sequence
  Synthetic polypeptide
ILENANSSIVTTDLYLPGHR

SEQ ID NO: 9050 - protein, 14 aa, Artificial Sequence
  Synthetic polypeptide
GGSHLQSQHFGRPR

SEQ ID NO: 9051 - protein, 14 aa, Artificial Sequence
  Synthetic polypeptide
GGSHLQSQHFGRPR

SEQ ID NO: 9052 - protein, 13 aa, Artificial Sequence
  Synthetic polypeptide
THGIWETSHSAQK

SEQ ID NO: 9053 - protein, 13 aa, Artificial Sequence
  Synthetic polypeptide
THGIWETSHSAQK

SEQ ID NO: 9054 - protein, 13 aa, Artificial Sequence
  Synthetic polypeptide
ETVVEWLPGAEVK

SEQ ID NO: 9055 - protein, 13 aa, Artificial Sequence
  Synthetic polypeptide
ETVVEWLPGAEVK

SEQ ID NO: 9056 - protein, 13 aa, Artificial Sequence
  Synthetic polypeptide
ETVVEWLPGAEVK

SEQ ID NO: 9057 - protein, 13 aa, Artificial Sequence
  Synthetic polypeptide
ETVVEWLPGAEVK

SEQ ID NO: 9058 - protein, 17 aa, Artificial Sequence
  Synthetic polypeptide
PGMVAGPEAGESLEHRR

SEQ ID NO: 9059 - protein, 16 aa, Artificial Sequence
  Synthetic polypeptide
MGVVAHACNPSTLGGR

SEQ ID NO: 9060 - protein, 16 aa, Artificial Sequence
  Synthetic polypeptide
MGVVAHACNPSTLGGR

SEQ ID NO: 9061 - protein, 16 aa, Artificial Sequence
  Synthetic polypeptide
MGVVAHACNPSTLGGR

SEQ ID NO: 9062 - protein, 16 aa, Artificial Sequence
  Synthetic polypeptide
MGVVAHACNPSTLGGR

SEQ ID NO: 9063 - protein, 12 aa, Artificial Sequence
  Synthetic polypeptide
LELALLAPQACR

SEQ ID NO: 9064 - protein, 14 aa, Artificial Sequence
  Synthetic polypeptide
IQSFTNISFSMPHR

SEQ ID NO: 9065 - protein, 14 aa, Artificial Sequence
  Synthetic polypeptide
IQSFTNISFSMPHR

SEQ ID NO: 9066 - protein, 14 aa, Artificial Sequence
  Synthetic polypeptide
IQSFTNISFSMPHR

SEQ ID NO: 9067 - protein, 9 aa, Artificial Sequence
  Synthetic polypeptide
GFVPVFMLR

SEQ ID NO: 9068 - protein, 9 aa, Artificial Sequence
  Synthetic polypeptide
MSIISGLDK

SEQ ID NO: 9069 - protein, 18 aa, Artificial Sequence
  Synthetic polypeptide
GLTPVIPALWEAEAGGSR

SEQ ID NO: 9070 - protein, 25 aa, Artificial Sequence
  Synthetic polypeptide
TWIPVQATSCTWMSHLLTLSLSICK

SEQ ID NO: 9071 - protein, 12 aa, Artificial Sequence
  Synthetic polypeptide
CGGSHLSQHFGR

SEQ ID NO: 9072 - protein, 12 aa, Artificial Sequence
  Synthetic polypeptide
CGGSHLSQHFGR

SEQ ID NO: 9073 - protein, 16 aa, Artificial Sequence
  Synthetic polypeptide
MGTAAHACNPSTLGGR

SEQ ID NO: 9074 - protein, 16 aa, Artificial Sequence
  Synthetic polypeptide
MGAVVHACKPSTLGGR

SEQ ID NO: 9075 - protein, 12 aa, Artificial Sequence
  Synthetic polypeptide
CPETFLDGTLGR

SEQ ID NO: 9076 - protein, 20 aa, Artificial Sequence
  Synthetic polypeptide
MGAVAHACNPGTLGEAGGSR

SEQ ID NO: 9077 - protein, 19 aa, Artificial Sequence
  Synthetic polypeptide
IPVIPATWEAEAGESLEPR

SEQ ID NO: 9078 - protein, 14 aa, Artificial Sequence
  Synthetic polypeptide
NLESSPLHSRCPAK

SEQ ID NO: 9079 - protein, 12 aa, Artificial Sequence
  Synthetic polypeptide
LVIHPMICMNLR

SEQ ID NO: 9080 - protein, 12 aa, Artificial Sequence
  Synthetic polypeptide
LVIHPMICMNLR

SEQ ID NO: 9081 - protein, 12 aa, Artificial Sequence
  Synthetic polypeptide
LVIHPMICMNLR

SEQ ID NO: 9082 - protein, 12 aa, Artificial Sequence
  Synthetic polypeptide
LVIHPMICMNLR

SEQ ID NO: 9083 - protein, 12 aa, Artificial Sequence
  Synthetic polypeptide
LVIHPMICMNLR

SEQ ID NO: 9084 - protein, 10 aa, Artificial Sequence
  Synthetic polypeptide
ESLEASMMLK

SEQ ID NO: 9085 - protein, 10 aa, Artificial Sequence
  Synthetic polypeptide
ESLEASMMLK

SEQ ID NO: 9086 - protein, 11 aa, Artificial Sequence
  Synthetic polypeptide
MAISSLSCQMK

SEQ ID NO: 9087 - protein, 14 aa, Artificial Sequence
  Synthetic polypeptide
ALEIWPIQIEICCK

SEQ ID NO: 9088 - protein, 17 aa, Artificial Sequence
  Synthetic polypeptide
MLLQEGVGPAAFVSSGR

SEQ ID NO: 9089 - protein, 8 aa, Artificial Sequence
  Synthetic polypeptide
AGGSLEAK

SEQ ID NO: 9090 - protein, 8 aa, Artificial Sequence
  Synthetic polypeptide
AGGSLEAK

SEQ ID NO: 9091 - protein, 8 aa, Artificial Sequence
  Synthetic polypeptide
AGGSLEAK

SEQ ID NO: 9092 - protein, 16 aa, Artificial Sequence
  Synthetic polypeptide
LGSEERLRPAATPSGR

SEQ ID NO: 9093 - protein, 16 aa, Artificial Sequence
  Synthetic polypeptide
LGSEERLRPAATPSGR

SEQ ID NO: 9094 - protein, 16 aa, Artificial Sequence
  Synthetic polypeptide
LGSEERLRPAATPSGR

SEQ ID NO: 9095 - protein, 16 aa, Artificial Sequence
  Synthetic polypeptide
LGSEERLRPAATPSGR

SEQ ID NO: 9096 - protein, 16 aa, Artificial Sequence
  Synthetic polypeptide
LGSEERLRPAATPSGR

SEQ ID NO: 9097 - protein, 15 aa, Artificial Sequence
  Synthetic polypeptide
LVSNSVLAPSVHSPK

SEQ ID NO: 9098 - protein, 18 aa, Artificial Sequence
  Synthetic polypeptide
NESESAGIPLACSSLSSK

SEQ ID NO: 9099 - protein, 17 aa, Artificial Sequence
  Synthetic polypeptide
EVGGDQPPARPAAPSGR

SEQ ID NO: 9100 - protein, 10 aa, Artificial Sequence
  Synthetic polypeptide
WADHLTSGVR

SEQ ID NO: 9101 - protein, 10 aa, Artificial Sequence
  Synthetic polypeptide
WADHLTSGVR

SEQ ID NO: 9102 - protein, 10 aa, Artificial Sequence
  Synthetic polypeptide
WADHLTSGVR

SEQ ID NO: 9103 - protein, 10 aa, Artificial Sequence
  Synthetic polypeptide
WADHLTSGVR

SEQ ID NO: 9104 - protein, 10 aa, Artificial Sequence
  Synthetic polypeptide
WADHLTSGVR

SEQ ID NO: 9105 - protein, 10 aa, Artificial Sequence
  Synthetic polypeptide
WADHLTSGVR

SEQ ID NO: 9106 - protein, 12 aa, Artificial Sequence
  Synthetic polypeptide
MAPIYGGSNLGR

SEQ ID NO: 9107 - protein, 8 aa, Artificial Sequence
  Synthetic polypeptide
MLLGLLAK

SEQ ID NO: 9108 - protein, 10 aa, Artificial Sequence
  Synthetic polypeptide
MFVATSSMLK

SEQ ID NO: 9109 - protein, 15 aa, Artificial Sequence
  Synthetic polypeptide
TGTTPVYSSQHEQHR

SEQ ID NO: 9110 - protein, 16 aa, Artificial Sequence
  Synthetic polypeptide
SVTVSHNPQLGPSGCR

SEQ ID NO: 9111 - protein, 16 aa, Artificial Sequence
  Synthetic polypeptide
SVTVSHNPQLGPSGCR

SEQ ID NO: 9112 - protein, 17 aa, Artificial Sequence
  Synthetic polypeptide
LQMVLQMESQMSSTHGF

SEQ ID NO: 9113 - protein, 12 aa, Artificial Sequence
  Synthetic polypeptide
TCPSAMIVSFLK

SEQ ID NO: 9114 - protein, 12 aa, Artificial Sequence
  Synthetic polypeptide
TCPSAMIVSFLK

SEQ ID NO: 9115 - protein, 12 aa, Artificial Sequence
  Synthetic polypeptide
TCPSAMIVSFLK

SEQ ID NO: 9116 - protein, 12 aa, Artificial Sequence
  Synthetic polypeptide
TCPSAMIVSFLK

SEQ ID NO: 9117 - protein, 12 aa, Artificial Sequence
  Synthetic polypeptide
TCPSAMIVSFLK

SEQ ID NO: 9118 - protein, 12 aa, Artificial Sequence
  Synthetic polypeptide
TCPSAMIVSFLK

SEQ ID NO: 9119 - protein, 24 aa, Artificial Sequence
  Synthetic polypeptide
MGAVAHAIISALWEAEVGGSLEPR

SEQ ID NO: 9120 - protein, 15 aa, Artificial Sequence
  Synthetic polypeptide
MLGAVAHNCDPSTLR

SEQ ID NO: 9121 - protein, 11 aa, Artificial Sequence
  Synthetic polypeptide
WLMPVIPALGR

SEQ ID NO: 9122 - protein, 18 aa, Artificial Sequence
  Synthetic polypeptide
LCTDVEHDFTGFVAEPVK

SEQ ID NO: 9123 - protein, 10 aa, Artificial Sequence
  Synthetic polypeptide
TALCVLLPMK

SEQ ID NO: 9124 - protein, 10 aa, Artificial Sequence
  Synthetic polypeptide
LGGSTQPSAR

SEQ ID NO: 9125 - protein, 11 aa, Artificial Sequence
  Synthetic polypeptide
QHQEVTLYGLK

SEQ ID NO: 9126 - protein, 11 aa, Artificial Sequence
  Synthetic polypeptide
QHQEVTLYGLK

SEQ ID NO: 9127 - protein, 11 aa, Artificial Sequence
  Synthetic polypeptide
QHQEVTLYGLK

SEQ ID NO: 9128 - protein, 15 aa, Artificial Sequence
  Synthetic polypeptide
LSISIHMLLSGSQPR

SEQ ID NO: 9129 - protein, 17 aa, Artificial Sequence
  Synthetic polypeptide
LQMVLQMESQMSSTHGF

SEQ ID NO: 9130 - protein, 14 aa, Artificial Sequence
  Synthetic polypeptide
DGQTGTAPVYSSQR

SEQ ID NO: 9131 - protein, 16 aa, Artificial Sequence
  Synthetic polypeptide
GCHGSCLQSQHFGRPR

SEQ ID NO: 9132 - protein, 16 aa, Artificial Sequence
  Synthetic polypeptide
GCHGSCLQSQHFGRPR

SEQ ID NO: 9133 - protein, 22 aa, Artificial Sequence
  Synthetic polypeptide
QGLMPVTPALWEAEVGGSPGPR

SEQ ID NO: 9134 - protein, 15 aa, Artificial Sequence
  Synthetic polypeptide
GSFPAQTLFLPAAIR

SEQ ID NO: 9135 - protein, 15 aa, Artificial Sequence
  Synthetic polypeptide
GSFPAQTLFLPAAIR

SEQ ID NO: 9136 - protein, 10 aa, Artificial Sequence
  Synthetic polypeptide
KLTGRGGGHL

SEQ ID NO: 9137 - protein, 10 aa, Artificial Sequence
  Synthetic polypeptide
KLTGRGGGHL

SEQ ID NO: 9138 - protein, 10 aa, Artificial Sequence
  Synthetic polypeptide
MAISPQPPHR

SEQ ID NO: 9139 - protein, 10 aa, Artificial Sequence
  Synthetic polypeptide
MAISPQPPHR

SEQ ID NO: 9140 - protein, 10 aa, Artificial Sequence
  Synthetic polypeptide
MAISPQPPHR

SEQ ID NO: 9141 - protein, 18 aa, Artificial Sequence
  Synthetic polypeptide
VLELETSLGNMETSSLQK

SEQ ID NO: 9142 - protein, 14 aa, Artificial Sequence
  Synthetic polypeptide
TPGRNGHLESGHLK

SEQ ID NO: 9143 - protein, 17 aa, Artificial Sequence
  Synthetic polypeptide
GLSPILLGTFPCCCHVK

SEQ ID NO: 9144 - protein, 10 aa, Artificial Sequence
  Synthetic polypeptide
MFVATSSMLK

SEQ ID NO: 9145 - protein, 15 aa, Artificial Sequence
  Synthetic polypeptide
ESCQMHVLGPHPDPR

SEQ ID NO: 9146 - protein, 15 aa, Artificial Sequence
  Synthetic polypeptide
ESCQMHVLGPHPDPR

SEQ ID NO: 9147 - protein, 15 aa, Artificial Sequence
  Synthetic polypeptide
ESCQMHVLGPHPDPR

SEQ ID NO: 9148 - protein, 14 aa, Artificial Sequence
  Synthetic polypeptide
ICSFFPEWRPRAHR

SEQ ID NO: 9149 - protein, 15 aa, Artificial Sequence
  Synthetic polypeptide
GSSLYMLSLACCHVK

SEQ ID NO: 9150 - protein, 15 aa, Artificial Sequence
  Synthetic polypeptide
GSSLYMLSLACCHVK

SEQ ID NO: 9151 - protein, 15 aa, Artificial Sequence
  Synthetic polypeptide
GSSLYMLSLACCHVK

SEQ ID NO: 9152 - protein, 15 aa, Artificial Sequence
  Synthetic polypeptide
GSSLYMLSLACCHVK

SEQ ID NO: 9153 - protein, 15 aa, Artificial Sequence
  Synthetic polypeptide
GSSLYMLSLACCHVK

SEQ ID NO: 9154 - protein, 13 aa, Artificial Sequence
  Synthetic polypeptide
VSDQYSTVYCIAR

SEQ ID NO: 9155 - protein, 15 aa, Artificial Sequence
  Synthetic polypeptide
MQPFVSFSYLPMTWK

SEQ ID NO: 9156 - protein, 10 aa, Artificial Sequence
  Synthetic polypeptide
MNLTPLSFMR

SEQ ID NO: 9157 - protein, 14 aa, Artificial Sequence
  Synthetic polypeptide
MGMVAHACNPALWK

SEQ ID NO: 9158 - protein, 14 aa, Artificial Sequence
  Synthetic polypeptide
MGMVAHACNPALWK

SEQ ID NO: 9159 - protein, 14 aa, Artificial Sequence
  Synthetic polypeptide
MGMVAHACNPALWK

SEQ ID NO: 9160 - protein, 14 aa, Artificial Sequence
  Synthetic polypeptide
MGMVAHACNPALWK

SEQ ID NO: 9161 - protein, 15 aa, Artificial Sequence
  Synthetic polypeptide
CCPLTFDFSDSITVR

SEQ ID NO: 9162 - protein, 16 aa, Artificial Sequence
  Synthetic polypeptide
MGMMSHTCNPSALGGR

SEQ ID NO: 9163 - protein, 16 aa, Artificial Sequence
  Synthetic polypeptide
MGMMSHTCNPSALGGR

SEQ ID NO: 9164 - protein, 14 aa, Artificial Sequence
  Synthetic polypeptide
AFTFIHHTLTDSPR

SEQ ID NO: 9165 - protein, 18 aa, Artificial Sequence
  Synthetic polypeptide
MLSFMRPPQPCFLYSLWN

SEQ ID NO: 9166 - protein, 746 aa, Artificial Sequence
  Synthetic polypeptide
MDTSGHFHDSGVGDLDEDPKCPCPSSGDEQQQQQQQQQQQQPPPPAPPAAPQQPLGPSLQPQPPQLQQQQQQQQQQQQQQPPHPLSQLAQLQSQPVHPGLLHSSPTAFRAPPSSNSTAILHPSSRQGSQLNLNDHLLGHSPSSTATSGPGGGSRHRQASPLVHRRDSNPFTEIAMSSCKYSGGVMKPLSRLSASRRNLIEAETEGQPLQLFSPSNPPEIVISSREDNHAHQTLLHHPNATHNHQHAGTTASSTTFPKANKRKNQNIGYKLGHRRALFEKRKRLSDYALIFGMFGIVVMVIETELSWGLYSKDSMFSLALKCLISLSTIILLGLIIAYHTREVQLFVIDNGADDWRIAMTYERILYISLEMLVCAIHPIPGEYKFFWTARLAFSYTPSRAEADVDIILSIPMFLRLYLIARVMLLHSKLFTDASSRSIGALNKINFNTRFVMKTLMTICPGTVLLVFSISLWIIAAWTVRVCESPESPAQPSGSSLPAWYHDQQDVTSNFLGAMWLISITFLSIGYGDMVPHTYCGKGVCLLTGIMGAGCTALVVAVVARKLELTKAEKHVHNFMMDTQLTKRIKNAAANVLRETWLIYKHTKLLKKIDHAKVRKHQRKFLQAIHQLRSVKMEQRKLSDQANTLVDLSKMQNVMYDLITELNDRSEDLEKQIGSLESKLEHLTASFNSLPLLIADTLRQQQQQLLSAIIEARGVSVAVGTTHTPISDSPIGVSSTSFPTPYTSSSSC

SEQ ID NO: 9167 - protein, 433 aa, Artificial Sequence
  Synthetic polypeptide
MFSLALKCLISLSTIILLGLIIAYHTREVQLFVIDNGADDWRIAMTYERILYISLEMLVCAIHPIPGEYKFFWTARLAFSYTPSRAEADVDIILSIPMFLRLYLIARVMLLHSKLFTDASSRSIGALNKINFNTRFVMKTLMTICPGTVLLVFSISLWIIAAWTVRVCESPESPAQPSGSSLPAWYHDQQDVTSNFLGAMWLISITFLSIGYGDMVPHTYCGKGVCLLTGIMGAGCTALVVAVVARKLELTKAEKHVHNFMMDTQLTKRIKNAAANVLRETWLIYKHTKLLKKIDHAKVRKHQRKFLQAIHQLRSVKMEQRKLSDQANTLVDLSKMQNVMYDLITELNDRSEDLEKQIGSLESKLEHLTASFNSLPLLIADTLRQQQQQLLSAIIEARGVSVAVGTTHTPISDSPIGVSSTSFPTPYTSSSSC

SEQ ID NO: 9168 - protein, 441 aa, Artificial Sequence
  Synthetic polypeptide
MERPIKDSMFSLALKCLISLSTIILLGLIIAYHTREVQLFVIDNGADDWRIAMTYERILYISLEMLVCAIHPIPGEYKFFWTARLAFSYTPSRAEADVDIILSIPMFLRLYLIARVMLLHSKLFTDASSRSIGALNKINFNTRFVMKTLMTICPGTVLLVFSISLWIIAAWTVRVCESPESPAQPSGSSLPAWYHDQQDVTSNFLGAMWLISITFLSIGYGDMVPHTYCGKGVCLLTGIMGAGCTALVVAVVARKLELTKAEKHVHNFMMDTQLTKRIKNAAANVLRETWLIYKHTKLLKKIDHAKVRKHQRKFLQAIHQLRSVKMEQRKLSDQANTLVDLSKMQNVMYDLITELNDRSEDLEKQIGSLESKLEHLTASFNSLPLLIADTLRQQQQQLLSAIIEARGVSVAVGTTHTPISDSPIGVSSTSFPTPYTSSSSC

SEQ ID NO: 9169 - protein, 746 aa, Artificial Sequence; identical to SEQ ID NO: 9166
  Synthetic polypeptide

SEQ ID NO: 9170 - protein, 433 aa, Artificial Sequence; identical to SEQ ID NO: 9167
  Synthetic polypeptide

SEQ ID NO: 9171 - protein, 441 aa, Artificial Sequence; identical to SEQ ID NO: 9168
  Synthetic polypeptide

SEQ ID NO: 9172 - protein, 746 aa, Artificial Sequence; identical to SEQ ID NO: 9166
  Synthetic polypeptide

SEQ ID NO: 9173 - protein, 433 aa, Artificial Sequence; identical to SEQ ID NO: 9167
  Synthetic polypeptide

SEQ ID NO: 9174 - protein, 441 aa, Artificial Sequence; identical to SEQ ID NO: 9168
  Synthetic polypeptide

SEQ ID NO: 9175 - protein, 581 aa, Artificial Sequence
  Synthetic polypeptide
MVPHAILARGRDVCRRNGLLILSVLSVIVGCLLGFFLRTRRLSPQGMVAHACNPSTLGGRGGRINKEISYFQFPGELLMRMLKMMILPLVVSSLMSGLASLDAKTSSRLGVLTVAYYLWTTFMAVIVGIFMVSIIHPGSAAQKETTEQSGKPIMSSADALLDLIRNMFPANLVEATFKQYRTKTTPVVKSPKVAPEEAPPRRILIYGVQEENGSHVQNFALDLTPPPEVVYKSEPGTSDGMNVLGIVFFSATMGIMLGRMGDSGAPLVSFCQCLNESVMKIVAVAVWYFPFGIVFLIAGKILEMDDPRAVGKKLGFYSVTVVCGLVLHGLFILPLLYFFITKKNPIVFIRGILQALLIALATSSSSATLPITFKCLLENNHIDRRIARFVLPVGATINMDGTALYEAVAAIFIAQVNNYELDFGQIITISITATAASIGAAGIPQAGLVTMVIVLTSVGLPTDDITLIIAVDWALDRFRTMINVLGDALAAGIMAHICRKDFARDTGTEKLLPCETKPVSLQEIVAAQQNGCVKSVAEASELTLGPTCPHHVPVQVEQDEELPAASLNHCTIQISELETNV

SEQ ID NO: 9176 - protein, 179 aa, Artificial Sequence
  Synthetic polypeptide
MVPHAILARGRDVCRRNGLLILSVLSVIVGCLLGFFLRTRRLSPQGMVAHACNPSTLGGRGGRINKEISYFQFPGELLMRMLKMMILPLVVSSLMSGLASLDAKTSSRLGVLTVAYYLWTTFMAVIVGIFMVSIIHPGSAAQKETTEQSGKPIMSSADALLDLIRQKEESWRNGPKGPG

SEQ ID NO: 9177 - protein, 491 aa, Artificial Sequence; identical to SEQ ID NO: 384
  Synthetic polypeptide

SEQ ID NO: 9178 - protein, 491 aa, Artificial Sequence; identical to SEQ ID NO: 384
  Synthetic polypeptide

SEQ ID NO: 9179 - protein, 491 aa, Artificial Sequence; identical to SEQ ID NO: 384
  Synthetic polypeptide

SEQ ID NO: 9180 - protein, 491 aa, Artificial Sequence; identical to SEQ ID NO: 384
  Synthetic polypeptide

SEQ ID NO: 9181 - protein, 541 aa, Artificial Sequence; identical to SEQ ID NO: 335
  Synthetic polypeptide

SEQ ID NO: 9182 - protein, 526 aa, Artificial Sequence; identical to SEQ ID NO: 356
  Synthetic polypeptide

SEQ ID NO: 9183 - protein, 233 aa, Artificial Sequence; identical to SEQ ID NO: 805
  Synthetic polypeptide

SEQ ID NO: 9184 - protein, 541 aa, Artificial Sequence; identical to SEQ ID NO: 335
  Synthetic polypeptide

SEQ ID NO: 9185 - protein, 526 aa, Artificial Sequence; identical to SEQ ID NO: 356
  Synthetic polypeptide

SEQ ID NO: 9186 - protein, 491 aa, Artificial Sequence
  Synthetic polypeptide
MWNLLHETDSAVATARRPRWLCAGALVLAGGFFLLGFLFGWFIKSSNEATNITPKHNMKAFLDELKAENIKKFLYNFTQIPHLAGTEQNFQLAKQIQSQWKEFGLDSVELAHYDVLLSYPNKTHPNYISIINEDGNEIFNTSLFEPPPPGYENVSDIVPPFSAFSPQGMPEGDLVYVNYARTEDFFKLERDMKINCSGKIVIARYGKVFRGNKVKNAQLAGAKGVILYSDPADYFAPGVKSYPDGWNLPGGGVQRGNILNLNGAGDPLTPGYPANEYAYRRGIAEAVGLPSIPVHPIGYYDAQKLLEKMGGSAPPDSSWRGSLKVPYNVGPGFTGNFSTQKVKMHIHSTNEVTRIYNVIGTLRGAVEPDRYVILGGHRDSWVFGGIDPQSGAAVVHEIVRSFGTLKKEGWRPRRTILFASWDAEEFGLLGSTEWAEENSRLLQERGVAYINADSSIEGNYTLRVDCTPLMYSLVHNLTKEPSPMIPPAEKP

SEQ ID NO: 9187 - protein, 476 aa, Artificial Sequence
  Synthetic polypeptide
MTAGSSYPLFLAAYACTGCLAERLGWFIKSSNEATNITPKHNMKAFLDELKAENIKKFLYNFTQIPHLAGTEQNFQLAKQIQSQWKEFGLDSVELAHYDVLLSYPNKTHPNYISIINEDGNEIFNTSLFEPPPPGYENVSDIVPPFSAFSPQGMPEGDLVYVNYARTEDFFKLERDMKINCSGKIVIARYGKVFRGNKVKNAQLAGAKGVILYSDPADYFAPGVKSYPDGWNLPGGGVQRGNILNLNGAGDPLTPGYPANEYAYRRGIAEAVGLPSIPVHPIGYYDAQKLLEKMGGSAPPDSSWRGSLKVPYNVGPGFTGNFSTQKVKMHIHSTNEVTRIYNVIGTLRGAVEPDRYVILGGHRDSWVFGGIDPQSGAAVVHEIVRSFGTLKKEGWRPRRTILFASWDAEEFGLLGSTEWAEENSRLLQERGVAYINADSSIEGNYTLRVDCTPLMYSLVHNLTKEPSPMIPPAEKP

SEQ ID NO: 9188 - protein, 183 aa, Artificial Sequence
  Synthetic polypeptide
MGGSAPPDSSWRGSLKVPYNVGPGFTGNFSTQKVKMHIHSTNEVTRIYNVIGTLRGAVEPDRYVILGGHRDSWVFGGIDPQSGAAVVHEIVRSFGTLKKEGWRPRRTILFASWDAEEFGLLGSTEWAEENSRLLQERGVAYINADSSIEGNYTLRVDCTPLMYSLVHNLTKEPSPMIPPAEKP

SEQ ID NO: 9189 - protein, 491 aa, Artificial Sequence; identical to SEQ ID NO: 9186
  Synthetic polypeptide

SEQ ID NO: 9190 - protein, 476 aa, Artificial Sequence; identical to SEQ ID NO: 9187
  Synthetic polypeptide

SEQ ID NO: 9191 - protein, 134 aa, Artificial Sequence
  Synthetic polypeptide
MAGQGLPLHVATLLTGLLECLGFAGVLFGWPSLVFVFKNEDYFKDLCGPDAGPIGNATGQADCKAQDERFSLIFTLGSFMNNFMTFPTGYIFDRFKTTVARLIAIFFYTTATLIIAFTSAGAVAHSCNPSTLGG

SEQ ID NO: 9192 - protein, 134 aa, Artificial Sequence; identical to SEQ ID NO: 9191
  Synthetic polypeptide

SEQ ID NO: 9193 - protein, 134 aa, Artificial Sequence; identical to SEQ ID NO: 9191
  Synthetic polypeptide

SEQ ID NO: 9194 - protein, 134 aa, Artificial Sequence; identical to SEQ ID NO: 9191
  Synthetic polypeptide

SEQ ID NO: 9195 - protein, 134 aa, Artificial Sequence; identical to SEQ ID NO: 9191
  Synthetic polypeptide

SEQ ID NO: 9196 - protein, 81 aa, Artificial Sequence
  Synthetic polypeptide
MGDLFSTPDCKAQDERFSLIFTLGSFMNNFMTFPTGYIFDRFKTTVARLIAIFFYTTATLIIAFTSAGAVAHSCNPSTLGG

SEQ ID NO: 9197 - protein, 134 aa, Artificial Sequence; identical to SEQ ID NO: 9191
  Synthetic polypeptide

SEQ ID NO: 9198 - protein, 134 aa, Artificial Sequence; identical to SEQ ID NO: 9191
  Synthetic polypeptide

SEQ ID NO: 9199 - protein, 147 aa, Artificial Sequence
  Synthetic polypeptide
MAGQGLPLHVATLLTGLLECLGFAGVLFGWPSLVFVFKNEDYFKDLCGPDAGPIGNATGQAGRLGCMGDLFSTPDCKAQDERFSLIFTLGSFMNNFMTFPTGYIFDRFKTTVARLIAIFFYTTATLIIAFTSAGAVAHSCNPSTLGG

SEQ ID NO: 9200 - protein, 134 aa, Artificial Sequence; identical to SEQ ID NO: 9191
  Synthetic polypeptide

SEQ ID NO: 9201 - protein, 134 aa, Artificial Sequence; identical to SEQ ID NO: 9191
  Synthetic polypeptide

SEQ ID NO: 9202 - protein, 134 aa, Artificial Sequence; identical to SEQ ID NO: 9191
  Synthetic polypeptide

SEQ ID NO: 9203 - protein, 134 aa, Artificial Sequence; identical to SEQ ID NO: 9191
  Synthetic polypeptide

SEQ ID NO: 9204 - protein, 134 aa, Artificial Sequence; identical to SEQ ID NO: 9191
  Synthetic polypeptide

SEQ ID NO: 9205 - protein, 81 aa, Artificial Sequence; identical to SEQ ID NO: 9196
  Synthetic polypeptide

SEQ ID NO: 9206 - protein, 134 aa, Artificial Sequence; identical to SEQ ID NO: 9191
  Synthetic polypeptide

SEQ ID NO: 9207 - protein, 134 aa, Artificial Sequence; identical to SEQ ID NO: 9191
  Synthetic polypeptide

SEQ ID NO: 9208 - protein, 147 aa, Artificial Sequence; identical to SEQ ID NO: 9199
  Synthetic polypeptide

SEQ ID NO: 9209 - protein, 134 aa, Artificial Sequence; identical to SEQ ID NO: 9191
  Synthetic polypeptide

SEQ ID NO: 9210 - protein, 134 aa, Artificial Sequence; identical to SEQ ID NO: 9191
  Synthetic polypeptide

SEQ ID NO: 9211 - protein, 134 aa, Artificial Sequence; identical to SEQ ID NO: 9191
  Synthetic polypeptide

SEQ ID NO: 9212 - protein, 134 aa, Artificial Sequence; identical to SEQ ID NO: 9191
  Synthetic polypeptide

SEQ ID NO: 9213 - protein, 134 aa, Artificial Sequence; identical to SEQ ID NO: 9191
  Synthetic polypeptide

SEQ ID NO: 9214 - protein, 81 aa, Artificial Sequence; identical to SEQ ID NO: 9196
  Synthetic polypeptide

SEQ ID NO: 9215 - protein, 134 aa, Artificial Sequence; identical to SEQ ID NO: 9191
  Synthetic polypeptide

SEQ ID NO: 9216 - protein, 134 aa, Artificial Sequence; identical to SEQ ID NO: 9191
  Synthetic polypeptide

SEQ ID NO: 9217 - protein, 147 aa, Artificial Sequence; identical to SEQ ID NO: 9199
  Synthetic polypeptide

SEQ ID NO: 9218 - protein, 134 aa, Artificial Sequence; identical to SEQ ID NO: 9191
  Synthetic polypeptide

SEQ ID NO: 9219 - protein, 134 aa, Artificial Sequence; identical to SEQ ID NO: 9191
  Synthetic polypeptide

SEQ ID NO: 9220 - protein, 81 aa, Artificial Sequence; identical to SEQ ID NO: 9196
  Synthetic polypeptide

SEQ ID NO: 9221 - protein, 134 aa, Artificial Sequence; identical to SEQ ID NO: 9191
  Synthetic polypeptide

SEQ ID NO: 9222 - protein, 134 aa, Artificial Sequence; identical to SEQ ID NO: 9191
  Synthetic polypeptide

SEQ ID NO: 9223 - protein, 147 aa, Artificial Sequence; identical to SEQ ID NO: 9199
  Synthetic polypeptide

SEQ ID NO: 9224 - protein, 134 aa, Artificial Sequence; identical to SEQ ID NO: 9191
  Synthetic polypeptide

SEQ ID NO: 9225 - protein, 134 aa, Artificial Sequence; identical to SEQ ID NO: 9191
  Synthetic polypeptide

SEQ ID NO: 9226 - protein, 134 aa, Artificial Sequence; identical to SEQ ID NO: 9191
  Synthetic polypeptide

SEQ ID NO: 9227 - protein, 134 aa, Artificial Sequence; identical to SEQ ID NO: 9191
  Synthetic polypeptide

SEQ ID NO: 9228 - protein, 134 aa, Artificial Sequence; identical to SEQ ID NO: 9191
  Synthetic polypeptide

SEQ ID NO: 9229 - protein, 134 aa, Artificial Sequence; identical to SEQ ID NO: 9191
  Synthetic polypeptide

SEQ ID NO: 9230 - protein, 134 aa, Artificial Sequence; identical to SEQ ID NO: 9191
  Synthetic polypeptide

SEQ ID NO: 9231 - protein, 134 aa, Artificial Sequence; identical to SEQ ID NO: 9191
  Synthetic polypeptide

SEQ ID NO: 9232 - protein, 81 aa, Artificial Sequence; identical to SEQ ID NO: 9196
  Synthetic polypeptide

SEQ ID NO: 9233 - protein, 134 aa, Artificial Sequence; identical to SEQ ID NO: 9191
  Synthetic polypeptide

SEQ ID NO: 9234 - protein, 134 aa, Artificial Sequence; identical to SEQ ID NO: 9191
  Synthetic polypeptide

SEQ ID NO: 9235 - protein, 147 aa, Artificial Sequence; identical to SEQ ID NO: 9199
  Synthetic polypeptide

SEQ ID NO: 9236 - protein, 134 aa, Artificial Sequence; identical to SEQ ID NO: 9191
  Synthetic polypeptide

SEQ ID NO: 9237 - protein, 134 aa, Artificial Sequence; identical to SEQ ID NO: 9191
  Synthetic polypeptide

SEQ ID NO: 9238 - protein, 134 aa, Artificial Sequence; identical to SEQ ID NO: 9191
  Synthetic polypeptide

SEQ ID NO: 9239 - protein, 134 aa, Artificial Sequence; identical to SEQ ID NO: 9191
  Synthetic polypeptide

SEQ ID NO: 9240 - protein, 134 aa, Artificial Sequence; identical to SEQ ID NO: 9191
  Synthetic polypeptide

SEQ ID NO: 9241 - protein, 81 aa, Artificial Sequence; identical to SEQ ID NO: 9196
  Synthetic polypeptide

SEQ ID NO: 9242 - protein, 134 aa, Artificial Sequence; identical to SEQ ID NO: 9191
  Synthetic polypeptide

SEQ ID NO: 9243 - protein, 134 aa, Artificial Sequence; identical to SEQ ID NO: 9191
  Synthetic polypeptide

SEQ ID NO: 9244 - protein, 147 aa, Artificial Sequence; identical to SEQ ID NO: 9199
  Synthetic polypeptide

SEQ ID NO: 9245 - protein, 134 aa, Artificial Sequence; identical to SEQ ID NO: 9191
  Synthetic polypeptide

SEQ ID NO: 9246 - protein, 134 aa, Artificial Sequence; identical to SEQ ID NO: 9191
  Synthetic polypeptide

SEQ ID NO: 9247 - protein, 134 aa, Artificial Sequence; identical to SEQ ID NO: 9191
  Synthetic polypeptide

SEQ ID NO: 9248 - protein, 134 aa, Artificial Sequence; identical to SEQ ID NO: 9191
  Synthetic polypeptide

SEQ ID NO: 9249 - protein, 134 aa, Artificial Sequence; identical to SEQ ID NO: 9191
  Synthetic polypeptide

SEQ ID NO: 9250 - protein, 81 aa, Artificial Sequence; identical to SEQ ID NO: 9196
  Synthetic polypeptide

SEQ ID NO: 9251 - protein, 134 aa, Artificial Sequence; identical to SEQ ID NO: 9191
  Synthetic polypeptide

SEQ ID NO: 9252 - protein, 134 aa, Artificial Sequence; identical to SEQ ID NO: 9191
  Synthetic polypeptide

SEQ ID NO: 9253 - protein, 147 aa, Artificial Sequence; identical to SEQ ID NO: 9199
  Synthetic polypeptide

SEQ ID NO: 9254 - protein, 134 aa, Artificial Sequence; identical to SEQ ID NO: 9191
  Synthetic polypeptide

SEQ ID NO: 9255 - protein, 134 aa, Artificial Sequence; identical to SEQ ID NO: 9191
  Synthetic polypeptide

SEQ ID NO: 9256 - protein, 134 aa, Artificial Sequence; identical to SEQ ID NO: 9191
  Synthetic polypeptide

SEQ ID NO: 9257 - protein, 134 aa, Artificial Sequence; identical to SEQ ID NO: 9191
  Synthetic polypeptide

SEQ ID NO: 9258 - protein, 134 aa, Artificial Sequence; identical to SEQ ID NO: 9191
  Synthetic polypeptide

SEQ ID NO: 9259 - protein, 81 aa, Artificial Sequence; identical to SEQ ID NO: 9196
  Synthetic polypeptide

SEQ ID NO: 9260 - protein, 134 aa, Artificial Sequence; identical to SEQ ID NO: 9191
  Synthetic polypeptide

SEQ ID NO: 9261 - protein, 134 aa, Artificial Sequence; identical to SEQ ID NO: 9191
  Synthetic polypeptide

SEQ ID NO: 9262 - protein, 147 aa, Artificial Sequence; identical to SEQ ID NO: 9199
  Synthetic polypeptide

SEQ ID NO: 9263 - protein, 134 aa, Artificial Sequence; identical to SEQ ID NO: 9191
  Synthetic polypeptide

SEQ ID NO: 9264 - protein, 134 aa, Artificial Sequence; identical to SEQ ID NO: 9191
  Synthetic polypeptide

SEQ ID NO: 9265 - protein, 134 aa, Artificial Sequence; identical to SEQ ID NO: 9191
  Synthetic polypeptide

SEQ ID NO: 9266 - protein, 134 aa, Artificial Sequence; identical to SEQ ID NO: 9191
  Synthetic polypeptide

SEQ ID NO: 9267 - protein, 134 aa, Artificial Sequence; identical to SEQ ID NO: 9191
  Synthetic polypeptide

SEQ ID NO: 9268 - protein, 81 aa, Artificial Sequence; identical to SEQ ID NO: 9196
  Synthetic polypeptide

SEQ ID NO: 9269 - protein, 134 aa, Artificial Sequence; identical to SEQ ID NO: 9191
  Synthetic polypeptide

SEQ ID NO: 9270 - protein, 134 aa, Artificial Sequence; identical to SEQ ID NO: 9191
  Synthetic polypeptide

SEQ ID NO: 9271 - protein, 147 aa, Artificial Sequence; identical to SEQ ID NO: 9199
  Synthetic polypeptide

SEQ ID NO: 9272 - protein, 134 aa, Artificial Sequence; identical to SEQ ID NO: 9191
  Synthetic polypeptide

SEQ ID NO: 9273 - protein, 134 aa, Artificial Sequence; identical to SEQ ID NO: 9191
  Synthetic polypeptide

SEQ ID NO: 9274 - protein, 134 aa, Artificial Sequence; identical to SEQ ID NO: 9191
  Synthetic polypeptide

SEQ ID NO: 9275 - protein, 134 aa, Artificial Sequence; identical to SEQ ID NO: 9191
  Synthetic polypeptide

SEQ ID NO: 9276 - protein, 134 aa, Artificial Sequence; identical to SEQ ID NO: 9191
  Synthetic polypeptide

SEQ ID NO: 9277 - protein, 81 aa, Artificial Sequence; identical to SEQ ID NO: 9196
  Synthetic polypeptide

SEQ ID NO: 9278 - protein, 134 aa, Artificial Sequence; identical to SEQ ID NO: 9191
  Synthetic polypeptide

SEQ ID NO: 9279 - protein, 134 aa, Artificial Sequence; identical to SEQ ID NO: 9191
  Synthetic polypeptide

SEQ ID NO: 9280 - protein, 147 aa, Artificial Sequence; identical to SEQ ID NO: 9199
  Synthetic polypeptide

SEQ ID NO: 9281 - protein, 134 aa, Artificial Sequence; identical to SEQ ID NO: 9191
  Synthetic polypeptide

SEQ ID NO: 9282 - protein, 134 aa, Artificial Sequence; identical to SEQ ID NO: 9191
  Synthetic polypeptide

SEQ ID NO: 9283 - protein, 134 aa, Artificial Sequence; identical to SEQ ID NO: 9191
  Synthetic polypeptide

SEQ ID NO: 9284 - protein, 134 aa, Artificial Sequence; identical to SEQ ID NO: 9191
  Synthetic polypeptide

SEQ ID NO: 9285 - protein, 134 aa, Artificial Sequence; identical to SEQ ID NO: 9191
  Synthetic polypeptide

SEQ ID NO: 9286 - protein, 81 aa, Artificial Sequence; identical to SEQ ID NO: 9196
  Synthetic polypeptide

SEQ ID NO: 9287 - protein, 134 aa, Artificial Sequence; identical to SEQ ID NO: 9191
  Synthetic polypeptide

SEQ ID NO: 9288 - protein, 134 aa, Artificial Sequence; identical to SEQ ID NO: 9191
  Synthetic polypeptide

SEQ ID NO: 9289 - protein, 147 aa, Artificial Sequence; identical to SEQ ID NO: 9199
  Synthetic polypeptide

SEQ ID NO: 9290 - protein, 134 aa, Artificial Sequence; identical to SEQ ID NO: 9191
  Synthetic polypeptide

SEQ ID NO: 9291 - protein, 134 aa, Artificial Sequence; identical to SEQ ID NO: 9191
  Synthetic polypeptide

SEQ ID NO: 9292 - protein, 134 aa, Artificial Sequence; identical to SEQ ID NO: 9191
  Synthetic polypeptide

SEQ ID NO: 9293 - protein, 134 aa, Artificial Sequence; identical to SEQ ID NO: 9191
  Synthetic polypeptide

SEQ ID NO: 9294 - protein, 134 aa, Artificial Sequence; identical to SEQ ID NO: 9191
  Synthetic polypeptide

SEQ ID NO: 9295 - protein, 81 aa, Artificial Sequence; identical to SEQ ID NO: 9196
  Synthetic polypeptide

SEQ ID NO: 9296 - protein, 134 aa, Artificial Sequence; identical to SEQ ID NO: 9191
  Synthetic polypeptide

SEQ ID NO: 9297 - protein, 134 aa, Artificial Sequence; identical to SEQ ID NO: 9191
  Synthetic polypeptide

SEQ ID NO: 9298 - protein, 147 aa, Artificial Sequence; identical to SEQ ID NO: 9199
  Synthetic polypeptide

SEQ ID NO: 9299 - protein, 134 aa, Artificial Sequence; identical to SEQ ID NO: 9191
  Synthetic polypeptide

SEQ ID NO: 9300 - protein, 134 aa, Artificial Sequence; identical to SEQ ID NO: 9191
  Synthetic polypeptide

SEQ ID NO: 9301 - protein, 134 aa, Artificial Sequence; identical to SEQ ID NO: 9191
  Synthetic polypeptide

SEQ ID NO: 9302 - protein, 134 aa, Artificial Sequence; identical to SEQ ID NO: 9191
  Synthetic polypeptide

SEQ ID NO: 9303 - protein, 134 aa, Artificial Sequence; identical to SEQ ID NO: 9191
  Synthetic polypeptide

SEQ ID NO: 9304 - protein, 81 aa, Artificial Sequence; identical to SEQ ID NO: 9196
  Synthetic polypeptide

SEQ ID NO: 9305 - protein, 134 aa, Artificial Sequence; identical to SEQ ID NO: 9191
  Synthetic polypeptide

SEQ ID NO: 9306 - protein, 134 aa, Artificial Sequence; identical to SEQ ID NO: 9191
  Synthetic polypeptide

SEQ ID NO: 9307 - protein, 147 aa, Artificial Sequence; identical to SEQ ID NO: 9199
  Synthetic polypeptide

SEQ ID NO: 9308 - protein, 617 aa, Artificial Sequence; identical to SEQ ID NO: 245
  Synthetic polypeptide

SEQ ID NO: 9309 - protein, 617 aa, Artificial Sequence; identical to SEQ ID NO: 245
  Synthetic polypeptide

SEQ ID NO: 9310 - protein, 485 aa, Artificial Sequence; identical to SEQ ID NO: 392
  Synthetic polypeptide

SEQ ID NO: 9311 - protein, 485 aa, Artificial Sequence; identical to SEQ ID NO: 392
  Synthetic polypeptide

SEQ ID NO: 9312 - protein, 617 aa, Artificial Sequence; identical to SEQ ID NO: 245
  Synthetic polypeptide

SEQ ID NO: 9313 - protein, 617 aa, Artificial Sequence; identical to SEQ ID NO: 245
  Synthetic polypeptide

SEQ ID NO: 9314 - protein, 485 aa, Artificial Sequence; identical to SEQ ID NO: 392
  Synthetic polypeptide

SEQ ID NO: 9315 - protein, 485 aa, Artificial Sequence; identical to SEQ ID NO: 392
  Synthetic polypeptide

SEQ ID NO: 9316 - protein, 199 aa, Artificial Sequence
  Synthetic polypeptide
MKKAEMGRFSISPDEDSSSYSSNSDFNYSYPTKQAALKSHYADVDPENQNFLLESNLGKKKYETEFHPGTTSFGMSVFNLSNAIVGSGILGLSYAMANTGIALFIILLTFVSIFSLYSVHLLLKTANEGGSLLYEQLGYKAFGLVGKLAASGSITMQNIGAMSSYLFIVKYELPLVIQALTNIEDKTGLDIPNLKSKTF

SEQ ID NO: 9317 - protein, 199 aa, Artificial Sequence; identical to SEQ ID NO: 9316
  Synthetic polypeptide

SEQ ID NO: 9318 - protein, 199 aa, Artificial Sequence; identical to SEQ ID NO: 9316
  Synthetic polypeptide

SEQ ID NO: 9319 - protein, 199 aa, Artificial Sequence; identical to SEQ ID NO: 9316
  Synthetic polypeptide

SEQ ID NO: 9320 - protein, 345 aa, Artificial Sequence
  Synthetic polypeptide
MWLGRRALCALVLLLACASLGLLYASTRDAPGLRLPLAPWAPPQSPRRPELPDLAPEPRYAHIPVRIKEQVVGLLAWNNCSCESSGGGLPLPFQKQVRAIDLTKAFDPAELRAASATREQEFQAFLSRSQSPADQLLIAPANSPLQYPLQGVEVQPLRSILVPGLSLQAASGQEVYQVNLTASLGTWDVAGEVTGVTLTGEGQADLTLVSPGLDQLNRQLQLVTYSSRSYQTNTADTECKFHKGLVRRPEPGRVSSNHQVRAVGGRRLRLHGADAAGEACGRAGADAAGPGGGRGARDLRLCHHLSAAAERGARRPRPRELPPAKARLPPRARRLPRLRGHRRRG

SEQ ID NO: 9321 - protein, 290 aa, Artificial Sequence
  Synthetic polypeptide
MWLGRRALCALVLLLACASLGLLYASTRDAPGLRLPLAPWAPPQSPRRPELPDLAPEPRYAHIPVRIKEQVVGSQSPADQLLIAPANSPLQYPLQGVEVQPLRSILVPGLSLQAASGQEVYQVNLTASLGTWDVAGEVTGVTLTGEGQADLTLVSPGLDQLNRQLQLVTYSSRSYQTNTADTECKFHKGLVRRPEPGRVSSNHQVRAVGGRRLRLHGADAAGEACGRAGADAAGPGGGRGARDLRLCHHLSAAAERGARRPRPRELPPAKARLPPRARRLPRLRGHRRRG

SEQ ID NO: 9322 - protein, 345 aa, Artificial Sequence; identical to SEQ ID NO: 9320
  Synthetic polypeptide

SEQ ID NO: 9323 - protein, 290 aa, Artificial Sequence; identical to SEQ ID NO: 9321
  Synthetic polypeptide

SEQ ID NO: 9324 - protein, 345 aa, Artificial Sequence; identical to SEQ ID NO: 9320
  Synthetic polypeptide

SEQ ID NO: 9325 - protein, 290 aa, Artificial Sequence; identical to SEQ ID NO: 9321
  Synthetic polypeptide

SEQ ID NO: 9326 - protein, 345 aa, Artificial Sequence; identical to SEQ ID NO: 9320
  Synthetic polypeptide

SEQ ID NO: 9327 - protein, 290 aa, Artificial Sequence; identical to SEQ ID NO: 9321
  Synthetic polypeptide

SEQ ID NO: 9328 - protein, 506 aa, Artificial Sequence
  Synthetic polypeptide
MWLGRRALCALVLLLACASLGLLYASTRDAPGLRLPLAPWAPPQSPRRPELPDLAPEPRYAHIPVRIKEQVVGLLAWNNCSCESSGGGLPLPFQKQVRAIDLTKAFDPAELRAASATREQEFQAFLSRSQSPADQLLIAPANSPLQYPLQGVEVQPLRSILVPGLSLQAASGQEVYQVNLTASLGTWDVAGEVTGVTLTGEGQADLTLVSPGLDQLNRQLQLVTYSSRSYQTNTADTECKFHKAQYNISALVTIATKTFLRYDRLRALITSIRRFYPTVTVVIADDSDKPERVSGPYVEHYLMPFGKGWFAGRNLAVSQVTTKYVLWVDDDFVFTARTRLERLVDVLERTPLDLVGGAVREISGFATTYRQLLSVEPGAPGLGNCLRQRRGFHHELVGFPGCVVTDGVVNFFLARTDKVREVGFDPRLSRVAHLEFFLDGLGSLRVGSCSDVVVDHASKLKLPWTSRDAGAETYARYRYPGSLDESQMAKHRLLFFKHRLQCMTSQ

SEQ ID NO: 9329 - protein, 451 aa, Artificial Sequence
  Synthetic polypeptide
MWLGRRALCALVLLLACASLGLLYASTRDAPGLRLPLAPWAPPQSPRRPELPDLAPEPRYAHIPVRIKEQVVGSQSPADQLLIAPANSPLQYPLQGVEVQPLRSILVPGLSLQAASGQEVYQVNLTASLGTWDVAGEVTGVTLTGEGQADLTLVSPGLDQLNRQLQLVTYSSRSYQTNTADTECKFHKAQYNISALVTIATKTFLRYDRLRALITSIRRFYPTVTVVIADDSDKPERVSGPYVEHYLMPFGKGWFAGRNLAVSQVTTKYVLWVDDDFVFTARTRLERLVDVLERTPLDLVGGAVREISGFATTYRQLLSVEPGAPGLGNCLRQRRGFHHELVGFPGCVVTDGVVNFFLARTDKVREVGFDPRLSRVAHLEFFLDGLGSLRVGSCSDVVVDHASKLKLPWTSRDAGAETYARYRYPGSLDESQMAKHRLLFFKHRLQCMTSQ

SEQ ID NO: 9330 - protein, 310 aa, Artificial Sequence
  Synthetic polypeptide
MWLGRRALCALVLLLACASLGLLYASTRDAPGLRLPLAPWAPPQSPRRPELPDLAPEPRYAHIPVRIKEQVVGLLAWNNCSCESSGGGLPLPFQKQVRAIDLTKAFDPAELRAASATREQEFQAFLSRSQSPADQLLIAPANSPLQYPLQGVEVQPLRSILVPGLSLQAASGQEVYQVNLTASLGTWDVAGEVTGVTLTGEGQADLTLVSPGLDQLNRQLQLVTYSSRSYQTNTADTECKFHKAQYNISALVTIATKTFLRYDRLRALITSIRRFYPTVTVVIADDSDKPERVSGPYVEHYLMPFGKVCS

SEQ ID NO: 9331 - protein, 506 aa, Artificial Sequence; identical to SEQ ID NO: 9328
  Synthetic polypeptide

SEQ ID NO: 9332 - protein, 451 aa, Artificial Sequence; identical to SEQ ID NO: 9329
  Synthetic polypeptide

SEQ ID NO: 9333 - protein, 310 aa, Artificial Sequence; identical to SEQ ID NO: 9330
  Synthetic polypeptide

SEQ ID NO: 9334 - protein, 506 aa, Artificial Sequence; identical to SEQ ID NO: 9328
  Synthetic polypeptide

SEQ ID NO: 9335 - protein, 451 aa, Artificial Sequence; identical to SEQ ID NO: 9329
  Synthetic polypeptide

SEQ ID NO: 9336 - protein, 310 aa, Artificial Sequence; identical to SEQ ID NO: 9330
  Synthetic polypeptide

SEQ ID NO: 9337 - protein, 506 aa, Artificial Sequence; identical to SEQ ID NO: 9328
  Synthetic polypeptide

SEQ ID NO: 9338 - protein, 451 aa, Artificial Sequence; identical to SEQ ID NO: 9329
  Synthetic polypeptide

SEQ ID NO: 9339 - protein, 310 aa, Artificial Sequence; identical to SEQ ID NO: 9330
  Synthetic polypeptide

SEQ ID NO: 9340 - protein, 506 aa, Artificial Sequence; identical to SEQ ID NO: 9328
  Synthetic polypeptide

SEQ ID NO: 9341 - protein, 451 aa, Artificial Sequence; identical to SEQ ID NO: 9329
  Synthetic polypeptide

SEQ ID NO: 9342 - protein, 310 aa, Artificial Sequence; identical to SEQ ID NO: 9330
  Synthetic polypeptide

SEQ ID NO: 9343 - protein, 506 aa, Artificial Sequence; identical to SEQ ID NO: 9328
  Synthetic polypeptide

SEQ ID NO: 9344 - protein, 451 aa, Artificial Sequence; identical to SEQ ID NO: 9329
  Synthetic polypeptide

SEQ ID NO: 9345 - protein, 310 aa, Artificial Sequence; identical to SEQ ID NO: 9330
  Synthetic polypeptide

SEQ ID NO: 9346 - protein, 506 aa, Artificial Sequence; identical to SEQ ID NO: 9328
  Synthetic polypeptide

SEQ ID NO: 9347 - protein, 451 aa, Artificial Sequence; identical to SEQ ID NO: 9329
  Synthetic polypeptide

SEQ ID NO: 9348 - protein, 310 aa, Artificial Sequence; identical to SEQ ID NO: 9330
  Synthetic polypeptide

SEQ ID NO: 9349 - protein, 506 aa, Artificial Sequence; identical to SEQ ID NO: 9328
  Synthetic polypeptide

SEQ ID NO: 9350 - protein, 451 aa, Artificial Sequence; identical to SEQ ID NO: 9329
  Synthetic polypeptide

SEQ ID NO: 9351 - protein, 310 aa, Artificial Sequence; identical to SEQ ID NO: 9330
  Synthetic polypeptide

SEQ ID NO: 9352 - protein, 506 aa, Artificial Sequence; identical to SEQ ID NO: 9328
  Synthetic polypeptide

SEQ ID NO: 9353 - protein, 451 aa, Artificial Sequence; identical to SEQ ID NO: 9329
  Synthetic polypeptide

SEQ ID NO: 9354 - protein, 310 aa, Artificial Sequence; identical to SEQ ID NO: 9330
  Synthetic polypeptide

SEQ ID NO: 9355 - protein, 506 aa, Artificial Sequence; identical to SEQ ID NO: 9328
  Synthetic polypeptide

SEQ ID NO: 9356 - protein, 451 aa, Artificial Sequence; identical to SEQ ID NO: 9329
  Synthetic polypeptide

SEQ ID NO: 9357 - protein, 310 aa, Artificial Sequence; identical to SEQ ID NO: 9330
  Synthetic polypeptide

SEQ ID NO: 9358 - protein, 506 aa, Artificial Sequence; identical to SEQ ID NO: 9328
  Synthetic polypeptide

SEQ ID NO: 9359 - protein, 451 aa, Artificial Sequence; identical to SEQ ID NO: 9329
  Synthetic polypeptide

SEQ ID NO: 9360 - protein, 310 aa, Artificial Sequence; identical to SEQ ID NO: 9330
  Synthetic polypeptide

SEQ ID NO: 9361 - protein, 506 aa, Artificial Sequence; identical to SEQ ID NO: 9328
  Synthetic polypeptide

SEQ ID NO: 9362 - protein, 451 aa, Artificial Sequence; identical to SEQ ID NO: 9329
  Synthetic polypeptide

SEQ ID NO: 9363 - protein, 310 aa, Artificial Sequence; identical to SEQ ID NO: 9330
  Synthetic polypeptide

SEQ ID NO: 9364 - protein, 506 aa, Artificial Sequence; identical to SEQ ID NO: 9328
  Synthetic polypeptide

SEQ ID NO: 9365 - protein, 451 aa, Artificial Sequence; identical to SEQ ID NO: 9329
  Synthetic polypeptide

SEQ ID NO: 9366 - protein, 310 aa, Artificial Sequence; identical to SEQ ID NO: 9330
  Synthetic polypeptide

SEQ ID NO: 9367 - protein, 506 aa, Artificial Sequence; identical to SEQ ID NO: 9328
  Synthetic polypeptide

SEQ ID NO: 9368 - protein, 451 aa, Artificial Sequence; identical to SEQ ID NO: 9329
  Synthetic polypeptide

SEQ ID NO: 9369 - protein, 310 aa, Artificial Sequence; identical to SEQ ID NO: 9330
  Synthetic polypeptide

SEQ ID NO: 9370 - protein, 506 aa, Artificial Sequence; identical to SEQ ID NO: 9328
  Synthetic polypeptide

SEQ ID NO: 9371 - protein, 451 aa, Artificial Sequence; identical to SEQ ID NO: 9329
  Synthetic polypeptide

SEQ ID NO: 9372 - protein, 310 aa, Artificial Sequence; identical to SEQ ID NO: 9330
  Synthetic polypeptide

SEQ ID NO: 9373 - protein, 506 aa, Artificial Sequence; identical to SEQ ID NO: 9328
  Synthetic polypeptide

SEQ ID NO: 9374 - protein, 451 aa, Artificial Sequence; identical to SEQ ID NO: 9329
  Synthetic polypeptide

SEQ ID NO: 9375 - protein, 310 aa, Artificial Sequence; identical to SEQ ID NO: 9330
  Synthetic polypeptide

SEQ ID NO: 9376 - protein, 506 aa, Artificial Sequence; identical to SEQ ID NO: 9328
  Synthetic polypeptide

SEQ ID NO: 9377 - protein, 451 aa, Artificial Sequence; identical to SEQ ID NO: 9329
  Synthetic polypeptide

SEQ ID NO: 9378 - protein, 310 aa, Artificial Sequence; identical to SEQ ID NO: 9330
  Synthetic polypeptide

SEQ ID NO: 9379 - protein, 506 aa, Artificial Sequence; identical to SEQ ID NO: 9328
  Synthetic polypeptide

SEQ ID NO: 9380 - protein, 451 aa, Artificial Sequence; identical to SEQ ID NO: 9329
  Synthetic polypeptide

SEQ ID NO: 9381 - protein, 310 aa, Artificial Sequence; identical to SEQ ID NO: 9330
  Synthetic polypeptide

SEQ ID NO: 9382 - protein, 506 aa, Artificial Sequence; identical to SEQ ID NO: 9328
  Synthetic polypeptide

SEQ ID NO: 9383 - protein, 451 aa, Artificial Sequence; identical to SEQ ID NO: 9329
  Synthetic polypeptide

SEQ ID NO: 9384 - protein, 310 aa, Artificial Sequence; identical to SEQ ID NO: 9330
  Synthetic polypeptide

SEQ ID NO: 9385 - protein, 506 aa, Artificial Sequence; identical to SEQ ID NO: 9328
  Synthetic polypeptide

SEQ ID NO: 9386 - protein, 451 aa, Artificial Sequence; identical to SEQ ID NO: 9329
  Synthetic polypeptide

SEQ ID NO: 9387 - protein, 310 aa, Artificial Sequence; identical to SEQ ID NO: 9330
  Synthetic polypeptide

SEQ ID NO: 9388 - protein, 506 aa, Artificial Sequence; identical to SEQ ID NO: 9328
  Synthetic polypeptide

SEQ ID NO: 9389 - protein, 451 aa, Artificial Sequence; identical to SEQ ID NO: 9329
  Synthetic polypeptide

SEQ ID NO: 9390 - protein, 310 aa, Artificial Sequence; identical to SEQ ID NO: 9330
  Synthetic polypeptide

SEQ ID NO: 9391 - protein, 310 aa, Artificial Sequence; identical to SEQ ID NO: 9330
  Synthetic polypeptide

SEQ ID NO: 9392 - protein, 506 aa, Artificial Sequence; identical to SEQ ID NO: 9328
  Synthetic polypeptide

SEQ ID NO: 9393 - protein, 451 aa, Artificial Sequence; identical to SEQ ID NO: 9329
  Synthetic polypeptide

SEQ ID NO: 9394 - protein, 506 aa, Artificial Sequence; identical to SEQ ID NO: 9328
  Synthetic polypeptide

SEQ ID NO: 9395 - protein, 451 aa, Artificial Sequence; identical to SEQ ID NO: 9329
  Synthetic polypeptide

SEQ ID NO: 9396 - protein, 310 aa, Artificial Sequence; identical to SEQ ID NO: 9330
  Synthetic polypeptide

SEQ ID NO: 9397 - protein, 506 aa, Artificial Sequence; identical to SEQ ID NO: 9328
  Synthetic polypeptide

SEQ ID NO: 9398 - protein, 451 aa, Artificial Sequence; identical to SEQ ID NO: 9329
  Synthetic polypeptide

SEQ ID NO: 9399 - protein, 310 aa, Artificial Sequence; identical to SEQ ID NO: 9330
  Synthetic polypeptide

SEQ ID NO: 9400 - protein, 506 aa, Artificial Sequence; identical to SEQ ID NO: 9328
  Synthetic polypeptide

SEQ ID NO: 9401 - protein, 451 aa, Artificial Sequence; identical to SEQ ID NO: 9329
  Synthetic polypeptide

SEQ ID NO: 9402 - protein, 310 aa, Artificial Sequence; identical to SEQ ID NO: 9330
  Synthetic polypeptide

SEQ ID NO: 9403 - protein, 506 aa, Artificial Sequence; identical to SEQ ID NO: 9328
  Synthetic polypeptide

SEQ ID NO: 9404 - protein, 451 aa, Artificial Sequence; identical to SEQ ID NO: 9329
  Synthetic polypeptide

SEQ ID NO: 9405 - protein, 310 aa, Artificial Sequence; identical to SEQ ID NO: 9330
  Synthetic polypeptide

SEQ ID NO: 9406 - protein, 506 aa, Artificial Sequence; identical to SEQ ID NO: 9328
  Synthetic polypeptide

SEQ ID NO: 9407 - protein, 451 aa, Artificial Sequence; identical to SEQ ID NO: 9329
  Synthetic polypeptide

SEQ ID NO: 9408 - protein, 310 aa, Artificial Sequence; identical to SEQ ID NO: 9330
  Synthetic polypeptide

SEQ ID NO: 9409 - protein, 506 aa, Artificial Sequence; identical to SEQ ID NO: 9328
  Synthetic polypeptide

SEQ ID NO: 9410 - protein, 451 aa, Artificial Sequence; identical to SEQ ID NO: 9329
  Synthetic polypeptide

SEQ ID NO: 9411 - protein, 310 aa, Artificial Sequence; identical to SEQ ID NO: 9330
  Synthetic polypeptide

SEQ ID NO: 9412 - protein, 539 aa, Artificial Sequence
  Synthetic polypeptide
MWLGRRALCALVLLLACASLGLLYASTRDAPGLRLPLAPWAPPQSPRRPELPDLAPEPRYAHIPVRIKEQVVGLLAWNNCSCESSGGGLPLPFQKQVRAIDLTKAFDPAELRAASATREQEFQAFLSRSQSPADQLLIAPANSPLQYPLQGVEVQPLRSILVPGLSLQAASGQEVYQVNLTASLGTWDVAGEVTGVTLTGEGQADLTLVSPGLDQLNRQLQLVTYSSRSYQTNTADTECKFHKVRFSTEGHEAAFTIRIRHPPNPRLYPPGSLPQGAQYNISALVTIATKTFLRYDRLRALITSIRRFYPTVTVVIADDSDKPERVSGPYVEHYLMPFGKGWFAGRNLAVSQVTTKYVLWVDDDFVFTARTRLERLVDVLERTPLDLVGGAVREISGFATTYRQLLSVEPGAPGLGNCLRQRRGFHHELVGFPGCVVTDGVVNFFLARTDKVREVGFDPRLSRVAHLEFFLDGLGSLRVGSCSDVVVDHASKLKLPWTSRDAGAETYARYRYPGSLDESQMAKHRLLFFKHRLQCMTSQ

SEQ ID NO: 9413 - protein, 484 aa, Artificial Sequence
  Synthetic polypeptide
MWLGRRALCALVLLLACASLGLLYASTRDAPGLRLPLAPWAPPQSPRRPELPDLAPEPRYAHIPVRIKEQVVGSQSPADQLLIAPANSPLQYPLQGVEVQPLRSILVPGLSLQAASGQEVYQVNLTASLGTWDVAGEVTGVTLTGEGQADLTLVSPGLDQLNRQLQLVTYSSRSYQTNTADTECKFHKVRFSTEGHEAAFTIRIRHPPNPRLYPPGSLPQGAQYNISALVTIATKTFLRYDRLRALITSIRRFYPTVTVVIADDSDKPERVSGPYVEHYLMPFGKGWFAGRNLAVSQVTTKYVLWVDDDFVFTARTRLERLVDVLERTPLDLVGGAVREISGFATTYRQLLSVEPGAPGLGNCLRQRRGFHHELVGFPGCVVTDGVVNFFLARTDKVREVGFDPRLSRVAHLEFFLDGLGSLRVGSCSDVVVDHASKLKLPWTSRDAGAETYARYRYPGSLDESQMAKHRLLFFKHRLQCMTSQ

SEQ ID NO: 9414 - protein, 10 aa, Artificial Sequence
  Synthetic polypeptide
GASPQLTSCS

SEQ ID NO: 9415 - protein, 225 aa, Artificial Sequence
  Synthetic polypeptide
MWLGRRALCALVLLLACASLGLLYASTRDAPGLRLPLAPWAPPQSPRRPELPDLAPEPRYAHIPVRIKEQVVGLLAWNNCSCESSGGGLPLPFQKQVRAIDLTKAFDPAELRAASATREQEFQAFLSRSQSPADQLLIAPANSPLQYPLQGVEVQPLRSILVPGEPDCLPRHLGRGRGSDWSYSHWRGSGRSHPCQPRAGPTQQATTTGHLQQPKLPDQHSRHRM

SEQ ID NO: 9416 - protein, 539 aa, Artificial Sequence; identical to SEQ ID NO: 9412
  Synthetic polypeptide

SEQ ID NO: 9417 - protein, 484 aa, Artificial Sequence; identical to SEQ ID NO: 9413
  Synthetic polypeptide

SEQ ID NO: 9418 - protein, 10 aa, Artificial Sequence
  Synthetic polypeptide
GASPQLTSCS

SEQ ID NO: 9419 - protein, 225 aa, Artificial Sequence; identical to SEQ ID NO: 9415
  Synthetic polypeptide

SEQ ID NO: 9420 - protein, 539 aa, Artificial Sequence; identical to SEQ ID NO: 9412
  Synthetic polypeptide

SEQ ID NO: 9421 - protein, 484 aa, Artificial Sequence; identical to SEQ ID NO: 9413
  Synthetic polypeptide

SEQ ID NO: 9422 - protein, 10 aa, Artificial Sequence
  Synthetic polypeptide
GASPQLTSCS

SEQ ID NO: 9423 - protein, 225 aa, Artificial Sequence; identical to SEQ ID NO: 9415
  Synthetic polypeptide

SEQ ID NO: 9424 - protein, 539 aa, Artificial Sequence; identical to SEQ ID NO: 9412
  Synthetic polypeptide

SEQ ID NO: 9425 - protein, 484 aa, Artificial Sequence; identical to SEQ ID NO: 9413
  Synthetic polypeptide

SEQ ID NO: 9426 - protein, 10 aa, Artificial Sequence
  Synthetic polypeptide
GASPQLTSCS

SEQ ID NO: 9427 - protein, 225 aa, Artificial Sequence; identical to SEQ ID NO: 9415
  Synthetic polypeptide

SEQ ID NO: 9428 - protein, 539 aa, Artificial Sequence; identical to SEQ ID NO: 9412
  Synthetic polypeptide

SEQ ID NO: 9429 - protein, 484 aa, Artificial Sequence; identical to SEQ ID NO: 9413
  Synthetic polypeptide

SEQ ID NO: 9430 - protein, 10 aa, Artificial Sequence
  Synthetic polypeptide
GASPQLTSCS

SEQ ID NO: 9431 - protein, 225 aa, Artificial Sequence; identical to SEQ ID NO: 9415
  Synthetic polypeptide

SEQ ID NO: 9432 - protein, 539 aa, Artificial Sequence; identical to SEQ ID NO: 9412
  Synthetic polypeptide

SEQ ID NO: 9433 - protein, 484 aa, Artificial Sequence; identical to SEQ ID NO: 9413
  Synthetic polypeptide

SEQ ID NO: 9434 - protein, 10 aa, Artificial Sequence
  Synthetic polypeptide
GASPQLTSCS

SEQ ID NO: 9435 - protein, 225 aa, Artificial Sequence; identical to SEQ ID NO: 9415
  Synthetic polypeptide

SEQ ID NO: 9436 - protein, 539 aa, Artificial Sequence; identical to SEQ ID NO: 9412
  Synthetic polypeptide

SEQ ID NO: 9437 - protein, 484 aa, Artificial Sequence; identical to SEQ ID NO: 9413
  Synthetic polypeptide

SEQ ID NO: 9438 - protein, 10 aa, Artificial Sequence
  Synthetic polypeptide
GASPQLTSCS

SEQ ID NO: 9439 - protein, 225 aa, Artificial Sequence; identical to SEQ ID NO: 9415
  Synthetic polypeptide

SEQ ID NO: 9440 - protein, 539 aa, Artificial Sequence; identical to SEQ ID NO: 9412
  Synthetic polypeptide

SEQ ID NO: 9441 - protein, 484 aa, Artificial Sequence; identical to SEQ ID NO: 9413
  Synthetic polypeptide

SEQ ID NO: 9442 - protein, 10 aa, Artificial Sequence
  Synthetic polypeptide
GASPQLTSCS

SEQ ID NO: 9443 - protein, 225 aa, Artificial Sequence; identical to SEQ ID NO: 9415
  Synthetic polypeptide

SEQ ID NO: 9444 - protein, 539 aa, Artificial Sequence; identical to SEQ ID NO: 9412
  Synthetic polypeptide

SEQ ID NO: 9445 - protein, 484 aa, Artificial Sequence; identical to SEQ ID NO: 9413
  Synthetic polypeptide

SEQ ID NO: 9446 - protein, 10 aa, Artificial Sequence
  Synthetic polypeptide
GASPQLTSCS

SEQ ID NO: 9447 - protein, 225 aa, Artificial Sequence; identical to SEQ ID NO: 9415
  Synthetic polypeptide

SEQ ID NO: 9448 - protein, 539 aa, Artificial Sequence; identical to SEQ ID NO: 9412
  Synthetic polypeptide

SEQ ID NO: 9449 - protein, 484 aa, Artificial Sequence; identical to SEQ ID NO: 9413
  Synthetic polypeptide

SEQ ID NO: 9450 - protein, 10 aa, Artificial Sequence
  Synthetic polypeptide
GASPQLTSCS

SEQ ID NO: 9451 - protein, 225 aa, Artificial Sequence; identical to SEQ ID NO: 9415
  Synthetic polypeptide

SEQ ID NO: 9452 - protein, 539 aa, Artificial Sequence; identical to SEQ ID NO: 9412
  Synthetic polypeptide

SEQ ID NO: 9453 - protein, 484 aa, Artificial Sequence; identical to SEQ ID NO: 9413
  Synthetic polypeptide

SEQ ID NO: 9454 - protein, 10 aa, Artificial Sequence
  Synthetic polypeptide
GASPQLTSCS

SEQ ID NO: 9455 - protein, 225 aa, Artificial Sequence; identical to SEQ ID NO: 9415
  Synthetic polypeptide

SEQ ID NO: 9456 - protein, 539 aa, Artificial Sequence; identical to SEQ ID NO: 9412
  Synthetic polypeptide

SEQ ID NO: 9457 - protein, 484 aa, Artificial Sequence; identical to SEQ ID NO: 9413
  Synthetic polypeptide

SEQ ID NO: 9458 - protein, 10 aa, Artificial Sequence
  Synthetic polypeptide
GASPQLTSCS

SEQ ID NO: 9459 - protein, 225 aa, Artificial Sequence; identical to SEQ ID NO: 9415
  Synthetic polypeptide

SEQ ID NO: 9460 - protein, 539 aa, Artificial Sequence; identical to SEQ ID NO: 9412
  Synthetic polypeptide

SEQ ID NO: 9461 - protein, 484 aa, Artificial Sequence; identical to SEQ ID NO: 9413
  Synthetic polypeptide

SEQ ID NO: 9462 - protein, 10 aa, Artificial Sequence
  Synthetic polypeptide
GASPQLTSCS

SEQ ID NO: 9463 - protein, 225 aa, Artificial Sequence; identical to SEQ ID NO: 9415
  Synthetic polypeptide

SEQ ID NO: 9464 - protein, 539 aa, Artificial Sequence; identical to SEQ ID NO: 9412
  Synthetic polypeptide

SEQ ID NO: 9465 - protein, 484 aa, Artificial Sequence; identical to SEQ ID NO: 9413
  Synthetic polypeptide

SEQ ID NO: 9466 - protein, 10 aa, Artificial Sequence
  Synthetic polypeptide
GASPQLTSCS

SEQ ID NO: 9467 - protein, 225 aa, Artificial Sequence; identical to SEQ ID NO: 9415
  Synthetic polypeptide

SEQ ID NO: 9468 - protein, 539 aa, Artificial Sequence; identical to SEQ ID NO: 9412
  Synthetic polypeptide

SEQ ID NO: 9469 - protein, 484 aa, Artificial Sequence; identical to SEQ ID NO: 9413
  Synthetic polypeptide

SEQ ID NO: 9470 - protein, 10 aa, Artificial Sequence
  Synthetic polypeptide
GASPQLTSCS

SEQ ID NO: 9471 - protein, 225 aa, Artificial Sequence; identical to SEQ ID NO: 9415
  Synthetic polypeptide

SEQ ID NO: 9472 - protein, 539 aa, Artificial Sequence; identical to SEQ ID NO: 9412
  Synthetic polypeptide

SEQ ID NO: 9473 - protein, 484 aa, Artificial Sequence; identical to SEQ ID NO: 9413
  Synthetic polypeptide

SEQ ID NO: 9474 - protein, 10 aa, Artificial Sequence
  Synthetic polypeptide
GASPQLTSCS

SEQ ID NO: 9475 - protein, 225 aa, Artificial Sequence; identical to SEQ ID NO: 9415
  Synthetic polypeptide

SEQ ID NO: 9476 - protein, 539 aa, Artificial Sequence; identical to SEQ ID NO: 9412
  Synthetic polypeptide

SEQ ID NO: 9477 - protein, 484 aa, Artificial Sequence; identical to SEQ ID NO: 9413
  Synthetic polypeptide

SEQ ID NO: 9478 - protein, 10 aa, Artificial Sequence
  Synthetic polypeptide
GASPQLTSCS

SEQ ID NO: 9479 - protein, 225 aa, Artificial Sequence; identical to SEQ ID NO: 9415
  Synthetic polypeptide

SEQ ID NO: 9480 - protein, 539 aa, Artificial Sequence; identical to SEQ ID NO: 9412
  Synthetic polypeptide

SEQ ID NO: 9481 - protein, 484 aa, Artificial Sequence; identical to SEQ ID NO: 9413
  Synthetic polypeptide

SEQ ID NO: 9482 - protein, 10 aa, Artificial Sequence
  Synthetic polypeptide
GASPQLTSCS

SEQ ID NO: 9483 - protein, 225 aa, Artificial Sequence; identical to SEQ ID NO: 9415
  Synthetic polypeptide

SEQ ID NO: 9484 - protein, 539 aa, Artificial Sequence; identical to SEQ ID NO: 9412
  Synthetic polypeptide

SEQ ID NO: 9485 - protein, 484 aa, Artificial Sequence; identical to SEQ ID NO: 9413
  Synthetic polypeptide

SEQ ID NO: 9486 - protein, 10 aa, Artificial Sequence
  Synthetic polypeptide
GASPQLTSCS

SEQ ID NO: 9487 - protein, 225 aa, Artificial Sequence; identical to SEQ ID NO: 9415
  Synthetic polypeptide

SEQ ID NO: 9488 - protein, 539 aa, Artificial Sequence; identical to SEQ ID NO: 9412
  Synthetic polypeptide

SEQ ID NO: 9489 - protein, 484 aa, Artificial Sequence; identical to SEQ ID NO: 9413
  Synthetic polypeptide

SEQ ID NO: 9490 - protein, 10 aa, Artificial Sequence
  Synthetic polypeptide
GASPQLTSCS

SEQ ID NO: 9491 - protein, 225 aa, Artificial Sequence; identical to SEQ ID NO: 9415
  Synthetic polypeptide

SEQ ID NO: 9492 - protein, 539 aa, Artificial Sequence; identical to SEQ ID NO: 9412
  Synthetic polypeptide

SEQ ID NO: 9493 - protein, 484 aa, Artificial Sequence; identical to SEQ ID NO: 9413
  Synthetic polypeptide

SEQ ID NO: 9494 - protein, 10 aa, Artificial Sequence
  Synthetic polypeptide
GASPQLTSCS

SEQ ID NO: 9495 - protein, 225 aa, Artificial Sequence; identical to SEQ ID NO: 9415
  Synthetic polypeptide

SEQ ID NO: 9496 - protein, 539 aa, Artificial Sequence; identical to SEQ ID NO: 9412
  Synthetic polypeptide

SEQ ID NO: 9497 - protein, 484 aa, Artificial Sequence; identical to SEQ ID NO: 9413
  Synthetic polypeptide

SEQ ID NO: 9498 - protein, 10 aa, Artificial Sequence
  Synthetic polypeptide
GASPQLTSCS

SEQ ID NO: 9499 - protein, 225 aa, Artificial Sequence; identical to SEQ ID NO: 9415
  Synthetic polypeptide

SEQ ID NO: 9500 - protein, 539 aa, Artificial Sequence; identical to SEQ ID NO: 9412
  Synthetic polypeptide

SEQ ID NO: 9501 - protein, 484 aa, Artificial Sequence; identical to SEQ ID NO: 9413
  Synthetic polypeptide

SEQ ID NO: 9502 - protein, 10 aa, Artificial Sequence
  Synthetic polypeptide
GASPQLTSCS

SEQ ID NO: 9503 - protein, 225 aa, Artificial Sequence; identical to SEQ ID NO: 9415
  Synthetic polypeptide

SEQ ID NO: 9504 - protein, 539 aa, Artificial Sequence; identical to SEQ ID NO: 9412
  Synthetic polypeptide

SEQ ID NO: 9505 - protein, 484 aa, Artificial Sequence; identical to SEQ ID NO: 9413
  Synthetic polypeptide

SEQ ID NO: 9506 - protein, 10 aa, Artificial Sequence
  Synthetic polypeptide
GASPQLTSCS

SEQ ID NO: 9507 - protein, 225 aa, Artificial Sequence; identical to SEQ ID NO: 9415
  Synthetic polypeptide

SEQ ID NO: 9508 - protein, 10 aa, Artificial Sequence
  Synthetic polypeptide
GASPQLTSCS

SEQ ID NO: 9509 - protein, 225 aa, Artificial Sequence; identical to SEQ ID NO: 9415
  Synthetic polypeptide

SEQ ID NO: 9510 - protein, 539 aa, Artificial Sequence; identical to SEQ ID NO: 9412
  Synthetic polypeptide

SEQ ID NO: 9511 - protein, 484 aa, Artificial Sequence; identical to SEQ ID NO: 9413
  Synthetic polypeptide

SEQ ID NO: 9512 - protein, 539 aa, Artificial Sequence; identical to SEQ ID NO: 9412
  Synthetic polypeptide

SEQ ID NO: 9513 - protein, 484 aa, Artificial Sequence; identical to SEQ ID NO: 9413
  Synthetic polypeptide

SEQ ID NO: 9514 - protein, 10 aa, Artificial Sequence
  Synthetic polypeptide
GASPQLTSCS

SEQ ID NO: 9515 - protein, 225 aa, Artificial Sequence; identical to SEQ ID NO: 9415
  Synthetic polypeptide

SEQ ID NO: 9516 - protein, 539 aa, Artificial Sequence; identical to SEQ ID NO: 9412
  Synthetic polypeptide

SEQ ID NO: 9517 - protein, 484 aa, Artificial Sequence; identical to SEQ ID NO: 9413
  Synthetic polypeptide

SEQ ID NO: 9518 - protein, 10 aa, Artificial Sequence
  Synthetic polypeptide
GASPQLTSCS

SEQ ID NO: 9519 - protein, 225 aa, Artificial Sequence; identical to SEQ ID NO: 9415
  Synthetic polypeptide

SEQ ID NO: 9520 - protein, 539 aa, Artificial Sequence; identical to SEQ ID NO: 9412
  Synthetic polypeptide

SEQ ID NO: 9521 - protein, 484 aa, Artificial Sequence; identical to SEQ ID NO: 9413
  Synthetic polypeptide

SEQ ID NO: 9522 - protein, 10 aa, Artificial Sequence
  Synthetic polypeptide
GASPQLTSCS

SEQ ID NO: 9523 - protein, 225 aa, Artificial Sequence; identical to SEQ ID NO: 9415
  Synthetic polypeptide

SEQ ID NO: 9524 - protein, 539 aa, Artificial Sequence; identical to SEQ ID NO: 9412
  Synthetic polypeptide

SEQ ID NO: 9525 - protein, 484 aa, Artificial Sequence; identical to SEQ ID NO: 9413
  Synthetic polypeptide

SEQ ID NO: 9526 - protein, 10 aa, Artificial Sequence
  Synthetic polypeptide
GASPQLTSCS

SEQ ID NO: 9527 - protein, 225 aa, Artificial Sequence; identical to SEQ ID NO: 9415
  Synthetic polypeptide

SEQ ID NO: 9528 - protein, 539 aa, Artificial Sequence; identical to SEQ ID NO: 9412
  Synthetic polypeptide

SEQ ID NO: 9529 - protein, 484 aa, Artificial Sequence; identical to SEQ ID NO: 9413
  Synthetic polypeptide

SEQ ID NO: 9530 - protein, 10 aa, Artificial Sequence
  Synthetic polypeptide
GASPQLTSCS

SEQ ID NO: 9531 - protein, 225 aa, Artificial Sequence; identical to SEQ ID NO: 9415
  Synthetic polypeptide

SEQ ID NO: 9532 - protein, 539 aa, Artificial Sequence; identical to SEQ ID NO: 9412
  Synthetic polypeptide

SEQ ID NO: 9533 - protein, 484 aa, Artificial Sequence; identical to SEQ ID NO: 9413
  Synthetic polypeptide

SEQ ID NO: 9534 - protein, 10 aa, Artificial Sequence
  Synthetic polypeptide
GASPQLTSCS

SEQ ID NO: 9535 - protein, 225 aa, Artificial Sequence; identical to SEQ ID NO: 9415
  Synthetic polypeptide

SEQ ID NO: 9536 - protein, 539 aa, Artificial Sequence; identical to SEQ ID NO: 9412
  Synthetic polypeptide

SEQ ID NO: 9537 - protein, 484 aa, Artificial Sequence; identical to SEQ ID NO: 9413
  Synthetic polypeptide

SEQ ID NO: 9538 - protein, 10 aa, Artificial Sequence
  Synthetic polypeptide
GASPQLTSCS

SEQ ID NO: 9539 - protein, 225 aa, Artificial Sequence; identical to SEQ ID NO: 9415
  Synthetic polypeptide

SEQ ID NO: 9540 - protein, 724 aa, Artificial Sequence
  Synthetic polypeptide
MRKQGVSSKRLQSSGRSQSKGRRGASLAREPEVEEEMEKSALGGGKLPRGSWRSSPGRIQSLKERKGLELEVVAKTFLLGPFQFVRNSLAQLREKVQELQARRFSSRTTLGIAVFVAILHWLHLVTLFENDRHFSHLSSLEREMTFRTEMGLYYSYFKTIIEAPSFLEGLWMIMNDRLTEYPLIINAIKRFHLYPEVIIASWYCTFMGIMNLFGLETKTCWNVTRIEPLNEVQSCEGLGDPACFYVGVIFILNGLMMGLFFMYGAYLSGTQLGGLITVLCFFFNHGEATRVMWTPPLRESFSYPFLVLQMCILTLILRTSSNDRRPFIALCLSNVAFMLPWQFAQFILFTQIASLFPMYVVGYIEPSKFQKIIYMNMISVTLSFILMFGNSMYLSSYYSSSLLMTWAIILKRNEIQKLGVSKLNFWLIQGSAWWCGTIILKFLTSKILGVSDHIRLSDLIAARILRYTDFDTLIYTCAPEFDFMEKATPLRYTKTLLLPVVMVITCFIFKKTVRDISYVLATNIYLRKQLLEHSELAFHTLQLLVFTALAILIMRLKMFLTPHMCVMASLICSRQLFGWLFRRVRFEKVIFGILTVMSIQGYANLRNQWSIIGEFNNLPQEELLQWIKYSTTSDAVFAGAMPTMASIKLSTLHPIVNHPHYEDADLRARTKIVYSTYSRKSAKEVRDKLLELHVNYYVLEEAWCVVRTKFILQDGQEVLSAAEK

SEQ ID NO: 9541 - protein, 171 aa, Artificial Sequence
  Synthetic polypeptide
MRLKMFLTPHMCVMASLICSRQLFGWLFRRVRFEKVIFGILTVMSIQGYANLRNQWSIIGEFNNLPQEELLQWIKYSTTSDAVFAGAMPTMASIKLSTLHPIVNHPHYEDADLRARTKIVYSTYSRKSAKEVRDKLLELHVNYYVLEEAWCVVRTKFILQDGQEVLSAAEK

SEQ ID NO: 9542 - protein, 724 aa, Artificial Sequence; identical to SEQ ID NO: 9540
  Synthetic polypeptide

SEQ ID NO: 9543 - protein, 171 aa, Artificial Sequence; identical to SEQ ID NO: 9541
  Synthetic polypeptide

SEQ ID NO: 9544 - protein, 724 aa, Artificial Sequence; identical to SEQ ID NO: 9540
  Synthetic polypeptide

SEQ ID NO: 9545 - protein, 171 aa, Artificial Sequence; identical to SEQ ID NO: 9541
  Synthetic polypeptide

SEQ ID NO: 9546 - protein, 724 aa, Artificial Sequence; identical to SEQ ID NO: 9540
  Synthetic polypeptide

SEQ ID NO: 9547 - protein, 171 aa, Artificial Sequence; identical to SEQ ID NO: 9541
  Synthetic polypeptide

SEQ ID NO: 9548 - protein, 724 aa, Artificial Sequence; identical to SEQ ID NO: 9540
  Synthetic polypeptide

SEQ ID NO: 9549 - protein, 171 aa, Artificial Sequence; identical to SEQ ID NO: 9541
  Synthetic polypeptide

SEQ ID NO: 9550 - protein, 724 aa, Artificial Sequence; identical to SEQ ID NO: 9540
  Synthetic polypeptide

SEQ ID NO: 9551 - protein, 171 aa, Artificial Sequence; identical to SEQ ID NO: 9541
  Synthetic polypeptide

SEQ ID NO: 9552 - protein, 171 aa, Artificial Sequence; identical to SEQ ID NO: 9541
  Synthetic polypeptide

SEQ ID NO: 9553 - protein, 724 aa, Artificial Sequence; identical to SEQ ID NO: 9540
  Synthetic polypeptide

SEQ ID NO: 9554 - protein, 724 aa, Artificial Sequence; identical to SEQ ID NO: 9540
  Synthetic polypeptide

SEQ ID NO: 9555 - protein, 171 aa, Artificial Sequence; identical to SEQ ID NO: 9541
  Synthetic polypeptide

SEQ ID NO: 9556 - protein, 724 aa, Artificial Sequence; identical to SEQ ID NO: 9540
  Synthetic polypeptide

SEQ ID NO: 9557 - protein, 171 aa, Artificial Sequence; identical to SEQ ID NO: 9541
  Synthetic polypeptide

SEQ ID NO: 9558 - protein, 724 aa, Artificial Sequence; identical to SEQ ID NO: 9540
  Synthetic polypeptide

SEQ ID NO: 9559 - protein, 171 aa, Artificial Sequence; identical to SEQ ID NO: 9541
  Synthetic polypeptide

SEQ ID NO: 9560 - protein, 724 aa, Artificial Sequence; identical to SEQ ID NO: 9540
  Synthetic polypeptide

SEQ ID NO: 9561 - protein, 171 aa, Artificial Sequence; identical to SEQ ID NO: 9541
  Synthetic polypeptide

SEQ ID NO: 9562 - protein, 724 aa, Artificial Sequence; identical to SEQ ID NO: 9540
  Synthetic polypeptide

SEQ ID NO: 9563 - protein, 171 aa, Artificial Sequence; identical to SEQ ID NO: 9541
  Synthetic polypeptide

SEQ ID NO: 9564 - protein, 724 aa, Artificial Sequence; identical to SEQ ID NO: 9540
  Synthetic polypeptide

SEQ ID NO: 9565 - protein, 171 aa, Artificial Sequence; identical to SEQ ID NO: 9541
  Synthetic polypeptide

SEQ ID NO: 9566 - protein, 724 aa, Artificial Sequence; identical to SEQ ID NO: 9540
  Synthetic polypeptide

SEQ ID NO: 9567 - protein, 171 aa, Artificial Sequence; identical to SEQ ID NO: 9541
  Synthetic polypeptide

SEQ ID NO: 9568 - protein, 724 aa, Artificial Sequence; identical to SEQ ID NO: 9540
  Synthetic polypeptide

SEQ ID NO: 9569 - protein, 171 aa, Artificial Sequence; identical to SEQ ID NO: 9541
  Synthetic polypeptide

SEQ ID NO: 9570 - protein, 724 aa, Artificial Sequence; identical to SEQ ID NO: 9540
  Synthetic polypeptide

SEQ ID NO: 9571 - protein, 171 aa, Artificial Sequence; identical to SEQ ID NO: 9541
  Synthetic polypeptide

SEQ ID NO: 9572 - protein, 724 aa, Artificial Sequence; identical to SEQ ID NO: 9540
  Synthetic polypeptide

SEQ ID NO: 9573 - protein, 171 aa, Artificial Sequence; identical to SEQ ID NO: 9541
  Synthetic polypeptide

SEQ ID NO: 9574 - protein, 724 aa, Artificial Sequence; identical to SEQ ID NO: 9540
  Synthetic polypeptide

SEQ ID NO: 9575 - protein, 171 aa, Artificial Sequence; identical to SEQ ID NO: 9541
  Synthetic polypeptide

SEQ ID NO: 9576 - protein, 724 aa, Artificial Sequence; identical to SEQ ID NO: 9540
  Synthetic polypeptide

SEQ ID NO: 9577 - protein, 171 aa, Artificial Sequence; identical to SEQ ID NO: 9541
  Synthetic polypeptide

SEQ ID NO: 9578 - protein, 724 aa, Artificial Sequence; identical to SEQ ID NO: 9540
  Synthetic polypeptide

SEQ ID NO: 9579 - protein, 171 aa, Artificial Sequence; identical to SEQ ID NO: 9541
  Synthetic polypeptide

SEQ ID NO: 9580 - protein, 724 aa, Artificial Sequence; identical to SEQ ID NO: 9540
  Synthetic polypeptide

SEQ ID NO: 9581 - protein, 171 aa, Artificial Sequence; identical to SEQ ID NO: 9541
  Synthetic polypeptide

SEQ ID NO: 9582 - protein, 724 aa, Artificial Sequence; identical to SEQ ID NO: 9540
  Synthetic polypeptide

SEQ ID NO: 9583 - protein, 171 aa, Artificial Sequence; identical to SEQ ID NO: 9541
  Synthetic polypeptide

SEQ ID NO: 9584 - protein, 724 aa, Artificial Sequence; identical to SEQ ID NO: 9540
  Synthetic polypeptide

SEQ ID NO: 9585 - protein, 171 aa, Artificial Sequence; identical to SEQ ID NO: 9541
  Synthetic polypeptide

SEQ ID NO: 9586 - protein, 724 aa, Artificial Sequence; identical to SEQ ID NO: 9540
  Synthetic polypeptide

SEQ ID NO: 9587 - protein, 171 aa, Artificial Sequence; identical to SEQ ID NO: 9541
  Synthetic polypeptide

SEQ ID NO: 9588 - protein, 724 aa, Artificial Sequence; identical to SEQ ID NO: 9540
  Synthetic polypeptide

SEQ ID NO: 9589 - protein, 171 aa, Artificial Sequence; identical to SEQ ID NO: 9541
  Synthetic polypeptide

SEQ ID NO: 9590 - protein, 724 aa, Artificial Sequence; identical to SEQ ID NO: 9540
  Synthetic polypeptide

SEQ ID NO: 9591 - protein, 171 aa, Artificial Sequence; identical to SEQ ID NO: 9541
  Synthetic polypeptide

SEQ ID NO: 9592 - protein, 724 aa, Artificial Sequence; identical to SEQ ID NO: 9540
  Synthetic polypeptide

SEQ ID NO: 9593 - protein, 171 aa, Artificial Sequence; identical to SEQ ID NO: 9541
  Synthetic polypeptide

SEQ ID NO: 9594 - protein, 724 aa, Artificial Sequence; identical to SEQ ID NO: 9540
  Synthetic polypeptide

SEQ ID NO: 9595 - protein, 171 aa, Artificial Sequence; identical to SEQ ID NO: 9541
  Synthetic polypeptide

SEQ ID NO: 9596 - protein, 724 aa, Artificial Sequence; identical to SEQ ID NO: 9540
  Synthetic polypeptide

SEQ ID NO: 9597 - protein, 171 aa, Artificial Sequence; identical to SEQ ID NO: 9541
  Synthetic polypeptide

SEQ ID NO: 9598 - protein, 724 aa, Artificial Sequence; identical to SEQ ID NO: 9540
  Synthetic polypeptide

SEQ ID NO: 9599 - protein, 171 aa, Artificial Sequence; identical to SEQ ID NO: 9541
  Synthetic polypeptide

SEQ ID NO: 9600 - protein, 724 aa, Artificial Sequence; identical to SEQ ID NO: 9540
  Synthetic polypeptide

SEQ ID NO: 9601 - protein, 171 aa, Artificial Sequence; identical to SEQ ID NO: 9541
  Synthetic polypeptide

SEQ ID NO: 9602 - protein, 724 aa, Artificial Sequence; identical to SEQ ID NO: 9540
  Synthetic polypeptide

SEQ ID NO: 9603 - protein, 171 aa, Artificial Sequence; identical to SEQ ID NO: 9541
  Synthetic polypeptide

SEQ ID NO: 9604 - protein, 724 aa, Artificial Sequence; identical to SEQ ID NO: 9540
  Synthetic polypeptide

SEQ ID NO: 9605 - protein, 171 aa, Artificial Sequence; identical to SEQ ID NO: 9541
  Synthetic polypeptide

SEQ ID NO: 9606 - protein, 724 aa, Artificial Sequence; identical to SEQ ID NO: 9540
  Synthetic polypeptide

SEQ ID NO: 9607 - protein, 171 aa, Artificial Sequence; identical to SEQ ID NO: 9541
  Synthetic polypeptide

SEQ ID NO: 9608 - protein, 724 aa, Artificial Sequence; identical to SEQ ID NO: 9540
  Synthetic polypeptide

SEQ ID NO: 9609 - protein, 171 aa, Artificial Sequence; identical to SEQ ID NO: 9541
  Synthetic polypeptide

SEQ ID NO: 9610 - protein, 724 aa, Artificial Sequence; identical to SEQ ID NO: 9540
  Synthetic polypeptide

SEQ ID NO: 9611 - protein, 171 aa, Artificial Sequence; identical to SEQ ID NO: 9541
  Synthetic polypeptide

SEQ ID NO: 9612 - protein, 724 aa, Artificial Sequence; identical to SEQ ID NO: 9540
  Synthetic polypeptide

SEQ ID NO: 9613 - protein, 171 aa, Artificial Sequence; identical to SEQ ID NO: 9541
  Synthetic polypeptide

SEQ ID NO: 9614 - protein, 724 aa, Artificial Sequence; identical to SEQ ID NO: 9540
  Synthetic polypeptide

SEQ ID NO: 9615 - protein, 171 aa, Artificial Sequence; identical to SEQ ID NO: 9541
  Synthetic polypeptide

SEQ ID NO: 9616 - protein, 724 aa, Artificial Sequence; identical to SEQ ID NO: 9540
  Synthetic polypeptide

SEQ ID NO: 9617 - protein, 171 aa, Artificial Sequence; identical to SEQ ID NO: 9541
  Synthetic polypeptide

SEQ ID NO: 9618 - protein, 724 aa, Artificial Sequence; identical to SEQ ID NO: 9540
  Synthetic polypeptide

SEQ ID NO: 9619 - protein, 171 aa, Artificial Sequence; identical to SEQ ID NO: 9541
  Synthetic polypeptide

SEQ ID NO: 9620 - protein, 682 aa, Artificial Sequence
  Synthetic polypeptide
MRKQGVSSKRLQSSGRSQSKGRRGASLAREPEVEEEMEKSALGGGKLPRGSWRSSPGRIQSLKERKGLELEVVAKTFLLGPFQFVRNSLAQLREKVQELQARRFSSRTTLGIAVFVAILHWLHLVTLFENDRHFSHLSSLEREMTFRTEMGLYYSYFKTIIEAPSFLEGLWMIMNDRLTEYPLIINAIKRFHLYPEVIIASWYCTFMGIMNLFGLETKTCWNVTRIEPLNEVQSCEGLGDPACFYVGVIFILNGLMMGLFFMYGAYLSGTQLGGLITVLCFFFNHGEATRVMWTPPLRESFSYPFLVLQMCILTLILRTSSNDRRPFIALCLSNVAFMLPWQFAQFILFTQIASLFPMYVVGYIEPSKFQKIIYMNMISVTLSFILMFGNSMYLSSYYSSSLLMTWAIILKRNEIQKLGVSKLNFWLIQGSAWWCGTIILKFLTSKILGVSDHIRLSDLIAARILRYTDFDTLIYTCAPEFDFMEKATPLRYTKTLLLPVVMVITCFIFKKTVRDISYVLATNIYLRKQLLEHSELAFHTLQLLVFTALAILIMRLKMFLTPHMCVMASLICSRQLFGWLFRRVRFEKVIFGILTVMSIQGYANLRNQWSIIGEFNNLPQEELLQWIKYSTTSDAVFAGAMPTMASIKLSTLHPIVNHPHYEDADLRFILQDGQEVLSAAEK

SEQ ID NO: 9621 - protein, 129 aa, Artificial Sequence
  Synthetic polypeptide
MRLKMFLTPHMCVMASLICSRQLFGWLFRRVRFEKVIFGILTVMSIQGYANLRNQWSIIGEFNNLPQEELLQWIKYSTTSDAVFAGAMPTMASIKLSTLHPIVNHPHYEDADLRFILQDGQEVLSAAEK

SEQ ID NO: 9622 - protein, 682 aa, Artificial Sequence; identical to SEQ ID NO: 9620
  Synthetic polypeptide

SEQ ID NO: 9623 - protein, 129 aa, Artificial Sequence; identical to SEQ ID NO: 9621
  Synthetic polypeptide

SEQ ID NO: 9624 - protein, 182 aa, Artificial Sequence
  Synthetic polypeptide
MASSLTCTGVIWALLSFLCAATSCVGFFMPYWLWGSQLGKPVSFGTFRRCSYPVHDESRQMMVMVEECGRYASFQGIPSAEWRICTIVTGLGCGLLLLVALTALMGCCVSDLISRTVGRVAGGIQFLGGLLIGAGCALYPLGWDSEEVRQTCGYTSGQFDLGKNSGISLTQVPSSSFAIYLR

SEQ ID NO: 9625 - protein, 498 aa, Artificial Sequence
  Synthetic polypeptide
MSSQPAGNQTSPGATEDYSYGSWYIDEPQGGEELQPEGEVPSCHTSIPPGLYHACLASLSILVLLLLAMLVRRRQLWPDCVRGRPGLPSPVDFLAGDRPRAVPAAVFMVLLSSLCLLLPDEDALPFLTLASAPSQDGKTEAPRGAWKILGLFYYAALYYPLAACATAGHTAAHLLGSTLSWAHLGVQVWQRAECPQVPKIYKYYSLLASLPLLLGLGFLSLWYPVQLVRSFSRRTGAGSKGLQSSYSEEYLRNLLCRKKLGSSYHTSKHGFLSWARVCLRHCIYTPQPGFHLPLKLVLSATLTGTAIYQVALLLLVGVVPTIQKVRAGVTTDVSYLLAGFGIVLSEDKQEVVELVKHHLWALEVCYISALVLSCLLTFLVLMRSLVTHRTNLRALHRGAALDLSPLHRSPHPSRQAIFCWMSFSAYQTAFICLALWEAEAGGSRSQEMKTSLANMGSWCSRSSSSWEPRPWPSWCSCLCSMAGTSCSSVPWSPRGPSG

SEQ ID NO: 9626 - protein, 498 aa, Artificial Sequence; identical to SEQ ID NO: 9625
  Synthetic polypeptide

SEQ ID NO: 9627 - protein, 490 aa, Artificial Sequence
  Synthetic polypeptide
MSSQPAGNQTSPGATEDYSYGSWYIDEPQGGEELQPEGEVPSCHTSIPPGLYHACLASLSILVLLLLAMLVRRRQLWPDCVRGRPGLPSPVDFLAGDRPRAVPAAVFMVLLSSLCLLLPDEDALPFLTLASAPSQGAWKILGLFYYAALYYPLAACATAGHTAAHLLGSTLSWAHLGVQVWQRAECPQVPKIYKYYSLLASLPLLLGLGFLSLWYPVQLVRSFSRRTGAGSKGLQSSYSEEYLRNLLCRKKLGSSYHTSKHGFLSWARVCLRHCIYTPQPGFHLPLKLVLSATLTGTAIYQVALLLLVGVVPTIQKVRAGVTTDVSYLLAGFGIVLSEDKQEVVELVKHHLWALEVCYISALVLSCLLTFLVLMRSLVTHRTNLRALHRGAALDLSPLHRSPHPSRQAIFCWMSFSAYQTAFICLALWEAEAGGSRSQEMKTSLANMGSWCSRSSSSWEPRPWPSWCSCLCSMAGTSCSSVPWSPRGPSG

SEQ ID NO: 9628 - protein, 489 aa, Artificial Sequence
  Synthetic polypeptide
MSSQPAGNQTSPGATEDYSYGSWYIDEPQGGEELQPEGEVPSCHTSIPPGLYHACLASLSILVLLLLAMLVRRRQLWPDCVRGRPGLPRPRAVPAAVFMVLLSSLCLLLPDEDALPFLTLASAPSQDGKTEAPRGAWKILGLFYYAALYYPLAACATAGHTAAHLLGSTLSWAHLGVQVWQRAECPQVPKIYKYYSLLASLPLLLGLGFLSLWYPVQLVRSFSRRTGAGSKGLQSSYSEEYLRNLLCRKKLGSSYHTSKHGFLSWARVCLRHCIYTPQPGFHLPLKLVLSATLTGTAIYQVALLLLVGVVPTIQKVRAGVTTDVSYLLAGFGIVLSEDKQEVVELVKHHLWALEVCYISALVLSCLLTFLVLMRSLVTHRTNLRALHRGAALDLSPLHRSPHPSRQAIFCWMSFSAYQTAFICLALWEAEAGGSRSQEMKTSLANMGSWCSRSSSSWEPRPWPSWCSCLCSMAGTSCSSVPWSPRGPSG

SEQ ID NO: 9629 - protein, 498 aa, Artificial Sequence; identical to SEQ ID NO: 9625
  Synthetic polypeptide

SEQ ID NO: 9630 - protein, 535 aa, Artificial Sequence
  Synthetic polypeptide
MQIRLLRAELVVPLWQFIRQWPPGSDGWGQMEEKGQRMSSQPAGNQTSPGATEDYSYGSWYIDEPQGGEELQPEGEVPSCHTSIPPGLYHACLASLSILVLLLLAMLVRRRQLWPDCVRGRPGLPSPVDFLAGDRPRAVPAAVFMVLLSSLCLLLPDEDALPFLTLASAPSQDGKTEAPRGAWKILGLFYYAALYYPLAACATAGHTAAHLLGSTLSWAHLGVQVWQRAECPQVPKIYKYYSLLASLPLLLGLGFLSLWYPVQLVRSFSRRTGAGSKGLQSSYSEEYLRNLLCRKKLGSSYHTSKHGFLSWARVCLRHCIYTPQPGFHLPLKLVLSATLTGTAIYQVALLLLVGVVPTIQKVRAGVTTDVSYLLAGFGIVLSEDKQEVVELVKHHLWALEVCYISALVLSCLLTFLVLMRSLVTHRTNLRALHRGAALDLSPLHRSPHPSRQAIFCWMSFSAYQTAFICLALWEAEAGGSRSQEMKTSLANMGSWCSRSSSSWEPRPWPSWCSCLCSMAGTSCSSVPWSPRGPSG

SEQ ID NO: 9631 - protein, 537 aa, Artificial Sequence
  Synthetic polypeptide
MGGKGGGDTRGPVLFPCQLAQALSPRRAFPRELKEKGQRMSSQPAGNQTSPGATEDYSYGSWYIDEPQGGEELQPEGEVPSCHTSIPPGLYHACLASLSILVLLLLAMLVRRRQLWPDCVRGRPGLPSPVDFLAGDRPRAVPAAVFMVLLSSLCLLLPDEDALPFLTLASAPSQDGKTEAPRGAWKILGLFYYAALYYPLAACATAGHTAAHLLGSTLSWAHLGVQVWQRAECPQVPKIYKYYSLLASLPLLLGLGFLSLWYPVQLVRSFSRRTGAGSKGLQSSYSEEYLRNLLCRKKLGSSYHTSKHGFLSWARVCLRHCIYTPQPGFHLPLKLVLSATLTGTAIYQVALLLLVGVVPTIQKVRAGVTTDVSYLLAGFGIVLSEDKQEVVELVKHHLWALEVCYISALVLSCLLTFLVLMRSLVTHRTNLRALHRGAALDLSPLHRSPHPSRQAIFCWMSFSAYQTAFICLALWEAEAGGSRSQEMKTSLANMGSWCSRSSSSWEPRPWPSWCSCLCSMAGTSCSSVPWSPRGPSG

SEQ ID NO: 9632 - protein, 513 aa, Artificial Sequence
  Synthetic polypeptide
MDSQGDWAAQEKGQRMSSQPAGNQTSPGATEDYSYGSWYIDEPQGGEELQPEGEVPSCHTSIPPGLYHACLASLSILVLLLLAMLVRRRQLWPDCVRGRPGLPSPVDFLAGDRPRAVPAAVFMVLLSSLCLLLPDEDALPFLTLASAPSQDGKTEAPRGAWKILGLFYYAALYYPLAACATAGHTAAHLLGSTLSWAHLGVQVWQRAECPQVPKIYKYYSLLASLPLLLGLGFLSLWYPVQLVRSFSRRTGAGSKGLQSSYSEEYLRNLLCRKKLGSSYHTSKHGFLSWARVCLRHCIYTPQPGFHLPLKLVLSATLTGTAIYQVALLLLVGVVPTIQKVRAGVTTDVSYLLAGFGIVLSEDKQEVVELVKHHLWALEVCYISALVLSCLLTFLVLMRSLVTHRTNLRALHRGAALDLSPLHRSPHPSRQAIFCWMSFSAYQTAFICLALWEAEAGGSRSQEMKTSLANMGSWCSRSSSSWEPRPWPSWCSCLCSMAGTSCSSVPWSPRGPSG

SEQ ID NO: 9633 - protein, 498 aa, Artificial Sequence; identical to SEQ ID NO: 9625
  Synthetic polypeptide

SEQ ID NO: 9634 - protein, 498 aa, Artificial Sequence; identical to SEQ ID NO: 9625
  Synthetic polypeptide

SEQ ID NO: 9635 - protein, 490 aa, Artificial Sequence; identical to SEQ ID NO: 9627
  Synthetic polypeptide

SEQ ID NO: 9636 - protein, 489 aa, Artificial Sequence; identical to SEQ ID NO: 9628
  Synthetic polypeptide

SEQ ID NO: 9637 - protein, 498 aa, Artificial Sequence; identical to SEQ ID NO: 9625
  Synthetic polypeptide

SEQ ID NO: 9638 - protein, 535 aa, Artificial Sequence; identical to SEQ ID NO: 9630
  Synthetic polypeptide

SEQ ID NO: 9639 - protein, 537 aa, Artificial Sequence; identical to SEQ ID NO: 9631
  Synthetic polypeptide

SEQ ID NO: 9640 - protein, 513 aa, Artificial Sequence; identical to SEQ ID NO: 9632
  Synthetic polypeptide

SEQ ID NO: 9641 - protein, 498 aa, Artificial Sequence; identical to SEQ ID NO: 9625
  Synthetic polypeptide

SEQ ID NO: 9642 - protein, 498 aa, Artificial Sequence; identical to SEQ ID NO: 9625
  Synthetic polypeptide

SEQ ID NO: 9643 - protein, 490 aa, Artificial Sequence; identical to SEQ ID NO: 9627
  Synthetic polypeptide

SEQ ID NO: 9644 - protein, 489 aa, Artificial Sequence; identical to SEQ ID NO: 9628
  Synthetic polypeptide

SEQ ID NO: 9645 - protein, 498 aa, Artificial Sequence; identical to SEQ ID NO: 9625
  Synthetic polypeptide

SEQ ID NO: 9646 - protein, 535 aa, Artificial Sequence; identical to SEQ ID NO: 9630
  Synthetic polypeptide

SEQ ID NO: 9647 - protein, 537 aa, Artificial Sequence; identical to SEQ ID NO: 9631
  Synthetic polypeptide

SEQ ID NO: 9648 - protein, 513 aa, Artificial Sequence; identical to SEQ ID NO: 9632
  Synthetic polypeptide

SEQ ID NO: 9649 - protein, 627 aa, Artificial Sequence
  Synthetic polypeptide
MAAAGRLPSSWALFSPLLAGLALLGVGPVPARALHNVTAELFGAEAWGTLAAFGDLNSDKQTDLFVLRERNDLIVFLADQNAPYFKPKVKVSFKNHSALITSVVPGDYDGDSQMDVLLTYLPKNYAKSELGAVIFWGQNQTLDPNNMTILNRTFQDEPLIMDFNGDLIPDIFGITNESNQPQILLGGNLSWHPALTTTSKMRIPHSHAFIDLTEDFTADLFLTTLNATTSTFQFEIWENLDGNFSVSTILEKPQNMMVVGQSAFADFDGDGHMDHLLPGCEDKNCQKSTIYLVRSGMKQWVPVLQDFSNKGTLWGFVPFVDEQQPTEIPIPITLHIGDYNMDGYPDALVILKNTSGSNQQAFLLENVPCNNASCEEARRMFKVYWELTDLNQIKDAMVATFFDIYEDGILDIVVLSKGYTKNDFAIHTLKNNFEADAYFVKVIVLSGLCSNDCPRKITPFGVNQPGPYIMYTTVDANGYLKNGSAGQLSQSAHLALQLPYNVLGLGRSANFLDHLYVGIPRPSGEKLQAAFVHSPLNSACYSIRKQEWTAIIPNSQLIVIPYPHNVPRSWSAKLYLTPSNIVLLTAIALIGVCVFILAIIGILHWQEKKADDREKRQEAHRFHFDAM

SEQ ID NO: 9650 - protein, 479 aa, Artificial Sequence
  Synthetic polypeptide
MDVLLTYLPKNYAKSELGAVIFWGQNQTLDPNNMTILNRTFQDEPLIMDFNGDLIPDIFGITNESNQPQILLGGNLSWHPALTTTSKMRIPHSHAFIDLTEDFTADLFLTTLNATTSTFQFEIWENLDGNFSVSTILEKPQNMMVVGQSAFADFDGDGHMDHLLPGCEDKNCQKSTIYLVRSGMKQWVPVLQDFSNKGTLWGFVPFVDEQQPTEIPIPITLHIGDYNMDGYPDALVILKNTSGSNQQAFLLENVPCNNASCEEARRMFKVYWELTDLNQIKDAMVATFFDIYEDGILDIVVLSKGYTKNDFAIHTLKNNFEADAYFVKVIVLSGLCSNDCPRKITPFGVNQPGPYIMYTTVDANGYLKNGSAGQLSQSAHLALQLPYNVLGLGRSANFLDHLYVGIPRPSGEKLQAAFVHSPLNSACYSIRKQEWTAIIPNSQLIVIPYPHNVPRSSHRCLCFHLGNNWHFTLAGKESR

SEQ ID NO: 9651 - protein, 193 aa, Artificial Sequence
  Synthetic polypeptide
VLSKGYTKNDFAIHTLKNNFEADAYFVKVIVLSGLCSNDCPRKITPFGVNQPGPYIMYTTVDANGYLKNGSGRSANFLDHLYVGIPRPSGEKLQAAFVHSPLNSACYSIRKQEWTAIIPNSQLIVIPYPHNVPRSWSAKLYLTPSNIVLLTAIALIGVCVFILAIIGILHWQEKKADDREKRQEAHRFHFDAM

SEQ ID NO: 9652 - protein, 627 aa, Artificial Sequence; identical to SEQ ID NO: 9649
  Synthetic polypeptide

SEQ ID NO: 9653 - protein, 479 aa, Artificial Sequence; identical to SEQ ID NO: 9650
  Synthetic polypeptide

SEQ ID NO: 9654 - protein, 193 aa, Artificial Sequence; identical to SEQ ID NO: 9651
  Synthetic polypeptide

SEQ ID NO: 9655 - protein, 627 aa, Artificial Sequence; identical to SEQ ID NO: 9649
  Synthetic polypeptide

SEQ ID NO: 9656 - protein, 479 aa, Artificial Sequence; identical to SEQ ID NO: 9650
  Synthetic polypeptide

SEQ ID NO: 9657 - protein, 193 aa, Artificial Sequence; identical to SEQ ID NO: 9651
  Synthetic polypeptide

SEQ ID NO: 9658 - protein, 627 aa, Artificial Sequence; identical to SEQ ID NO: 9649
  Synthetic polypeptide

SEQ ID NO: 9659 - protein, 479 aa, Artificial Sequence; identical to SEQ ID NO: 9650
  Synthetic polypeptide

SEQ ID NO: 9660 - protein, 193 aa, Artificial Sequence; identical to SEQ ID NO: 9651
  Synthetic polypeptide

SEQ ID NO: 9661 - protein, 627 aa, Artificial Sequence; identical to SEQ ID NO: 9649
  Synthetic polypeptide

SEQ ID NO: 9662 - protein, 479 aa, Artificial Sequence; identical to SEQ ID NO: 9650
  Synthetic polypeptide

SEQ ID NO: 9663 - protein, 193 aa, Artificial Sequence; identical to SEQ ID NO: 9651
  Synthetic polypeptide

SEQ ID NO: 9664 - protein, 627 aa, Artificial Sequence; identical to SEQ ID NO: 9649
  Synthetic polypeptide

SEQ ID NO: 9665 - protein, 479 aa, Artificial Sequence; identical to SEQ ID NO: 9650
  Synthetic polypeptide

SEQ ID NO: 9666 - protein, 193 aa, Artificial Sequence; identical to SEQ ID NO: 9651
  Synthetic polypeptide

SEQ ID NO: 9667 - protein, 627 aa, Artificial Sequence; identical to SEQ ID NO: 9649
  Synthetic polypeptide

SEQ ID NO: 9668 - protein, 479 aa, Artificial Sequence; identical to SEQ ID NO: 9650
  Synthetic polypeptide

SEQ ID NO: 9669 - protein, 193 aa, Artificial Sequence; identical to SEQ ID NO: 9651
  Synthetic polypeptide

SEQ ID NO: 9670 - protein, 427 aa, Artificial Sequence; identical to SEQ ID NO: 479
  Synthetic polypeptide

SEQ ID NO: 9671 - protein, 405 aa, Artificial Sequence; identical to SEQ ID NO: 500
  Synthetic polypeptide

SEQ ID NO: 9672 - protein, 427 aa, Artificial Sequence; identical to SEQ ID NO: 479
  Synthetic polypeptide

SEQ ID NO: 9673 - protein, 405 aa, Artificial Sequence; identical to SEQ ID NO: 500
  Synthetic polypeptide

SEQ ID NO: 9674 - protein, 427 aa, Artificial Sequence; identical to SEQ ID NO: 479
  Synthetic polypeptide

SEQ ID NO: 9675 - protein, 405 aa, Artificial Sequence; identical to SEQ ID NO: 500
  Synthetic polypeptide

SEQ ID NO: 9676 - protein, 1591 aa, Artificial Sequence
  Synthetic polypeptide
MNMKQKSVYQQTKALLCKNFLKKWRMKRESLLEWGLSILLGLCIALFSSSMRNVQFPGMAPQNLGRVDKFNSSSLMVVYTPISNLTQQIMNKTALAPLLKGTSVIGAPNKTHMDEILLENLPYAMGIIFNETFSYKLIFFQGYNSPLWKEDFSAHCWDGYGEFSCTLTKYWNRGFVALQTAINTAIIEITTNHPVMEELMSVTAITMKTLPFITKNLLHNEMFILFFLLHFSPLVYFISLNVTKERKKSKNLMKMMGLQDSAFWLSWGLIYAGFIFIISIFVTIIITFTQIIVMTGFMVIFILFFLYGLSLVALVFLMSVLLKKAVLTNLVVFLLTLFWGCLGFTVFYEQLPSSLEWILNICSPFAFTTGMIQIIKLDYNLNGVIFPDPSGDSYTMIATFSMLLLDGLIYLLLALYFDKILPYGDERHYSPLFFLNSSSCFQHQRTNAKVIEKEIDAEHPSDDYFEPVAPEFQGKEAIRIRNVKKEYKGKSGKVEALKGLLFDIYEGQITAILGHSGAGKSSLLNILNGLSVPTEGSVTIYNKNLSEMQDLEEIRKITGVCPQFNVQFDILTVKENLSLFAKIKGIHLKEVEQEVQRILLELDMQNIQDNLAKHLSEGQKRKLTFGITILGDPQILLLDEPTTGLDPFSRDQVWSLLRERRADHVILFSTQSMDEADILADRKVIMSNGRLKCAGSSMFLKRRWGLGYHLSLHRNEICNPEQITSFITHHIPDAKLKTENKEKLVYTLPLERTNTFPDLFSDLDKCSDQGVTGYDISMSTLNEVFMKLEGQSTIEQDFEQVEMIRDSESLNEMELAHSSFSEMQTAVSDMGLWRMQVFAMARLRFLKLKRQTKVLLTLLLVFGIAIFPLIVENIMYAMLNEKIDWEFKNELYFLSPGQLPQEPRTSLLIINNTESNIEDFIKSLKHQNILLEVDDFENRNGTDGLSYNGAIIVSGKQKDYRFSVVCNTKRLHCFPILMNIISNGLLQMFNHTQHIRIESSPFPLSHIGLWTGLPDGSFFLFLVLCSISPYITMGSISDYKKNAKSQLWISGLYTSAYWCGQALVDVSFFILILLLMYLIFYIENMQYLLITSQIVFALVIVTPGYAASLVFFIYMISFIFRKRRKNSGLWSFYFFFASTIMFSITLINHFDLSILITTMVLVPSYTLLGFKTFLEVRDQEHYREFPEANFELSATDFLVCFIPYFQTLLFVFVLRCMELKCGKKRMRKDPVFRISPQSRDAKPNPEEPIDEDEDIQTERIRTATALTTSILDEKPVIIASCLHKEYAGQKKSCFSKRKKKIAARNISFCVQEGEILGLLGPNGAGKSSSIRMISGITKPTAGEVELKGCSSVLGHLGYCPQENVLWPMLTLREHLEVYAAVKGLRKADARLAIARLVSAFKLHEQLNVPVQKLTAGITRKLCFVLSLLGNSPVLLLDEPSTGIDPTGQQQMWQAIQAVVKNTERGVLLTTHNLAEAEALCDRVAIMVSGRLRCIGSIQHLKNKLGKDYILELKVKETSQVTLVHTEILKLFPQAAGQERYSSLLTYKLPVADVYPLSQTFHKLEAGFFLPFSDVGSIITLLVWPSLTIREA

SEQ ID NO: 9677 - protein, 482 aa, Artificial Sequence
  Synthetic polypeptide
MSTAIREVGVWRQTRTLLLKNYLIKCRTKKSSVQEILFPLFFLFWLILISMMHPNKKYEEVPNIELNPMDKFTLSNLILGYTPVTNITSSIMQKVSTDHLPDVIITEEYTNEKEMLTSSLSKPSNFVGVVFKDSMSYELRFFPDMIPVSSIYMDSRAGCSKSCEAAQYWSSGFTVLQASIDAAIIQLKTNVSLWKELESTKAVIMGETAVVEIDTFPRGVILIYLVIAFSPFGYFLAIHIVAEKEKKIKEFLKIMGLHDTAFWLSWVLLYTSLIFLMSLLMAVIATASLLFPQSSSIVIFLLFFLYGLSSVFFALMLTPLFKKSKHVGIVEFFVTVAFGFIGLMIILIESFPKSLVWLFSPFCHCTFVIGIAQVMHLEDFNEGASFSNLTAGPYPLIITIIMLTLNSIFYVLLAVYLDQVIPGEFGLRRSSLYFLKPSYWSKSKRNYEELSEGNVNGNISFSEIIEPVSSEFVGKEAISAIP

SEQ ID NO: 9678 - protein, 482 aa, Artificial Sequence; identical to SEQ ID NO: 9677
  Synthetic polypeptide

SEQ ID NO: 9679 - protein, 153 aa, Artificial Sequence
  Synthetic polypeptide
VEFFVTVAFGFIGLMIILIESFPKSLVWLFSPFCHCTFVIGIAQVMHLEDFNEGASFSNLTAGPYPLIITIIMLTLNSIFYVLLAVYLDQVIPGEFGLRRSSLYFLKPSYWSKSKRNYEELSEGNVNGNISFSEIIEPVSSEFVGKEAISAIP

SEQ ID NO: 9680 - protein, 482 aa, Artificial Sequence; identical to SEQ ID NO: 9677
  Synthetic polypeptide

SEQ ID NO: 9681 - protein, 482 aa, Artificial Sequence; identical to SEQ ID NO: 9677
  Synthetic polypeptide

SEQ ID NO: 9682 - protein, 112 aa, Artificial Sequence
  Synthetic polypeptide
MSTAIREVGVWRQTRTLLLKNYLIKCRTKKSSVQEILFPLFFLFWLILISMMHPNKKYEEVPNIELNPMDKFTLSNLILGYTPVTNITSSIMQKVSTDHLPDGALAHACNPN

SEQ ID NO: 9683 - protein, 112 aa, Artificial Sequence; identical to SEQ ID NO: 9682
  Synthetic polypeptide

SEQ ID NO: 9684 - protein, 112 aa, Artificial Sequence; identical to SEQ ID NO: 9682
  Synthetic polypeptide

SEQ ID NO: 9685 - protein, 112 aa, Artificial Sequence; identical to SEQ ID NO: 9682
  Synthetic polypeptide

SEQ ID NO: 9686 - protein, 112 aa, Artificial Sequence; identical to SEQ ID NO: 9682
  Synthetic polypeptide

SEQ ID NO: 9687 - protein, 112 aa, Artificial Sequence; identical to SEQ ID NO: 9682
  Synthetic polypeptide

SEQ ID NO: 9688 - protein, 112 aa, Artificial Sequence; identical to SEQ ID NO: 9682
  Synthetic polypeptide

SEQ ID NO: 9689 - protein, 112 aa, Artificial Sequence; identical to SEQ ID NO: 9682
  Synthetic polypeptide

SEQ ID NO: 9690 - protein, 112 aa, Artificial Sequence; identical to SEQ ID NO: 9682
  Synthetic polypeptide

SEQ ID NO: 9691 - protein, 112 aa, Artificial Sequence; identical to SEQ ID NO: 9682
  Synthetic polypeptide

SEQ ID NO: 9692 - protein, 112 aa, Artificial Sequence; identical to SEQ ID NO: 9682
  Synthetic polypeptide

SEQ ID NO: 9693 - protein, 112 aa, Artificial Sequence; identical to SEQ ID NO: 9682
  Synthetic polypeptide

SEQ ID NO: 9694 - protein, 112 aa, Artificial Sequence; identical to SEQ ID NO: 9682
  Synthetic polypeptide

SEQ ID NO: 9695 - protein, 112 aa, Artificial Sequence; identical to SEQ ID NO: 9682
  Synthetic polypeptide

SEQ ID NO: 9696 - protein, 112 aa, Artificial Sequence; identical to SEQ ID NO: 9682
  Synthetic polypeptide

SEQ ID NO: 9697 - protein, 112 aa, Artificial Sequence; identical to SEQ ID NO: 9682
  Synthetic polypeptide

SEQ ID NO: 9698 - protein, 112 aa, Artificial Sequence; identical to SEQ ID NO: 9682
  Synthetic polypeptide

SEQ ID NO: 9699 - protein, 112 aa, Artificial Sequence; identical to SEQ ID NO: 9682
  Synthetic polypeptide

SEQ ID NO: 9700 - protein, 112 aa, Artificial Sequence; identical to SEQ ID NO: 9682
  Synthetic polypeptide

SEQ ID NO: 9701 - protein, 112 aa, Artificial Sequence; identical to SEQ ID NO: 9682
  Synthetic polypeptide

SEQ ID NO: 9702 - protein, 112 aa, Artificial Sequence; identical to SEQ ID NO: 9682
  Synthetic polypeptide

SEQ ID NO: 9703 - protein, 112 aa, Artificial Sequence; identical to SEQ ID NO: 9682
  Synthetic polypeptide

SEQ ID NO: 9704 - protein, 112 aa, Artificial Sequence; identical to SEQ ID NO: 9682
  Synthetic polypeptide

SEQ ID NO: 9705 - protein, 112 aa, Artificial Sequence; identical to SEQ ID NO: 9682
  Synthetic polypeptide

SEQ ID NO: 9706 - protein, 112 aa, Artificial Sequence; identical to SEQ ID NO: 9682
  Synthetic polypeptide

SEQ ID NO: 9707 - protein, 112 aa, Artificial Sequence; identical to SEQ ID NO: 9682
  Synthetic polypeptide

SEQ ID NO: 9708 - protein, 112 aa, Artificial Sequence; identical to SEQ ID NO: 9682
  Synthetic polypeptide

SEQ ID NO: 9709 - protein, 112 aa, Artificial Sequence; identical to SEQ ID NO: 9682
  Synthetic polypeptide

SEQ ID NO: 9710 - protein, 232 aa, Artificial Sequence; identical to SEQ ID NO: 808
  Synthetic polypeptide

SEQ ID NO: 9711 - protein, 239 aa, Artificial Sequence; identical to SEQ ID NO: 802
  Synthetic polypeptide

SEQ ID NO: 9712 - protein, 148 aa, Artificial Sequence; identical to SEQ ID NO: 1028
  Synthetic polypeptide

SEQ ID NO: 9713 - protein, 232 aa, Artificial Sequence; identical to SEQ ID NO: 808
  Synthetic polypeptide

SEQ ID NO: 9714 - protein, 239 aa, Artificial Sequence; identical to SEQ ID NO: 802
  Synthetic polypeptide

SEQ ID NO: 9715 - protein, 148 aa, Artificial Sequence; identical to SEQ ID NO: 1028
  Synthetic polypeptide

SEQ ID NO: 9716 - protein, 232 aa, Artificial Sequence; identical to SEQ ID NO: 808
  Synthetic polypeptide

SEQ ID NO: 9717 - protein, 239 aa, Artificial Sequence; identical to SEQ ID NO: 802
  Synthetic polypeptide

SEQ ID NO: 9718 - protein, 148 aa, Artificial Sequence; identical to SEQ ID NO: 1028
  Synthetic polypeptide

SEQ ID NO: 9719 - protein, 232 aa, Artificial Sequence; identical to SEQ ID NO: 808
  Synthetic polypeptide

SEQ ID NO: 9720 - protein, 239 aa, Artificial Sequence; identical to SEQ ID NO: 802
  Synthetic polypeptide

SEQ ID NO: 9721 - protein, 148 aa, Artificial Sequence; identical to SEQ ID NO: 1028
  Synthetic polypeptide

SEQ ID NO: 9722 - protein, 232 aa, Artificial Sequence; identical to SEQ ID NO: 808
  Synthetic polypeptide

SEQ ID NO: 9723 - protein, 239 aa, Artificial Sequence; identical to SEQ ID NO: 802
  Synthetic polypeptide

SEQ ID NO: 9724 - protein, 148 aa, Artificial Sequence; identical to SEQ ID NO: 1028
  Synthetic polypeptide

SEQ ID NO: 9725 - protein, 232 aa, Artificial Sequence; identical to SEQ ID NO: 808
  Synthetic polypeptide

SEQ ID NO: 9726 - protein, 239 aa, Artificial Sequence; identical to SEQ ID NO: 802
  Synthetic polypeptide

SEQ ID NO: 9727 - protein, 148 aa, Artificial Sequence; identical to SEQ ID NO: 1028
  Synthetic polypeptide

SEQ ID NO: 9728 - protein, 232 aa, Artificial Sequence; identical to SEQ ID NO: 808
  Synthetic polypeptide

SEQ ID NO: 9729 - protein, 239 aa, Artificial Sequence; identical to SEQ ID NO: 802
  Synthetic polypeptide

SEQ ID NO: 9730 - protein, 148 aa, Artificial Sequence; identical to SEQ ID NO: 1028
  Synthetic polypeptide

SEQ ID NO: 9731 - protein, 232 aa, Artificial Sequence; identical to SEQ ID NO: 808
  Synthetic polypeptide

SEQ ID NO: 9732 - protein, 239 aa, Artificial Sequence; identical to SEQ ID NO: 802
  Synthetic polypeptide

SEQ ID NO: 9733 - protein, 148 aa, Artificial Sequence; identical to SEQ ID NO: 1028
  Synthetic polypeptide

SEQ ID NO: 9734 - protein, 232 aa, Artificial Sequence; identical to SEQ ID NO: 808
  Synthetic polypeptide

SEQ ID NO: 9735 - protein, 239 aa, Artificial Sequence; identical to SEQ ID NO: 802
  Synthetic polypeptide

SEQ ID NO: 9736 - protein, 148 aa, Artificial Sequence; identical to SEQ ID NO: 1028
  Synthetic polypeptide

SEQ ID NO: 9737 - protein, 232 aa, Artificial Sequence; identical to SEQ ID NO: 808
  Synthetic polypeptide

SEQ ID NO: 9738 - protein, 239 aa, Artificial Sequence; identical to SEQ ID NO: 802
  Synthetic polypeptide

SEQ ID NO: 9739 - protein, 148 aa, Artificial Sequence; identical to SEQ ID NO: 1028
  Synthetic polypeptide

SEQ ID NO: 9740 - protein, 232 aa, Artificial Sequence; identical to SEQ ID NO: 808
  Synthetic polypeptide

SEQ ID NO: 9741 - protein, 239 aa, Artificial Sequence; identical to SEQ ID NO: 802
  Synthetic polypeptide

SEQ ID NO: 9742 - protein, 148 aa, Artificial Sequence; identical to SEQ ID NO: 1028
  Synthetic polypeptide

SEQ ID NO: 9743 - protein, 232 aa, Artificial Sequence; identical to SEQ ID NO: 808
  Synthetic polypeptide

SEQ ID NO: 9744 - protein, 239 aa, Artificial Sequence; identical to SEQ ID NO: 802
  Synthetic polypeptide

SEQ ID NO: 9745 - protein, 148 aa, Artificial Sequence; identical to SEQ ID NO: 1028
  Synthetic polypeptide

SEQ ID NO: 9746 - protein, 232 aa, Artificial Sequence; identical to SEQ ID NO: 808
  Synthetic polypeptide

SEQ ID NO: 9747 - protein, 239 aa, Artificial Sequence; identical to SEQ ID NO: 802
  Synthetic polypeptide

SEQ ID NO: 9748 - protein, 148 aa, Artificial Sequence; identical to SEQ ID NO: 1028
  Synthetic polypeptide

SEQ ID NO: 9749 - protein, 232 aa, Artificial Sequence; identical to SEQ ID NO: 808
  Synthetic polypeptide

SEQ ID NO: 9750 - protein, 239 aa, Artificial Sequence; identical to SEQ ID NO: 802
  Synthetic polypeptide

SEQ ID NO: 9751 - protein, 148 aa, Artificial Sequence; identical to SEQ ID NO: 1028
  Synthetic polypeptide

SEQ ID NO: 9752 - protein, 232 aa, Artificial Sequence; identical to SEQ ID NO: 808
  Synthetic polypeptide

SEQ ID NO: 9753 - protein, 239 aa, Artificial Sequence; identical to SEQ ID NO: 802
  Synthetic polypeptide

SEQ ID NO: 9754 - protein, 148 aa, Artificial Sequence; identical to SEQ ID NO: 1028
  Synthetic polypeptide

SEQ ID NO: 9755 - protein, 232 aa, Artificial Sequence; identical to SEQ ID NO: 808
  Synthetic polypeptide

SEQ ID NO: 9756 - protein, 239 aa, Artificial Sequence; identical to SEQ ID NO: 802
  Synthetic polypeptide

SEQ ID NO: 9757 - protein, 148 aa, Artificial Sequence; identical to SEQ ID NO: 1028
  Synthetic polypeptide

SEQ ID NO: 9758 - protein, 232 aa, Artificial Sequence; identical to SEQ ID NO: 808
  Synthetic polypeptide

SEQ ID NO: 9759 - protein, 239 aa, Artificial Sequence; identical to SEQ ID NO: 802
  Synthetic polypeptide

SEQ ID NO: 9760 - protein, 148 aa, Artificial Sequence; identical to SEQ ID NO: 1028
  Synthetic polypeptide

SEQ ID NO: 9761 - protein, 232 aa, Artificial Sequence; identical to SEQ ID NO: 808
  Synthetic polypeptide

SEQ ID NO: 9762 - protein, 239 aa, Artificial Sequence; identical to SEQ ID NO: 802
  Synthetic polypeptide

SEQ ID NO: 9763 - protein, 148 aa, Artificial Sequence; identical to SEQ ID NO: 1028
  Synthetic polypeptide

SEQ ID NO: 9764 - protein, 161 aa, Artificial Sequence
  Synthetic polypeptide
MVPPRRHRGAGRPGVLSSSPPFRLRSAKFSGIALEDLRRALKTRLQMVCVFVMNRMNSQNSGFTQRRRMALGIVILLLVDVIWVASSELTSYVFTQYNKPFFSTFAKTSMFVLYLLGFIIWKPWRQQCTRGLRGKHAAFHFRKLSLQMLKVTLLLAQQIQL

SEQ ID NO: 9765 - protein, 155 aa, Artificial Sequence
  Synthetic polypeptide
MDSSGWRGVLSSSPPFRLRSAKFSGIALEDLRRALKTRLQMVCVFVMNRMNSQNSGFTQRRRMALGIVILLLVDVIWVASSELTSYVFTQYNKPFFSTFAKTSMFVLYLLGFIIWKPWRQQCTRGLRGKHAAFHFRKLSLQMLKVTLLLAQQIQL

SEQ ID NO: 9766 - protein, 155 aa, Artificial Sequence; identical to SEQ ID NO: 9765
  Synthetic polypeptide

SEQ ID NO: 9767 - protein, 751 aa, Artificial Sequence
  Synthetic polypeptide
MQPRRAQAPGAQLLPALALLLLLLGAGPRGSSLANPVPAAPLSAPGPCAAQPCRNGGVCTSRPEPDPQHPAPAGEPGYSCTCPAGISGANCQLVADPCASNPCHHGNCSSSSSSSSDGYLCICNEGYEGPNCEQALPSLPATGWTESMAPRQLQPVPATQEPDKILPRSQATVTLPTWQPKTGQKVVEMKWDQVEVIPDIACGNASSNSSAGGRLVSFEVPQNTSVKIRQDATASLILLWKVTATGFQQCSLIDGRSVTPLQASGGLVLLEEMLALGNNHFIGFVNDSVTKSIVALRLTLVVKVSTCVPGESHANDLECSGKGKCTTKPSEATFSCTCEEQYVGTFCEEYDACQRKPCQNNASCIDANEKQDGSNFTCVCLPACKEGHVCLLFLHDCYTGELCQSKIDYCILDPCRNGATCISSLSGFTCQCPEGYFGSACEEKVDPCASSPCQNNGTCYVDGVHFTCNCSPGFTGPTCAQLIDFCALSPCAHGTCRSVGTSYKCLCDPGYHGLYCEEEYNECLSAPCLNAATCRDLVNGYECVCLAEYKGTHCELYKDPCANVSCLNGATCDSDGLNGTCICAPGFTGEECDIDINECDSNPCHHGGSCLDQPNGYNCHCPHGWVGANCEIHLQWKSGHMAESLTNMPRHSLYIIIGALCVAFILMLIILIVGICRISRIEYQGSSRPAYEEFYNCRSIDSEFSNAIASIRHARFGKKSRPAMYDVSPIAYEDYSPDDKPLVTLIKTKDL

SEQ ID NO: 9768 - protein, 751 aa, Artificial Sequence; identical to SEQ ID NO: 9767
  Synthetic polypeptide

SEQ ID NO: 9769 - protein, 751 aa, Artificial Sequence; identical to SEQ ID NO: 9767
  Synthetic polypeptide

SEQ ID NO: 9770 - protein, 751 aa, Artificial Sequence; identical to SEQ ID NO: 9767
  Synthetic polypeptide

SEQ ID NO: 9771 - protein, 751 aa, Artificial Sequence; identical to SEQ ID NO: 9767
  Synthetic polypeptide

SEQ ID NO: 9772 - protein, 751 aa, Artificial Sequence; identical to SEQ ID NO: 9767
  Synthetic polypeptide

SEQ ID NO: 9773 - protein, 751 aa, Artificial Sequence; identical to SEQ ID NO: 9767
  Synthetic polypeptide

SEQ ID NO: 9774 - protein, 751 aa, Artificial Sequence; identical to SEQ ID NO: 9767
  Synthetic polypeptide

SEQ ID NO: 9775 - protein, 751 aa, Artificial Sequence; identical to SEQ ID NO: 9767
  Synthetic polypeptide

SEQ ID NO: 9776 - protein, 751 aa, Artificial Sequence; identical to SEQ ID NO: 9767
  Synthetic polypeptide

SEQ ID NO: 9777 - protein, 751 aa, Artificial Sequence; identical to SEQ ID NO: 9767
  Synthetic polypeptide

SEQ ID NO: 9778 - protein, 751 aa, Artificial Sequence; identical to SEQ ID NO: 9767
  Synthetic polypeptide

SEQ ID NO: 9779 - protein, 751 aa, Artificial Sequence; identical to SEQ ID NO: 9767
  Synthetic polypeptide

SEQ ID NO: 9780 - protein, 751 aa, Artificial Sequence; identical to SEQ ID NO: 9767
  Synthetic polypeptide

SEQ ID NO: 9781 - protein, 751 aa, Artificial Sequence; identical to SEQ ID NO: 9767
  Synthetic polypeptide

SEQ ID NO: 9782 - protein, 751 aa, Artificial Sequence; identical to SEQ ID NO: 9767
  Synthetic polypeptide

SEQ ID NO: 9783 - protein, 751 aa, Artificial Sequence; identical to SEQ ID NO: 9767
  Synthetic polypeptide

SEQ ID NO: 9784 - protein, 751 aa, Artificial Sequence; identical to SEQ ID NO: 9767
  Synthetic polypeptide

SEQ ID NO: 9785 - protein, 751 aa, Artificial Sequence; identical to SEQ ID NO: 9767
  Synthetic polypeptide

SEQ ID NO: 9786 - protein, 758 aa, Artificial Sequence
  Synthetic polypeptide
MQPRRAQAPGAQLLPALALLLLLLGAGPRGSSLANPVPAAPLSAPGPCAAQPCRNGGVCTSRPEPDPQHPAPAGEPGYSCTCPAGISGANCQLVADPCASNPCHHGNCSSSSSSSSDGYLCICNEGYEGPNCEQALPSLPATGWTESMAPRQLQPVPATQEPDKILPRSQATVTLPTWQPKTGQKVVEMKWDQVEVIPDIACGNASSNSSAGGRLVSFEVPQNTSVKIRQDATASLILLWKVTATGFQQCSLIDGRSVTPLQASGGLVLLEEMLALGNNHFIGFVNDSVTKSIVALRLTLVVKVSTCVPGESHANDLECSGKGKCTTKPSEVQWLTPVIPALWEAEAGGSPEATFSCTCEEQYVGTFCEEYDACQRKPCQNNASCIDANEKQDGSNFTCVCLPGYTGELCQSKIDYCILDPCRNGATCISSLSGFTCQCPEGYFGSACEEKVDPCASSPCQNNGTCYVDGVHFTCNCSPGFTGPTCAQLIDFCALSPCAHGTCRSVGTSYKCLCDPGYHGLYCEEEYNECLSAPCLNAATCRDLVNGYECVCLAEYKGTHCELYKDPCANVSCLNGATCDSDGLNGTCICAPGFTGEECDIDINECDSNPCHHGGSCLDQPNGYNCHCPHGWVGANCEIHLQWKSGHMAESLTNMPRHSLYIIIGALCVAFILMLIILIVGICRISRIEYQGSSRPAYEEFYNCRSIDSEFSNAIASIRHARFGKKSRPAMYDVSPIAYEDYSPDDKPLVTLIKTKDL

SEQ ID NO: 9787 - protein, 758 aa, Artificial Sequence; identical to SEQ ID NO: 9786
  Synthetic polypeptide

SEQ ID NO: 9788 - protein, 758 aa, Artificial Sequence; identical to SEQ ID NO: 9786
  Synthetic polypeptide

SEQ ID NO: 9789 - protein, 758 aa, Artificial Sequence; identical to SEQ ID NO: 9786
  Synthetic polypeptide

SEQ ID NO: 9790 - protein, 758 aa, Artificial Sequence; identical to SEQ ID NO: 9786
  Synthetic polypeptide

SEQ ID NO: 9791 - protein, 758 aa, Artificial Sequence; identical to SEQ ID NO: 9786
  Synthetic polypeptide

SEQ ID NO: 9792 - protein, 758 aa, Artificial Sequence; identical to SEQ ID NO: 9786
  Synthetic polypeptide

SEQ ID NO: 9793 - protein, 758 aa, Artificial Sequence; identical to SEQ ID NO: 9786
  Synthetic polypeptide

SEQ ID NO: 9794 - protein, 758 aa, Artificial Sequence; identical to SEQ ID NO: 9786
  Synthetic polypeptide

SEQ ID NO: 9795 - protein, 758 aa, Artificial Sequence; identical to SEQ ID NO: 9786
  Synthetic polypeptide

SEQ ID NO: 9796 - protein, 758 aa, Artificial Sequence; identical to SEQ ID NO: 9786
  Synthetic polypeptide

SEQ ID NO: 9797 - protein, 758 aa, Artificial Sequence; identical to SEQ ID NO: 9786
  Synthetic polypeptide

SEQ ID NO: 9798 - protein, 758 aa, Artificial Sequence; identical to SEQ ID NO: 9786
  Synthetic polypeptide

SEQ ID NO: 9799 - protein, 758 aa, Artificial Sequence; identical to SEQ ID NO: 9786
  Synthetic polypeptide

SEQ ID NO: 9800 - protein, 758 aa, Artificial Sequence; identical to SEQ ID NO: 9786
  Synthetic polypeptide

SEQ ID NO: 9801 - protein, 758 aa, Artificial Sequence; identical to SEQ ID NO: 9786
  Synthetic polypeptide

SEQ ID NO: 9802 - protein, 758 aa, Artificial Sequence; identical to SEQ ID NO: 9786
  Synthetic polypeptide

SEQ ID NO: 9803 - protein, 758 aa, Artificial Sequence; identical to SEQ ID NO: 9786
  Synthetic polypeptide

SEQ ID NO: 9804 - protein, 758 aa, Artificial Sequence; identical to SEQ ID NO: 9786
  Synthetic polypeptide

SEQ ID NO: 9805 - protein, 758 aa, Artificial Sequence; identical to SEQ ID NO: 9786
  Synthetic polypeptide

SEQ ID NO: 9806 - protein, 670 aa, Artificial Sequence; identical to SEQ ID NO: 201
  Synthetic polypeptide

SEQ ID NO: 9807 - protein, 303 aa, Artificial Sequence; identical to SEQ ID NO: 666
  Synthetic polypeptide

SEQ ID NO: 9808 - protein, 363 aa, Artificial Sequence; identical to SEQ ID NO: 592
  Synthetic polypeptide

SEQ ID NO: 9809 - protein, 670 aa, Artificial Sequence; identical to SEQ ID NO: 201
  Synthetic polypeptide

SEQ ID NO: 9810 - protein, 303 aa, Artificial Sequence; identical to SEQ ID NO: 666
  Synthetic polypeptide

SEQ ID NO: 9811 - protein, 363 aa, Artificial Sequence; identical to SEQ ID NO: 592
  Synthetic polypeptide

SEQ ID NO: 9812 - protein, 670 aa, Artificial Sequence; identical to SEQ ID NO: 201
  Synthetic polypeptide

SEQ ID NO: 9813 - protein, 303 aa, Artificial Sequence; identical to SEQ ID NO: 666
  Synthetic polypeptide

SEQ ID NO: 9814 - protein, 363 aa, Artificial Sequence; identical to SEQ ID NO: 592
  Synthetic polypeptide

SEQ ID NO: 9815 - protein, 670 aa, Artificial Sequence; identical to SEQ ID NO: 201
  Synthetic polypeptide

SEQ ID NO: 9816 - protein, 303 aa, Artificial Sequence; identical to SEQ ID NO: 666
  Synthetic polypeptide

SEQ ID NO: 9817 - protein, 363 aa, Artificial Sequence; identical to SEQ ID NO: 592
  Synthetic polypeptide

SEQ ID NO: 9818 - protein, 670 aa, Artificial Sequence; identical to SEQ ID NO: 201
  Synthetic polypeptide

SEQ ID NO: 9819 - protein, 303 aa, Artificial Sequence; identical to SEQ ID NO: 666
  Synthetic polypeptide

SEQ ID NO: 9820 - protein, 363 aa, Artificial Sequence; identical to SEQ ID NO: 592
  Synthetic polypeptide

SEQ ID NO: 9821 - protein, 670 aa, Artificial Sequence; identical to SEQ ID NO: 201
  Synthetic polypeptide

SEQ ID NO: 9822 - protein, 303 aa, Artificial Sequence; identical to SEQ ID NO: 666
  Synthetic polypeptide

SEQ ID NO: 9823 - protein, 363 aa, Artificial Sequence; identical to SEQ ID NO: 592
  Synthetic polypeptide

SEQ ID NO: 9824 - protein, 670 aa, Artificial Sequence; identical to SEQ ID NO: 201
  Synthetic polypeptide

SEQ ID NO: 9825 - protein, 303 aa, Artificial Sequence; identical to SEQ ID NO: 666
  Synthetic polypeptide

SEQ ID NO: 9826 - protein, 363 aa, Artificial Sequence; identical to SEQ ID NO: 592
  Synthetic polypeptide

SEQ ID NO: 9827 - protein, 670 aa, Artificial Sequence; identical to SEQ ID NO: 201
  Synthetic polypeptide

SEQ ID NO: 9828 - protein, 303 aa, Artificial Sequence; identical to SEQ ID NO: 666
  Synthetic polypeptide

SEQ ID NO: 9829 - protein, 363 aa, Artificial Sequence; identical to SEQ ID NO: 592
  Synthetic polypeptide

SEQ ID NO: 9830 - protein, 670 aa, Artificial Sequence; identical to SEQ ID NO: 201
  Synthetic polypeptide

SEQ ID NO: 9831 - protein, 303 aa, Artificial Sequence; identical to SEQ ID NO: 666
  Synthetic polypeptide

SEQ ID NO: 9832 - protein, 363 aa, Artificial Sequence; identical to SEQ ID NO: 592
  Synthetic polypeptide

SEQ ID NO: 9833 - protein, 670 aa, Artificial Sequence; identical to SEQ ID NO: 201
  Synthetic polypeptide

SEQ ID NO: 9834 - protein, 303 aa, Artificial Sequence; identical to SEQ ID NO: 666
  Synthetic polypeptide

SEQ ID NO: 9835 - protein, 363 aa, Artificial Sequence; identical to SEQ ID NO: 592
  Synthetic polypeptide

SEQ ID NO: 9836 - protein, 670 aa, Artificial Sequence; identical to SEQ ID NO: 201
  Synthetic polypeptide

SEQ ID NO: 9837 - protein, 303 aa, Artificial Sequence; identical to SEQ ID NO: 666
  Synthetic polypeptide

SEQ ID NO: 9838 - protein, 363 aa, Artificial Sequence; identical to SEQ ID NO: 592
  Synthetic polypeptide

SEQ ID NO: 9839 - protein, 670 aa, Artificial Sequence; identical to SEQ ID NO: 201
  Synthetic polypeptide

SEQ ID NO: 9840 - protein, 303 aa, Artificial Sequence; identical to SEQ ID NO: 666
  Synthetic polypeptide

SEQ ID NO: 9841 - protein, 363 aa, Artificial Sequence; identical to SEQ ID NO: 592
  Synthetic polypeptide

SEQ ID NO: 9842 - protein, 670 aa, Artificial Sequence; identical to SEQ ID NO: 201
  Synthetic polypeptide

SEQ ID NO: 9843 - protein, 303 aa, Artificial Sequence; identical to SEQ ID NO: 666
  Synthetic polypeptide

SEQ ID NO: 9844 - protein, 363 aa, Artificial Sequence; identical to SEQ ID NO: 592
  Synthetic polypeptide

SEQ ID NO: 9845 - protein, 313 aa, Artificial Sequence
  Synthetic polypeptide
MPRNQGFSEPEYSAEYSAEYSVSLPSDPDRGVGRTHEISVRNSGSCLCLPRFMRLTFVPESLENLYQTYFKRQRHETLLVLVVFAALFDCYVVVMCAVVFSSDKLASLAVAGIGLVLDIILFVLCKKGLLPDRVTRRVLPYVLWLLITAQIFSYLGLNFARAHAASDTVGWQVFFVFSFFITLPLSLSPIVIISVVSCVVHTLVLGVTVAQQQQEELKGMQLLRELKPAETMEHAYVLKKYIQDEYLPYVFVSFAYLCVMPRQHGVLVNSQCLGVEQDAKQAQNNMSHPQLNPGQRLPLPVRHRCGHHVLLHG

SEQ ID NO: 9846 - protein, 313 aa, Artificial Sequence; identical to SEQ ID NO: 9845
  Synthetic polypeptide

SEQ ID NO: 9847 - protein, 313 aa, Artificial Sequence; identical to SEQ ID NO: 9845
  Synthetic polypeptide

SEQ ID NO: 9848 - protein, 3036 aa, Artificial Sequence
  Synthetic polypeptide
MAPPPPPVLPVLLLLAAAAALPAMGLRAAAWEPRVPGGTRAFALRPGCTYAVGAACTPRAPRELLDVGRDGRLAGRRRVSGAGRPLPLQVRLVARSAPTALSRRLRARTHLPGCGARARLCGTGARLCGALCFPVPGGCAAAQHSALAAPTTLPACRCPPRPRPRCPGRPICLPPGGSVRLRLLCALRRAAGAVRVGLALEAATAGTPSASPSPSPPLPPNLPEARAGPARRARRGTSGRGSLKFPMPNYQVALFENEPAGTLILQLHAHYTIEGEEERVSYYMEGLFDERSRGYFRIDSATGAVSTDSVLDRETKETHVLRVKAVDYSTPPRSATTYITVLVKDTNDHSPVFEQSEYRERVRENLEVGYEVLTIRASDRDSPINANLRYRVLGGAWDVFQLNESSGVVSTRAVLDREEAAEYQLLVEANDQGRNPGPLSATATVYIEVEDENDNYPQFSEQNYVVQVPEDVGLNTAVLRVQATDRDQGQNAAIHYSILSGNVAGQFYLHSLSGILDVINPLDFEDVQKYSLSIKAQDGGRPPLINSSGVVSVQVLDVNDNEPIFVSSPFQATVLENVPLGYPVVHIQAVDADSGENARLHYRLVDTASTFLGGGSAGPKNPAPTPDFPFQIHNSSGWITVCAELDREEVEHYSFGVEAVDHGSPPMSSSTSVSITVLDVNDNDPVFTQPTYELRLNEDAAVGSSVLTLQARDRDANSVITYQLTGGNTRNRFALSSQRGGGLITLALPLDYKQEQQYVLAVTASDGTRSHTAHVLINVTDANTHRPVFQSSHYTVSVSEDRPVGTSIATLSANDEDTGENARITYVIQDPVPQFRIDPDSGTMYTMMELDYENQVAYTLTIMAQDNGIPQKSDTTTLEILILDANDNAPQFLWDFYQGSIFEDAPPSTSILQVSATDRDSGPNGRLLYTFQGGDDGDGDFYIEPTSGVIRTQRRLDRENVAVYNLWALAVDRGSPTPLSASVEIQVTILDINDNAPMFEKDELELFVEENNPVGSVVAKIRANDPDEGPNAQIMYQIVEGDMRHFFQLDLLNGDLRAMVELDFEVRREYVLVVQATSAPLVSRATVHILLVDQNDNPPVLPDFQILFNNYVTNKSNSFPTGVIGCIPAHDPDVSDSLNYTFVQGNELRLLLLDPATGELQLSRDLDNNRPLEALMEVSVSGDVAMSGDVSVVTVWRAVLLASDGIHSVTAFCTLRVTIITDDMLTNSITVRLENMSQEKFLSPLLALFVEGVAAVLSTTKDDVFVFNVQNDTDVSSNILNVTFSALLPGGVRGQFFPSEDLQEQIYLNRTLLTTISTQRVLPFDDNICLREPCENYMKCVSVLRFDSSAPFLSSTTVLFRPIHPINGLRCRCPPGFTGDYCETEIDLCYSDPCGANGRCRSREGGYTCECFEDFTGEHCEVDARSGRCANGVCKNGGTCVNLLIGGFHCVCPPGEYERPYCEVTTRSFPPQSFVTFRGLRQRFHFTISLTFATQERNGLLLYNGRFNEKHDFIALEIVDEQVQLTFSAGETTTTVAPKVPSGVSDGRWHSVQVQYYNKPNIGHLGLPHGPSGEKMAVVTVDDCDTTMAVRFGKDIGNYSCAAQGTQTGSKKSLDLTGPLLLGGVPNLPEDFPVHNRQFVGCMRNLSVDGKNVDMAGFIANNGTREGCAARRNFCDGRRCQNGGTCVNRWNMYLCECPLRFGGKNCEQAMPHPQLFSGESVVSWSDLNIIISVPWYLGLMFRTRKEDSVLMEATSGGPTSFRLQILNNYLQFEVSHGPSDVESVMLSGLRVTDGEWHHLLIELKNVKEDSEMKHLVTMTLDYGMDQNKADIGGMLPGLTVRSVVVGGASEDKVSVRRGFRGCMQGVRMGGTPTNVATLNMNNALKVRVKDGCDVDDPCTSSPCPPNSRCHDAWEDYSCVCDKGYLGINCVDACHLNPCENMGACVRSPGSPQGYVCECGPSHYGPYCENKLDLPCPRGWWGNPVCGPCHCAVSKGFDPDCNKTNGQCQCKENYYKLLAQDTCLPCDCFPHGSHSRTCDMATGQCACKPGVIGRQCNRCDNPFAEVTTLGCEVIYNGCPKAFEAGIWWPQTKFGQPAAVPCPKGSVGNAVRHCSGEKGWLPPELFNCTTISFVDLRAMNEKLSRNETQVDGARALQLVRALRSATQHTGTLFGNDVRTAYQLLGHVLQHESWQQGFDLAATQDADFHEDVIHSGSALLAPATRAAWEQIQRSEGGTAQLLRRLEGYFSNVARNVRRTYLRPFVIVTANMILAVDIFDKFNFTGARVPRFDTIHEEFPRELESSVSFPADFFRPPEEKEGPLLRPAGRRTTPQTTRPGPGTEREAPISRRRRHPDDAGQFAVALVIIYRTLGQLLPERYDPDRRSLRLPHRPIINTPMVSTLVYSEGAPLPRPLERPVLVEFALLEVEERTKPVCVFWNHSLAVGGTGGWSARGCELLSRNRTHVACQCSHTASFAVLMDISRRENGEVLPLKIVTYAAVSLSLAALLVAFVLLSLVRMLRSNLHSIHKHLAVALFLSQLVFVIGINQTENPFLCTVVAILLHYIYMSTFAWTLVESLHVYRMLTEVRNIDTGPMRFYYVVGWGIPAIVTGLAVGLDPQGYGNPDFCWLSLQDTLIWSFAGPIGAVIIINTVTSVLSAKVSCQRKHHYYGKKGIVSLLRTAFLLLLLISATWLLGLLAVNRDALSFHYLFAIFSGLQGPFVLLFHCVLNQEVRKHLKGVLGGRKLHLEDSATTRATLLTRSLNCNTTFGDGPDMLRTDLGESTASLDSIVRDEGIQKLGVSSGLVRGSHGEPDASLMPRSCKDPPGHDSDSDSELSLDEQSSSYASSHSSDSEDDGVGAEEKWDPARGAVHSTPKGDAVANHVPAGWPDQSLAESDSEDPSGKPRLKVETKVSVELHREEQGSHRGEYPPDQESGGAARLASSQPPEQRKGILKNKVTYPPPLTLTEQTLKGRLREKLADCEQSPTSSRTSSLGSGGPDCAITVKSPGREPGRDHLNGVAMNVRTGSAQADGSDSEKP

SEQ ID NO: 9849 - protein, 1419 aa, Artificial Sequence
  Synthetic polypeptide
MAPPPPPVLPVLLLLAAAAALPAMGLRAAAWEPRVPGGTRAFALRPGCTYAVGAACTPRAPRELLDVGRDGRLAGRRRVSGAGRPLPLQVRLVARSAPTALSRRLRARTHLPGCGARARLCGTGARLCGALCFPVPGGCAAAQHSALAAPTTLPACRCPPRPRPRCPGRPICLPPGGSVRLRLLCALRRAAGAVRVGLALEAATAGTPSASPSPSPPLPPNLPEARAGPARRARRGTSGRGSLKFPMPNYQVALFENEPAGTLILQLHAHYTIEGEEERVSYYMEGLFDERSRGYFRIDSATGAVSTDSVLDRETKETHVLRVKAVDYSTPPRSATTYITVLVKDTNDHSPVFEQSEYRERVRENLEVGYEVLTIRASDRDSPINANLRYRVLGGAWDVFQLNESSGVVSTRAVLDREEAAEYQLLVEANDQGRNPGPLSATATVYIEVEDENDNYPQFSEQNYVVQVPEDVGLNTAVLRVQATDRDQGQNAAIHYSILSGNVAGQFYLHSLSGILDVINPLDFEDVQKYSLSIKAQDGGRPPLINSSGVVSVQVLDVNDNEPIFVSSPFQATVLENVPLGYPVVHIQAVDADSGENARLHYRLVDTASTFLGGGSAGPKNPAPTPDFPFQIHNSSGWITVCAELDREEVEHYSFGVEAVDHGSPPMSSSTSVSITVLDVNDNDPVFTQPTYELRLNEDAAVGSSVLTLQARDRDANSVITYQLTGGNTRNRFALSSQRGGGLITLALPLDYKQEQQYVLAVTASDGTRSHTAHVLINVTDANTHRPVFQSSHYTVSVSEDRPVGTSIATLSANDEDTGENARITYVIQDPVPQFRIDPDSGTMYTMMELDYENQVAYTLTIMAQDNGIPQKSDTTTLEILILDANDNAPQFLWDFYQGSIFEDAPPSTSILQVSATDRDSGPNGRLLYTFQGGDDGDGDFYIEPTSGVIRTQRRLDRENVAVYNLWALAVDRGSPTPLSASVEIQVTILDINDNAPMFEKDELELFVEENNPVGSVVAKIRANDPDEGPNAQIMYQIVEGDMRHFFQLDLLNGDLRAMVELDFEVRREYVLVVQATSAPLVSRATVHILLVDQNDNPPVLPDFQILFNNYVTNKSNSFPTGVIGCIPAHDPDVSDSLNYTFVQGNELRLLLLDPATGELQLSRDLDNNRPLEALMEVSVSGDVAMSGDVSVVTVWRAVLLASDGIHSVTAFCTLRVTIITDDMLTNSITVRLENMSQEKFLSPLLALFVEGVAAVLSTTKDDVFVFNVQNDTDVSSNILNVTFSALLPGGVRGQFFPSEDLQEQIYLNRTLLTTISTQRVLPFDDNICLREPCENYMKCVSVLRFDSSAPFLSSTTVLFRPIHPINGLRCRCPPGFTGDYCETEIDLCYSDPCGANGRCRSREGGYTCECFEDFTAVS

SEQ ID NO: 9850 - protein, 41 aa, Artificial Sequence
  Synthetic polypeptide
MTSPSRSTTAPVGSQCVPSWTARRWSTTASGWRRWTTARPP

SEQ ID NO: 9851 - protein, 61 aa, Artificial Sequence
  Synthetic polypeptide
MAGFNMGGDLREPAASIPPGSLAAVGISKKLLCPSLGGFCTSSSSSSWAPSALERPFAMTS

SEQ ID NO: 9852 - protein, 308 aa, Artificial Sequence
  Synthetic polypeptide
MTQMSQVQELFHEAAQQDALAQPQPWWKTQLFMWEPVLFGTWDGVFTSCMINIFGVVLFLRTGWLVGNTGVLLGMFLVSFVILVALVTVLSGIGVGERSSIGSGGVYSMISSVLGGQTGGTIGLLYVFGQCVAGAMYITGFAESISDLLGLGNIWAVRGISVAVLLALLGINLAGVKWIIRLQLLLLFLLAVSTLDFVVGSFTHLDPEHGFIGYSPELLQNNTLPDYSPGESFFTVFGVFFPAATGVMAGFNMGGDLREPAASIPPGSLAAVGISKKLLCPSLGGFCTSSSSSSWAPSALERPFAMTS

SEQ ID NO: 9853 - protein, 337 aa, Artificial Sequence
  Synthetic polypeptide
MLPLERTITYRDMSSFIQVKNHFNVVNVTCVSYRSTCFRDMRRFILDALAQPQPWWKTQLFMWEPVLFGTWDGVFTSCMINIFGVVLFLRTGWLVGNTGVLLGMFLVSFVILVALVTVLSGIGVGERSSIGSGGVYSMISSVLGGQTGGTIGLLYVFGQCVAGAMYITGFAESISDLLGLGNIWAVRGISVAVLLALLGINLAGVKWIIRLQLLLLFLLAVSTLDFVVGSFTHLDPEHGFIGYSPELLQNNTLPDYSPGESFFTVFGVFFPAATGVMAGFNMGGDLREPAASIPPGSLAAVGISKKLLCPSLGGFCTSSSSSSWAPSALERPFAMTS

SEQ ID NO: 9854 - protein, 109 aa, Artificial Sequence
  Synthetic polypeptide
MRRAAAGGLAVGQLPGEGPAGEEGAALGKAMRGGGCSPHSPSGCLSGVMAGFNMGGDLREPAASIPPGSLAAVGISKKLLCPSLGGFCTSSSSSSWAPSALERPFAMTS

SEQ ID NO: 9855 - protein, 308 aa, Artificial Sequence; identical to SEQ ID NO: 9852
  Synthetic polypeptide

SEQ ID NO: 9856 - protein, 190 aa, Artificial Sequence
  Synthetic polypeptide
MGWCVHILHDQHLWGCALPEDWLAGGKHRSAPGHVPGVLRHPGGPRHGAVWHWRRGAQQHRQRWRLLHDLLGPGWADGRHHRAALCVWTEHGFIGYSPELLQNNTLPDYSPGESFFTVFGVFFPAATGVMAGFNMGGDLREPAASIPPGSLAAVGISKKLLCPSLGGFCTSSSSSSWAPSALERPFAMTS

SEQ ID NO: 9857 - protein, 61 aa, Artificial Sequence; identical to SEQ ID NO: 9851
  Synthetic polypeptide

SEQ ID NO: 9858 - protein, 308 aa, Artificial Sequence; identical to SEQ ID NO: 9852
  Synthetic polypeptide

SEQ ID NO: 9859 - protein, 337 aa, Artificial Sequence; identical to SEQ ID NO: 9853
  Synthetic polypeptide

SEQ ID NO: 9860 - protein, 109 aa, Artificial Sequence; identical to SEQ ID NO: 9854
  Synthetic polypeptide

SEQ ID NO: 9861 - protein, 308 aa, Artificial Sequence; identical to SEQ ID NO: 9852
  Synthetic polypeptide

SEQ ID NO: 9862 - protein, 190 aa, Artificial Sequence; identical to SEQ ID NO: 9856
  Synthetic polypeptide

SEQ ID NO: 9863 - protein, 61 aa, Artificial Sequence; identical to SEQ ID NO: 9851
  Synthetic polypeptide

SEQ ID NO: 9864 - protein, 308 aa, Artificial Sequence; identical to SEQ ID NO: 9852
  Synthetic polypeptide

SEQ ID NO: 9865 - protein, 337 aa, Artificial Sequence; identical to SEQ ID NO: 9853
  Synthetic polypeptide

SEQ ID NO: 9866 - protein, 109 aa, Artificial Sequence; identical to SEQ ID NO: 9854
  Synthetic polypeptide

SEQ ID NO: 9867 - protein, 308 aa, Artificial Sequence; identical to SEQ ID NO: 9852
  Synthetic polypeptide

SEQ ID NO: 9868 - protein, 190 aa, Artificial Sequence; identical to SEQ ID NO: 9856
  Synthetic polypeptide

SEQ ID NO: 9869 - protein, 61 aa, Artificial Sequence; identical to SEQ ID NO: 9851
  Synthetic polypeptide

SEQ ID NO: 9870 - protein, 308 aa, Artificial Sequence; identical to SEQ ID NO: 9852
  Synthetic polypeptide

SEQ ID NO: 9871 - protein, 337 aa, Artificial Sequence; identical to SEQ ID NO: 9853
  Synthetic polypeptide

SEQ ID NO: 9872 - protein, 109 aa, Artificial Sequence; identical to SEQ ID NO: 9854
  Synthetic polypeptide

SEQ ID NO: 9873 - protein, 308 aa, Artificial Sequence; identical to SEQ ID NO: 9852
  Synthetic polypeptide

SEQ ID NO: 9874 - protein, 190 aa, Artificial Sequence; identical to SEQ ID NO: 9856
  Synthetic polypeptide

SEQ ID NO: 9875 - protein, 61 aa, Artificial Sequence; identical to SEQ ID NO: 9851
  Synthetic polypeptide

SEQ ID NO: 9876 - protein, 308 aa, Artificial Sequence; identical to SEQ ID NO: 9852
  Synthetic polypeptide

SEQ ID NO: 9877 - protein, 337 aa, Artificial Sequence; identical to SEQ ID NO: 9853
  Synthetic polypeptide

SEQ ID NO: 9878 - protein, 109 aa, Artificial Sequence; identical to SEQ ID NO: 9854
  Synthetic polypeptide

SEQ ID NO: 9879 - protein, 308 aa, Artificial Sequence; identical to SEQ ID NO: 9852
  Synthetic polypeptide

SEQ ID NO: 9880 - protein, 190 aa, Artificial Sequence; identical to SEQ ID NO: 9856
  Synthetic polypeptide

SEQ ID NO: 9881 - protein, 61 aa, Artificial Sequence; identical to SEQ ID NO: 9851
  Synthetic polypeptide

SEQ ID NO: 9882 - protein, 308 aa, Artificial Sequence; identical to SEQ ID NO: 9852
  Synthetic polypeptide

SEQ ID NO: 9883 - protein, 337 aa, Artificial Sequence; identical to SEQ ID NO: 9853
  Synthetic polypeptide

SEQ ID NO: 9884 - protein, 109 aa, Artificial Sequence; identical to SEQ ID NO: 9854
  Synthetic polypeptide

SEQ ID NO: 9885 - protein, 308 aa, Artificial Sequence; identical to SEQ ID NO: 9852
  Synthetic polypeptide

SEQ ID NO: 9886 - protein, 190 aa, Artificial Sequence; identical to SEQ ID NO: 9856
  Synthetic polypeptide

SEQ ID NO: 9887 - protein, 61 aa, Artificial Sequence; identical to SEQ ID NO: 9851
  Synthetic polypeptide

SEQ ID NO: 9888 - protein, 308 aa, Artificial Sequence; identical to SEQ ID NO: 9852
  Synthetic polypeptide

SEQ ID NO: 9889 - protein, 337 aa, Artificial Sequence; identical to SEQ ID NO: 9853
  Synthetic polypeptide

SEQ ID NO: 9890 - protein, 109 aa, Artificial Sequence; identical to SEQ ID NO: 9854
  Synthetic polypeptide

SEQ ID NO: 9891 - protein, 308 aa, Artificial Sequence; identical to SEQ ID NO: 9852
  Synthetic polypeptide

SEQ ID NO: 9892 - protein, 190 aa, Artificial Sequence; identical to SEQ ID NO: 9856
  Synthetic polypeptide

SEQ ID NO: 9893 - protein, 61 aa, Artificial Sequence; identical to SEQ ID NO: 9851
  Synthetic polypeptide

SEQ ID NO: 9894 - protein, 308 aa, Artificial Sequence; identical to SEQ ID NO: 9852
  Synthetic polypeptide

SEQ ID NO: 9895 - protein, 337 aa, Artificial Sequence; identical to SEQ ID NO: 9853
  Synthetic polypeptide

SEQ ID NO: 9896 - protein, 109 aa, Artificial Sequence; identical to SEQ ID NO: 9854
  Synthetic polypeptide

SEQ ID NO: 9897 - protein, 308 aa, Artificial Sequence; identical to SEQ ID NO: 9852
  Synthetic polypeptide

SEQ ID NO: 9898 - protein, 190 aa, Artificial Sequence; identical to SEQ ID NO: 9856
  Synthetic polypeptide

SEQ ID NO: 9899 - protein, 61 aa, Artificial Sequence; identical to SEQ ID NO: 9851
  Synthetic polypeptide

SEQ ID NO: 9900 - protein, 308 aa, Artificial Sequence; identical to SEQ ID NO: 9852
  Synthetic polypeptide

SEQ ID NO: 9901 - protein, 337 aa, Artificial Sequence; identical to SEQ ID NO: 9853
  Synthetic polypeptide

SEQ ID NO: 9902 - protein, 109 aa, Artificial Sequence; identical to SEQ ID NO: 9854
  Synthetic polypeptide

SEQ ID NO: 9903 - protein, 308 aa, Artificial Sequence; identical to SEQ ID NO: 9852
  Synthetic polypeptide

SEQ ID NO: 9904 - protein, 190 aa, Artificial Sequence; identical to SEQ ID NO: 9856
  Synthetic polypeptide

SEQ ID NO: 9905 - protein, 61 aa, Artificial Sequence; identical to SEQ ID NO: 9851
  Synthetic polypeptide

SEQ ID NO: 9906 - protein, 308 aa, Artificial Sequence; identical to SEQ ID NO: 9852
  Synthetic polypeptide

SEQ ID NO: 9907 - protein, 337 aa, Artificial Sequence; identical to SEQ ID NO: 9853
  Synthetic polypeptide

SEQ ID NO: 9908 - protein, 109 aa, Artificial Sequence; identical to SEQ ID NO: 9854
  Synthetic polypeptide

SEQ ID NO: 9909 - protein, 308 aa, Artificial Sequence; identical to SEQ ID NO: 9852
  Synthetic polypeptide

SEQ ID NO: 9910 - protein, 190 aa, Artificial Sequence; identical to SEQ ID NO: 9856
  Synthetic polypeptide

SEQ ID NO: 9911 - protein, 61 aa, Artificial Sequence; identical to SEQ ID NO: 9851
  Synthetic polypeptide

SEQ ID NO: 9912 - protein, 308 aa, Artificial Sequence; identical to SEQ ID NO: 9852
  Synthetic polypeptide

SEQ ID NO: 9913 - protein, 337 aa, Artificial Sequence; identical to SEQ ID NO: 9853
  Synthetic polypeptide

SEQ ID NO: 9914 - protein, 109 aa, Artificial Sequence; identical to SEQ ID NO: 9854
  Synthetic polypeptide

SEQ ID NO: 9915 - protein, 308 aa, Artificial Sequence; identical to SEQ ID NO: 9852
  Synthetic polypeptide

SEQ ID NO: 9916 - protein, 190 aa, Artificial Sequence; identical to SEQ ID NO: 9856
  Synthetic polypeptide

SEQ ID NO: 9917 - protein, 61 aa, Artificial Sequence; identical to SEQ ID NO: 9851
  Synthetic polypeptide

SEQ ID NO: 9918 - protein, 308 aa, Artificial Sequence; identical to SEQ ID NO: 9852
  Synthetic polypeptide

SEQ ID NO: 9919 - protein, 337 aa, Artificial Sequence; identical to SEQ ID NO: 9853
  Synthetic polypeptide

SEQ ID NO: 9920 - protein, 109 aa, Artificial Sequence; identical to SEQ ID NO: 9854
  Synthetic polypeptide

SEQ ID NO: 9921 - protein, 308 aa, Artificial Sequence; identical to SEQ ID NO: 9852
  Synthetic polypeptide

SEQ ID NO: 9922 - protein, 190 aa, Artificial Sequence; identical to SEQ ID NO: 9856
  Synthetic polypeptide

SEQ ID NO: 9923 - protein, 61 aa, Artificial Sequence; identical to SEQ ID NO: 9851
  Synthetic polypeptide

SEQ ID NO: 9924 - protein, 308 aa, Artificial Sequence; identical to SEQ ID NO: 9852
  Synthetic polypeptide

SEQ ID NO: 9925 - protein, 337 aa, Artificial Sequence; identical to SEQ ID NO: 9853
  Synthetic polypeptide

SEQ ID NO: 9926 - protein, 109 aa, Artificial Sequence; identical to SEQ ID NO: 9854
  Synthetic polypeptide

SEQ ID NO: 9927 - protein, 308 aa, Artificial Sequence; identical to SEQ ID NO: 9852
  Synthetic polypeptide

SEQ ID NO: 9928 - protein, 190 aa, Artificial Sequence; identical to SEQ ID NO: 9856
  Synthetic polypeptide

SEQ ID NO: 9929 - protein, 61 aa, Artificial Sequence; identical to SEQ ID NO: 9851
  Synthetic polypeptide

SEQ ID NO: 9930 - protein, 308 aa, Artificial Sequence; identical to SEQ ID NO: 9852
  Synthetic polypeptide

SEQ ID NO: 9931 - protein, 337 aa, Artificial Sequence; identical to SEQ ID NO: 9853
  Synthetic polypeptide

SEQ ID NO: 9932 - protein, 109 aa, Artificial Sequence; identical to SEQ ID NO: 9854
  Synthetic polypeptide

SEQ ID NO: 9933 - protein, 308 aa, Artificial Sequence; identical to SEQ ID NO: 9852
  Synthetic polypeptide

SEQ ID NO: 9934 - protein, 190 aa, Artificial Sequence; identical to SEQ ID NO: 9856
  Synthetic polypeptide

SEQ ID NO: 9935 - protein, 61 aa, Artificial Sequence; identical to SEQ ID NO: 9851
  Synthetic polypeptide

SEQ ID NO: 9936 - protein, 308 aa, Artificial Sequence; identical to SEQ ID NO: 9852
  Synthetic polypeptide

SEQ ID NO: 9937 - protein, 337 aa, Artificial Sequence; identical to SEQ ID NO: 9853
  Synthetic polypeptide

SEQ ID NO: 9938 - protein, 109 aa, Artificial Sequence; identical to SEQ ID NO: 9854
  Synthetic polypeptide

SEQ ID NO: 9939 - protein, 308 aa, Artificial Sequence; identical to SEQ ID NO: 9852
  Synthetic polypeptide

SEQ ID NO: 9940 - protein, 190 aa, Artificial Sequence; identical to SEQ ID NO: 9856
  Synthetic polypeptide

SEQ ID NO: 9941 - protein, 61 aa, Artificial Sequence; identical to SEQ ID NO: 9851
  Synthetic polypeptide

SEQ ID NO: 9942 - protein, 308 aa, Artificial Sequence; identical to SEQ ID NO: 9852
  Synthetic polypeptide

SEQ ID NO: 9943 - protein, 337 aa, Artificial Sequence; identical to SEQ ID NO: 9853
  Synthetic polypeptide

SEQ ID NO: 9944 - protein, 109 aa, Artificial Sequence; identical to SEQ ID NO: 9854
  Synthetic polypeptide

SEQ ID NO: 9945 - protein, 308 aa, Artificial Sequence; identical to SEQ ID NO: 9852
  Synthetic polypeptide

SEQ ID NO: 9946 - protein, 190 aa, Artificial Sequence; identical to SEQ ID NO: 9856
  Synthetic polypeptide

SEQ ID NO: 9947 - protein, 61 aa, Artificial Sequence; identical to SEQ ID NO: 9851
  Synthetic polypeptide

SEQ ID NO: 9948 - protein, 308 aa, Artificial Sequence; identical to SEQ ID NO: 9852
  Synthetic polypeptide

SEQ ID NO: 9949 - protein, 337 aa, Artificial Sequence; identical to SEQ ID NO: 9853
  Synthetic polypeptide

SEQ ID NO: 9950 - protein, 109 aa, Artificial Sequence; identical to SEQ ID NO: 9854
  Synthetic polypeptide

SEQ ID NO: 9951 - protein, 308 aa, Artificial Sequence; identical to SEQ ID NO: 9852
  Synthetic polypeptide

SEQ ID NO: 9952 - protein, 190 aa, Artificial Sequence; identical to SEQ ID NO: 9856
  Synthetic polypeptide

SEQ ID NO: 9953 - protein, 61 aa, Artificial Sequence; identical to SEQ ID NO: 9851
  Synthetic polypeptide

SEQ ID NO: 9954 - protein, 308 aa, Artificial Sequence; identical to SEQ ID NO: 9852
  Synthetic polypeptide

SEQ ID NO: 9955 - protein, 337 aa, Artificial Sequence; identical to SEQ ID NO: 9853
  Synthetic polypeptide

SEQ ID NO: 9956 - protein, 109 aa, Artificial Sequence; identical to SEQ ID NO: 9854
  Synthetic polypeptide

SEQ ID NO: 9957 - protein, 308 aa, Artificial Sequence; identical to SEQ ID NO: 9852
  Synthetic polypeptide

SEQ ID NO: 9958 - protein, 190 aa, Artificial Sequence; identical to SEQ ID NO: 9856
  Synthetic polypeptide

SEQ ID NO: 9959 - protein, 61 aa, Artificial Sequence; identical to SEQ ID NO: 9851
  Synthetic polypeptide

SEQ ID NO: 9960 - protein, 308 aa, Artificial Sequence; identical to SEQ ID NO: 9852
  Synthetic polypeptide

SEQ ID NO: 9961 - protein, 337 aa, Artificial Sequence; identical to SEQ ID NO: 9853
  Synthetic polypeptide

SEQ ID NO: 9962 - protein, 109 aa, Artificial Sequence; identical to SEQ ID NO: 9854
  Synthetic polypeptide

SEQ ID NO: 9963 - protein, 308 aa, Artificial Sequence; identical to SEQ ID NO: 9852
  Synthetic polypeptide

SEQ ID NO: 9964 - protein, 190 aa, Artificial Sequence; identical to SEQ ID NO: 9856
  Synthetic polypeptide

SEQ ID NO: 9965 - protein, 61 aa, Artificial Sequence; identical to SEQ ID NO: 9851
  Synthetic polypeptide

SEQ ID NO: 9966 - protein, 308 aa, Artificial Sequence; identical to SEQ ID NO: 9852
  Synthetic polypeptide

SEQ ID NO: 9967 - protein, 337 aa, Artificial Sequence; identical to SEQ ID NO: 9853
  Synthetic polypeptide

SEQ ID NO: 9968 - protein, 109 aa, Artificial Sequence; identical to SEQ ID NO: 9854
  Synthetic polypeptide

SEQ ID NO: 9969 - protein, 308 aa, Artificial Sequence; identical to SEQ ID NO: 9852
  Synthetic polypeptide

SEQ ID NO: 9970 - protein, 190 aa, Artificial Sequence; identical to SEQ ID NO: 9856
  Synthetic polypeptide

SEQ ID NO: 9971 - protein, 61 aa, Artificial Sequence; identical to SEQ ID NO: 9851
  Synthetic polypeptide

SEQ ID NO: 9972 - protein, 308 aa, Artificial Sequence; identical to SEQ ID NO: 9852
  Synthetic polypeptide

SEQ ID NO: 9973 - protein, 337 aa, Artificial Sequence; identical to SEQ ID NO: 9853
  Synthetic polypeptide

SEQ ID NO: 9974 - protein, 109 aa, Artificial Sequence; identical to SEQ ID NO: 9854
  Synthetic polypeptide

SEQ ID NO: 9975 - protein, 308 aa, Artificial Sequence; identical to SEQ ID NO: 9852
  Synthetic polypeptide

SEQ ID NO: 9976 - protein, 190 aa, Artificial Sequence; identical to SEQ ID NO: 9856
  Synthetic polypeptide

SEQ ID NO: 9977 - protein, 61 aa, Artificial Sequence; identical to SEQ ID NO: 9851
  Synthetic polypeptide

SEQ ID NO: 9978 - protein, 308 aa, Artificial Sequence; identical to SEQ ID NO: 9852
  Synthetic polypeptide

SEQ ID NO: 9979 - protein, 337 aa, Artificial Sequence; identical to SEQ ID NO: 9853
  Synthetic polypeptide

SEQ ID NO: 9980 - protein, 109 aa, Artificial Sequence; identical to SEQ ID NO: 9854
  Synthetic polypeptide

SEQ ID NO: 9981 - protein, 308 aa, Artificial Sequence; identical to SEQ ID NO: 9852
  Synthetic polypeptide

SEQ ID NO: 9982 - protein, 190 aa, Artificial Sequence; identical to SEQ ID NO: 9856
  Synthetic polypeptide

SEQ ID NO: 9983 - protein, 61 aa, Artificial Sequence; identical to SEQ ID NO: 9851
  Synthetic polypeptide

SEQ ID NO: 9984 - protein, 308 aa, Artificial Sequence; identical to SEQ ID NO: 9852
  Synthetic polypeptide

SEQ ID NO: 9985 - protein, 337 aa, Artificial Sequence; identical to SEQ ID NO: 9853
  Synthetic polypeptide

SEQ ID NO: 9986 - protein, 109 aa, Artificial Sequence; identical to SEQ ID NO: 9854
  Synthetic polypeptide

SEQ ID NO: 9987 - protein, 308 aa, Artificial Sequence; identical to SEQ ID NO: 9852
  Synthetic polypeptide

SEQ ID NO: 9988 - protein, 190 aa, Artificial Sequence; identical to SEQ ID NO: 9856
  Synthetic polypeptide

SEQ ID NO: 9989 - protein, 623 aa, Artificial Sequence
  Synthetic polypeptide
MEAPAAGLFLLLLLGTWAPAPGSASSEAPPLINEDVKRTVDLSSHLAKVTAEVVLAHLGGGSTSRATSFLLALEPELEARLAHLGVQVKGEDEEENNLEVRETKIKGKSLLLIEKPSLAGASTFCGRFFTVKLPVALDPGAKISVIVETVYTHVLHPYPTQITQSEKQFVVFEGNHYFYSPYPTKTQTMRVKLASRNVESYTKLGNPTRSEDLLDYGPFRDVPAYSQDTFKVHYENNSPFLTITSMTRVIEVSHWGNIAVEENVDLKHTGAVLKGPFSRYDYQRQPDSGISSIRSFKTILPAAAQDVYYRDEIGNVSTSHLLILDDSVEMEIRPRFPLFGGWKTHYIVGYNLPSYEYLYNLGDQYALKMRFVDHVFDEQVIDSLTVKIILPEGAKNIEIDSPYEISRAPDELHYTYLDTFGRPVIVAYKKNLVEQHIQDIVVHYTFNKVLMLQEPLLVVAAFYILFFTVIIYVRLDFSITKDPAAEARMKVACITEQVLTLVNKRIGLYRHFDETVNRYKQSRDISTLNSGKKSLETEHKALTSEIALLQSRLKTEGSDLCDRVSEMQKLDAQVKELVLKSAVEAERLVAGKLKKDTYIENEKLISGKRQELVTKIDHILDAL

SEQ ID NO: 9990 - protein, 623 aa, Artificial Sequence; identical to SEQ ID NO: 9989
  Synthetic polypeptide

SEQ ID NO: 9991 - protein, 309 aa, Artificial Sequence
  Synthetic polypeptide
MKVARFQKIPNGENETMIPVLTSKKASELPVSEVASILQADLQNGLNKCEVSHRRAFHGWNEFDISEDEPLWKKYISQFKNPLIMLLLASAVISVLMHQFDDAVSITVAILIVVTVAFVQEYRSEKSLEELSKLVPPECHCVREGKLEHTLARDLVPGDTVCLSVGDRVPADLRLFEAVDLSIDESSLTGETTPCSKVTAPQPAATNGDLASRSNIAFMGTLVRCGKAKGVVIGTGENSEFGEVFKMMQAEEAPKTPLQKSMDLLGKQLSFYSFGIIGIIMLVGWLLGKDILEMFTISVRVNNHYSLIL

SEQ ID NO: 9992 - protein, 309 aa, Artificial Sequence; identical to SEQ ID NO: 9991
  Synthetic polypeptide

SEQ ID NO: 9993 - protein, 343 aa, Artificial Sequence
  Synthetic polypeptide
MDSLLPPSRFSYFKKYPLHAIRRYLSTLRNQRAEEQVARFQKIPNGENETMIPVLTSKKASELPVSEVASILQADLQNGLNKCEVSHRRAFHGWNEFDISEDEPLWKKYISQFKNPLIMLLLASAVISVLMHQFDDAVSITVAILIVVTVAFVQEYRSEKSLEELSKLVPPECHCVREGKLEHTLARDLVPGDTVCLSVGDRVPADLRLFEAVDLSIDESSLTGETTPCSKVTAPQPAATNGDLASRSNIAFMGTLVRCGKAKGVVIGTGENSEFGEVFKMMQAEEAPKTPLQKSMDLLGKQLSFYSFGIIGIIMLVGWLLGKDILEMFTISVRVNNHYSLIL

SEQ ID NO: 9994 - protein, 309 aa, Artificial Sequence; identical to SEQ ID NO: 9991
  Synthetic polypeptide

SEQ ID NO: 9995 - protein, 309 aa, Artificial Sequence; identical to SEQ ID NO: 9991
  Synthetic polypeptide

SEQ ID NO: 9996 - protein, 254 aa, Artificial Sequence
  Synthetic polypeptide
MIPVLTSKKASELPVSEVASILQFKNPLIMLLLASAVISVLMHQFDDAVSITVAILIVVTVAFVQEYRSEKSLEELSKLVPPECHCVREGKLEHTLARDLVPGDTVCLSVGDRVPADLRLFEAVDLSIDESSLTGETTPCSKVTAPQPAATNGDLASRSNIAFMGTLVRCGKAKGVVIGTGENSEFGEVFKMMQAEEAPKTPLQKSMDLLGKQLSFYSFGIIGIIMLVGWLLGKDILEMFTISVRVNNHYSLIL

SEQ ID NO: 9997 - protein, 49 aa, Artificial Sequence
  Synthetic polypeptide
TNVKLVIGEPFMAGMSLILVKMSHCGRSIFLSLKIPLLCCFWLLQSSVF

SEQ ID NO: 9998 - protein, 293 aa, Artificial Sequence
  Synthetic polypeptide
MIPVLTSKKASELPVSEVASILQADLQNGLNKCEVSHRRAFHGWNEFDISEDEPLWKKYISQFKNPLIMLLLASAVISVLMHQFDDAVSITVAILIVVTVAFVQEYRSEKSLEELSKLVPPECHCVREGKLEHTLARDLVPGDTVCLSVGDRVPADLRLFEAVDLSIDESSLTGETTPCSKVTAPQPAATNGDLASRSNIAFMGTLVRCGKAKGVVIGTGENSEFGEVFKMMQAEEAPKTPLQKSMDLLGKQLSFYSFGIIGIIMLVGWLLGKDILEMFTISVRVNNHYSLIL

SEQ ID NO: 9999 - protein, 293 aa, Artificial Sequence; identical to SEQ ID NO: 9998
  Synthetic polypeptide

SEQ ID NO: 10000 - protein, 293 aa, Artificial Sequence; identical to SEQ ID NO: 9998
  Synthetic polypeptide

SEQ ID NO: 10001 - protein, 309 aa, Artificial Sequence; identical to SEQ ID NO: 9991
  Synthetic polypeptide

SEQ ID NO: 10002 - protein, 309 aa, Artificial Sequence; identical to SEQ ID NO: 9991
  Synthetic polypeptide

SEQ ID NO: 10003 - protein, 293 aa, Artificial Sequence; identical to SEQ ID NO: 9998
  Synthetic polypeptide

SEQ ID NO: 10004 - protein, 48 aa, Artificial Sequence
  Synthetic polypeptide
MDLLGKQLSFYSFGIIGIIMLVGWLLGKDILEMFTISVRVNNHYSLIL

SEQ ID NO: 10005 - protein, 304 aa, Artificial Sequence
  Synthetic polypeptide
MDSLLPPSRFSYFKKYPLHAIRRYLSTLRNQRAEEQVARFQKIPNGENETMIPVLTSKKASELPVSEVASILQFKNPLIMLLLASAVISVLMHQFDDAVSITVAILIVVTVAFVQEYRSEKSLEELSKLVPPECHCVREGKLEHTLARDLVPGDTVCLSVGDRVPADLRLFEAVDLSIDESSLTGETTPCSKVTAPQPAATNGDLASRSNIAFMGTLVRCGKAKGVVIGTGENSEFGEVFKMMQAEEAPKTPLQKSMDLLGKQLSFYSFGIIGIIMLVGWLLGKDILEMFTISVRVNNHYSLIL

SEQ ID NO: 10006 - protein, 683 aa, Artificial Sequence
  Synthetic polypeptide
MKVTLSALDTSESSFTPLVVIELAQDVKEETKEWLKNRIIAKKKDGGAQLLFRPLLNKYEQETLENQNLYLVGASKIRMLLGAEAVGLVKECNDNTMRAFTYRTRQNFKGFDDNNDDFLTMAECQFIIKHELENLRAKDEKMIPGYPQAKLYPGKSLLRRLLTSGIVIQVFPLHDSEALKKLEDTWYTRFALKYQPIDSIRGYFGETIALYFGFLEYFTFALIPMAVIGLPYYLFVWEDYDKYVIFASFNLIWSTVILELWKRGCANMTYRWGTLLMKRKFEEPRPGFHGVLGINSITGKEEPLYPSYKRQLRIYLVSLPFVCLCLYFSLYVMMIYFDMEVWALGLHENSGSEWTSVLLYVPSIIYAIVIEIMNRLYRYAAEFLTSWENHRLESAYQNHLILKVLVFNFLNCFASLFYIAFVLKDMKLLRQSLATLLITSQILNQIMESFLPYWLQRKHGVRVKRKVQALKADIDATLYEQVILEKEMGTYLGTFDDYLELFLQFGYVSLFSCVYPLAAAFAVLNNFTEVNSDALKMCRVFKRPFSEPSANIGVWQLAFETMSVISVVTNCALIGMSPQVNAVFPESKADLILIVVAVEVLASSSPSATIVSFLRPPQPCRTHALLALKFILAFAIPDKPRHIQMKLARLEFESLEALKQQQMKLVTENLKEEPMESGKEKAT

SEQ ID NO: 10007 - protein, 493 aa, Artificial Sequence
  Synthetic polypeptide
MKVTLSALDTSESSFTPLVVIELAQDVKEETKEWLKNRIIAKKKDGGAQLLFRPLLNKYEQETLENQNLYLVGASKIRMLLGAEAVGLVKECNDNTMRAFTYRTRQNFKGFDDNNDDFLTMAECQFIIKHELENLRAKDEKMIPGYPQAKLYPGKSLLRRLLTSGIVIQVFPLHDSEALKKLEDTWYTRFALKYQPIENHRLESAYQNHLILKVLVFNFLNCFASLFYIAFVLKDMKLLRQSLATLLITSQILNQIMESFLPYWLQRKHGVRVKRKVQALKADIDATLYEQVILEKEMGTYLGTFDDYLELFLQFGYVSLFSCVYPLAAAFAVLNNFTEVNSDALKMCRVFKRPFSEPSANIGVWQLAFETMSVISVVTNCALIGMSPQVNAVFPESKADLILIVVAVEVLASSSPSATIVSFLRPPQPCRTHALLALKFILAFAIPDKPRHIQMKLARLEFESLEALKQQQMKLVTENLKEEPMESGKEKAT

SEQ ID NO: 10008 - protein, 617 aa, Artificial Sequence
  Synthetic polypeptide
MKVTLSALDTSESSFTPLVVIELAQDVKEETKEWLKNRIIAKKKDGDNNDDFLTMAECQFIIKHELENLRAKDEKMIPGYPQAKLYPGKSLLRRLLTSGIVIQVFPLHDSEALKKLEDTWYTRFALKYQPIDSIRGYFGETIALYFGFLEYFTFALIPMAVIGLPYYLFVWEDYDKYVIFASFNLIWSTVILELWKRGCANMTYRWGTLLMKRKFEEPRPGFHGVLGINSITGKEEPLYPSYKRQLRIYLVSLPFVCLCLYFSLYVMMIYFDMEVWALGLHENSGSEWTSVLLYVPSIIYAIVIEIMNRLYRYAAEFLTSWENHRLESAYQNHLILKVLVFNFLNCFASLFYIAFVLKDMKLLRQSLATLLITSQILNQIMESFLPYWLQRKHGVRVKRKVQALKADIDATLYEQVILEKEMGTYLGTFDDYLELFLQFGYVSLFSCVYPLAAAFAVLNNFTEVNSDALKMCRVFKRPFSEPSANIGVWQLAFETMSVISVVTNCALIGMSPQVNAVFPESKADLILIVVAVEVLASSSPSATIVSFLRPPQPCRTHALLALKFILAFAIPDKPRHIQMKLARLEFESLEALKQQQMKLVTENLKEEPMESGKEKAT

SEQ ID NO: 10009 - protein, 5 aa, Artificial Sequence
  Synthetic polypeptide
PVFTH

SEQ ID NO: 10010 - protein, 572 aa, Artificial Sequence
  Synthetic polypeptide
MKVTLSALDTSESSFTPLVVIELAQDVKEETKEWLKNRIIAKKKDGVRRLLTSGIVIQVFPLHDSEALKKLEDTWYTRFALKYQPIDSIRGYFGETIALYFGFLEYFTFALIPMAVIGLPYYLFVWEDYDKYVIFASFNLIWSTVILELWKRGCANMTYRWGTLLMKRKFEEPRPGFHGVLGINSITGKEEPLYPSYKRQLRIYLVSLPFVCLCLYFSLYVMMIYFDMEVWALGLHENSGSEWTSVLLYVPSIIYAIVIEIMNRLYRYAAEFLTSWENHRLESAYQNHLILKVLVFNFLNCFASLFYIAFVLKDMKLLRQSLATLLITSQILNQIMESFLPYWLQRKHGVRVKRKVQALKADIDATLYEQVILEKEMGTYLGTFDDYLELFLQFGYVSLFSCVYPLAAAFAVLNNFTEVNSDALKMCRVFKRPFSEPSANIGVWQLAFETMSVISVVTNCALIGMSPQVNAVFPESKADLILIVVAVEVLASSSPSATIVSFLRPPQPCRTHALLALKFILAFAIPDKPRHIQMKLARLEFESLEALKQQQMKLVTENLKEEPMESGKEKAT

SEQ ID NO: 10011 - protein, 683 aa, Artificial Sequence; identical to SEQ ID NO: 10006
  Synthetic polypeptide

SEQ ID NO: 10012 - protein, 493 aa, Artificial Sequence; identical to SEQ ID NO: 10007
  Synthetic polypeptide

SEQ ID NO: 10013 - protein, 617 aa, Artificial Sequence; identical to SEQ ID NO: 10008
  Synthetic polypeptide

SEQ ID NO: 10014 - protein, 5 aa, Artificial Sequence
  Synthetic polypeptide
PVFTH

SEQ ID NO: 10015 - protein, 572 aa, Artificial Sequence; identical to SEQ ID NO: 10010
  Synthetic polypeptide

SEQ ID NO: 10016 - protein, 683 aa, Artificial Sequence; identical to SEQ ID NO: 10006
  Synthetic polypeptide

SEQ ID NO: 10017 - protein, 493 aa, Artificial Sequence; identical to SEQ ID NO: 10007
  Synthetic polypeptide

SEQ ID NO: 10018 - protein, 617 aa, Artificial Sequence; identical to SEQ ID NO: 10008
  Synthetic polypeptide

SEQ ID NO: 10019 - protein, 5 aa, Artificial Sequence
  Synthetic polypeptide
PVFTH

SEQ ID NO: 10020 - protein, 572 aa, Artificial Sequence; identical to SEQ ID NO: 10010
  Synthetic polypeptide

SEQ ID NO: 10021 - protein, 33 aa, Artificial Sequence
  Synthetic polypeptide
MADPTIKMALTRCQPFNLGLLSLQNYWSTNGFF

SEQ ID NO: 10022 - protein, 296 aa, Artificial Sequence
  Synthetic polypeptide
MAAGTAARKAAPVLEAPPQQEQLSHTKLSAEDTWNLQQERMYKMHRGHDSMHVEMILIFLCVLVIAQIVLVQWRQRHGRSYNQDGPHQMPAIQSWTSEPPELLVYKWFLLIYKLSYAFGVVGYLAIMFTMCGFNLFFKIKARDSMDFGIVSLFYGLYYGVMGRDFAEICSDYMASTIGFYSVSRLPTRSLSDNICAVCGQKIIVELDEEGLIENTYQLSCNHVFHEFCIRGWCIVGKKQTCPYCKEKVDLKRMISNPWERTHFLYGQILDWLRYLVAWQPVVIGIVQGIIYSLGLE

SEQ ID NO: 10023 - protein, 141 aa, Artificial Sequence
  Synthetic polypeptide
MAAGTAARKAAPVLEAPPQQEQLSHTKLSAEDTWNLQQERMYKMHRGHDSMHVEMILIFLCVLVIAQIVLVQWRQRHGRSYNQDGPHQMPAIQSWTSEPPELLVYKWFLLIYKLSYAFGVVGYLAIMFTMCGFNLFFKIKA

SEQ ID NO: 10024 - protein, 33 aa, Artificial Sequence; identical to SEQ ID NO: 10021
  Synthetic polypeptide

SEQ ID NO: 10025 - protein, 296 aa, Artificial Sequence; identical to SEQ ID NO: 10022
  Synthetic polypeptide

SEQ ID NO: 10026 - protein, 141 aa, Artificial Sequence; identical to SEQ ID NO: 10023
  Synthetic polypeptide

SEQ ID NO: 10027 - protein, 33 aa, Artificial Sequence; identical to SEQ ID NO: 10021
  Synthetic polypeptide

SEQ ID NO: 10028 - protein, 296 aa, Artificial Sequence; identical to SEQ ID NO: 10022
  Synthetic polypeptide

SEQ ID NO: 10029 - protein, 141 aa, Artificial Sequence; identical to SEQ ID NO: 10023
  Synthetic polypeptide

SEQ ID NO: 10030 - protein, 145 aa, Artificial Sequence
  Synthetic polypeptide
MAAGTAARKAAPVLEAPPQQEQLSHTKLSAEDTWNKMALTRCQPFNLGLLSLQNSGDLVADVGCPLIFHDKIILVAVSVYVGDVLRYYQLHPLQSYPKTPLRKDTTIGLQMVSFDLQTQLCIWCCGLLGDHVYNVWIQSVFQNQS

SEQ ID NO: 10031 - protein, 56 aa, Artificial Sequence
  Synthetic polypeptide
MAAGTAARKAAPVLEAPPQQEQLSHTKLSAEDTWNKMALTRCQPFNLGLLSLQNSG

SEQ ID NO: 10032 - protein, 145 aa, Artificial Sequence; identical to SEQ ID NO: 10030
  Synthetic polypeptide

SEQ ID NO: 10033 - protein, 56 aa, Artificial Sequence; identical to SEQ ID NO: 10031
  Synthetic polypeptide

SEQ ID NO: 10034 - protein, 172 aa, Artificial Sequence
  Synthetic polypeptide
MHQKLLKSAHYIELGSYQYWPVLVPRGIRLYTYEQIPGSLKDNPYITDGYRAYLPSRLCIKSLFILSNETVNIWSHLLGFFLFFTLGIYDMTSVLPSASASREDFVICSICLFCFQVCMLCSVGYHLFSCHRSEKTCRRWMALDYAGISIGILGCYVSGVFYAFYCNNRGTV

SEQ ID NO: 10035 - protein, 172 aa, Artificial Sequence; identical to SEQ ID NO: 10034
  Synthetic polypeptide

SEQ ID NO: 10036 - protein, 172 aa, Artificial Sequence; identical to SEQ ID NO: 10034
  Synthetic polypeptide

SEQ ID NO: 10037 - protein, 172 aa, Artificial Sequence; identical to SEQ ID NO: 10034
  Synthetic polypeptide

SEQ ID NO: 10038 - protein, 172 aa, Artificial Sequence; identical to SEQ ID NO: 10034
  Synthetic polypeptide

SEQ ID NO: 10039 - protein, 168 aa, Artificial Sequence
  Synthetic polypeptide
MRTLHAVSHPYSNSMRFQRVLYFICAFQNISCGIHYLASVFMGVTPHHVCRPPGNLQNGEIWELSRCSRNKRENTSSLGYEYTGSKKEFPCVDGYIYDQNTWKSTAVTQWNLVCDRKWLAMLIQPLFMFGVLLGSVTFGYFSDSVIWTHCGTWGLEDLRQRCCCPTAC

SEQ ID NO: 10040 - protein, 202 aa, Artificial Sequence
  Synthetic polypeptide
MGSRHFEGIYDHVGHFGRFQRVLYFICAFQNISCGIHYLASVFMGVTPHHVCRPPGNVSQVVFHNHSNWSLEDTGALLSSGQKDYVTVQLQNGEIWELSRCSRNKRENTSSLGYEYTGSKKEFPCVDGYIYDQNTWKSTAVTQWNLVCDRKWLAMLIQPLFMFGVLLGSVTFGYFSDSVIWTHCGTWGLEDLRQRCCCPTAC

SEQ ID NO: 10041 - protein, 159 aa, Artificial Sequence
  Synthetic polypeptide
MGVTPHHVCRPPGNVSQVVFHNHSNWSLEDTGALLSSGQKDYVTVQLQNGEIWELSRCSRNKRENTSSLGYEYTGSKKEFPCVDGYIYDQNTWKSTAVTQWNLVCDRKWLAMLIQPLFMFGVLLGSVTFGYFSDSVIWTHCGTWGLEDLRQRCCCPTAC

SEQ ID NO: 10042 - protein, 159 aa, Artificial Sequence; identical to SEQ ID NO: 10041
  Synthetic polypeptide

SEQ ID NO: 10043 - protein, 202 aa, Artificial Sequence; identical to SEQ ID NO: 10040
  Synthetic polypeptide

SEQ ID NO: 10044 - protein, 119 aa, Artificial Sequence
  Synthetic polypeptide
DYVTVQLQNGEIWELSRCSRNKRENTSSLGYEYTGSKKEFPCVDGYIYDQNTWKSTAVTQWNLVCDRKWLAMLIQPLFMFGVLLGSVTFGYFSDSVIWTHCGTWGLEDLRQRCCCPTAC

SEQ ID NO: 10045 - protein, 481 aa, Artificial Sequence
  Synthetic polypeptide
MRTLHAVSHPYSNSMRFQRVLYFICAFQNISCGIHYLASVFMGVTPHHVCRPPGNCHLDSLWDLGIRGPETKMLLPYCLLTKLGRRVVLWATSSSMFLFGIAAAFAVDYYTFMAARFFLAMVASGYLVVGFVYVMEFIGMKSRTWASVHLHSFFAVGTLLVALTGYLVRTWWLYQMILSTVTVPFILCCWVLPETPFWLLSEGRYEEAQKIVDIMAKWNRASSCKLSELLSLDLQGPVSNSPTEVQKHNLSYLFYNWSITKRTLTVWLIWFTGSLGFYSFSLNSVNLGGNEYLNLFLLGVVEIPAYTFVCIAMDKVGRRTVLAYSLFCSALACGVVMVIPQKHYILGVVTAMVGKFAIGAAFGLIYLYTAELYPTIVRSLAVGSGSMVCRLASILAPFSVDLSSIWIFIPQLFVGTMALLSGVLTLKLPETLGKRLATTWEEAAKLESENESKSSKLLLTTNNSGLEKTEAITPRDSGLGE

SEQ ID NO: 10046 - protein, 202 aa, Artificial Sequence; identical to SEQ ID NO: 10040
  Synthetic polypeptide

SEQ ID NO: 10047 - protein, 159 aa, Artificial Sequence; identical to SEQ ID NO: 10041
  Synthetic polypeptide

SEQ ID NO: 10048 - protein, 32 aa, Artificial Sequence
  Synthetic polypeptide
MSAGPQAIVIWTHCGTWGLEDLRQRCCCPTAC

SEQ ID NO: 10049 - protein, 159 aa, Artificial Sequence; identical to SEQ ID NO: 10041
  Synthetic polypeptide

SEQ ID NO: 10050 - protein, 202 aa, Artificial Sequence; identical to SEQ ID NO: 10040
  Synthetic polypeptide

SEQ ID NO: 10051 - protein, 481 aa, Artificial Sequence; identical to SEQ ID NO: 10045
  Synthetic polypeptide

SEQ ID NO: 10052 - protein, 202 aa, Artificial Sequence; identical to SEQ ID NO: 10040
  Synthetic polypeptide

SEQ ID NO: 10053 - protein, 159 aa, Artificial Sequence; identical to SEQ ID NO: 10041
  Synthetic polypeptide

SEQ ID NO: 10054 - protein, 32 aa, Artificial Sequence; identical to SEQ ID NO: 10048
  Synthetic polypeptide

SEQ ID NO: 10055 - protein, 159 aa, Artificial Sequence; identical to SEQ ID NO: 10041
  Synthetic polypeptide

SEQ ID NO: 10056 - protein, 202 aa, Artificial Sequence; identical to SEQ ID NO: 10040
  Synthetic polypeptide

SEQ ID NO: 10057 - protein, 182 aa, Artificial Sequence
  Synthetic polypeptide
MPSFDEALQRVGEFGRFQRRVFLLLCLTGVTFAFLFVGVVFLGTQPDHYWCRGPSAAALAERCGWSPEEEWNRTAPASRGPEPPERRGRCQRYLLEAANDSASATSALSCADPLAAFPNRSAPLVPCRGGWRYAQAHSTIVSEFDLVCVNAWMLDLTQAILNLGFLTGAFTLGYAADRVKNL

SEQ ID NO: 10058 - protein, 182 aa, Artificial Sequence; identical to SEQ ID NO: 10057
  Synthetic polypeptide

SEQ ID NO: 10059 - protein, 182 aa, Artificial Sequence; identical to SEQ ID NO: 10057
  Synthetic polypeptide

SEQ ID NO: 10060 - protein, 182 aa, Artificial Sequence; identical to SEQ ID NO: 10057
  Synthetic polypeptide

SEQ ID NO: 10061 - protein, 350 aa, Artificial Sequence
  Synthetic polypeptide
MAAACGPGAAGYCLLLGLHLFLLTAGPALGWNDPDRMLLRDVKALTLHYDRYTTSRRLDPIPQLKCVGGTAGCDSYTPKVIQCQNKGWDGYDVQWECKTDLDIAYKFGKTVVSCEGYESSEDQYVLRGSCGLEYNLDYTELGLQKLKESGKQHGFASFSDYYYKWSSADSCNMSGLITIVVLLGIAFVVYKLFLSDGQYSPPPYSEYPPFSHRYQRFTNSAGPPPPGFKSEFTEKVHEWTELKYGPQNTGHGATSGFGSAFTGQQGYENSGPGFWTGLGTGGILGYLFGSNRAATPFSDSWYYPSYPPSYPGTWNRAYSPLHGGSGSYSVCSNSDTKTRTASGYGGTRRR

SEQ ID NO: 10062 - protein, 3 aa, Artificial Sequence
  Synthetic polypeptide
LGV

SEQ ID NO: 10063 - protein, 22 aa, Artificial Sequence
  Synthetic polypeptide
WPQPAGRERPGTACSSACICFC

SEQ ID NO: 10064 - protein, 213 aa, Artificial Sequence
  Synthetic polypeptide
MLLRDVKALTLHYDRYTTSRRLDPIPQLKCVGGTAGCDSYTPKVIQCQNKGWDGYDVQWECKTDLDIAYKFGKTVVSCEGYESSEDQYVLRGSCGLEYNLDYTELGLQKLKESGKQHGFASFSDYYYKWSSADSCNMSGLITIVVLLGIAFVVYKLFLSDGQYSPPPYSEYPPFSHRYQRFTNSAGPPPPGFKSEFTEKVHEWTELKYGPQNT

SEQ ID NO: 10065 - protein, 224 aa, Artificial Sequence
  Synthetic polypeptide
IAYKFGKTVVSCEGYESSEDQYVLRGSCGLEYNLDYTELGLQKLKESGKQHGFASFSDYYYKWSSADSCNMSGLITIVVLLGIAFVVYKLFLSDGQYSPPPYSEYPPFSHRYQRFTNSAGPPPPGFKSEFTEKVHEWTELKYGPQNTGHGATSGFGSAFTGQQGYENSGPGFWTGLGTGGILGYLFGSNRAYSPLHGGSGSYSVCSNSDTKTRTASGYGGTRRR

SEQ ID NO: 10066 - protein, 178 aa, Artificial Sequence
  Synthetic polypeptide
MSGLITIVVLLGIAFVVYKLFLSDGQYSPPPYSEYPPFSHRYQRFTNSAGPPPPGFKSEFTEKVHEWTELKYGPQNTGHGATSGFGSAFTGQQGYENSGPGFWTGLGTGGILGYLFGSNRAATPFSDSWYYPSYPPSYPGTWNRAYSPLHGGSGSYSVCSNSDTKTRTASGYGGTRRR

SEQ ID NO: 10067 - protein, 178 aa, Artificial Sequence; identical to SEQ ID NO: 10066
  Synthetic polypeptide

SEQ ID NO: 10068 - protein, 250 aa, Artificial Sequence
  Synthetic polypeptide
MIDKNQTCGVGQDSVPYMICLIHILEEWFGVEQLEDYLNFANYLLWVFTPLILLILPYFTIFLLYLTIIFLHIYKRKNVLKEAYSHNLWDGARKTVATLWDGHAAVWHGYEVHGMEKIPEDGPALIIFYHGAIPIDFYYFMAKIFIHKGRTCRVVADHFVFKIPGFSLLLDVFCALHGPREKCVEILRSGHLLAISPGGVREALISDETYNIVWGHRRGFAQVAIDAKVLDMWVHACHPSTFGGQGRRIT

SEQ ID NO: 10069 - protein, 136 aa, Artificial Sequence
  Synthetic polypeptide
MEKIPEDGPALIIFYHGAIPIDFYYFMAKIFIHKGRTCRVVADHFVFKIPGFSLLLDVFCALHGPREKCVEILRSGHLLAISPGGVREALISDETYNIVWGHRRGFAQVAIDAKVLDMWVHACHPSTFGGQGRRIT

SEQ ID NO: 10070 - protein, 250 aa, Artificial Sequence; identical to SEQ ID NO: 10068
  Synthetic polypeptide

SEQ ID NO: 10071 - protein, 136 aa, Artificial Sequence; identical to SEQ ID NO: 10069
  Synthetic polypeptide

SEQ ID NO: 10072 - protein, 250 aa, Artificial Sequence; identical to SEQ ID NO: 10068
  Synthetic polypeptide

SEQ ID NO: 10073 - protein, 136 aa, Artificial Sequence; identical to SEQ ID NO: 10069
  Synthetic polypeptide

SEQ ID NO: 10074 - protein, 250 aa, Artificial Sequence; identical to SEQ ID NO: 10068
  Synthetic polypeptide

SEQ ID NO: 10075 - protein, 136 aa, Artificial Sequence; identical to SEQ ID NO: 10069
  Synthetic polypeptide

SEQ ID NO: 10076 - protein, 250 aa, Artificial Sequence; identical to SEQ ID NO: 10068
  Synthetic polypeptide

SEQ ID NO: 10077 - protein, 136 aa, Artificial Sequence; identical to SEQ ID NO: 10069
  Synthetic polypeptide

SEQ ID NO: 10078 - protein, 250 aa, Artificial Sequence; identical to SEQ ID NO: 10068
  Synthetic polypeptide

SEQ ID NO: 10079 - protein, 136 aa, Artificial Sequence; identical to SEQ ID NO: 10069
  Synthetic polypeptide

SEQ ID NO: 10080 - protein, 250 aa, Artificial Sequence; identical to SEQ ID NO: 10068
  Synthetic polypeptide

SEQ ID NO: 10081 - protein, 136 aa, Artificial Sequence; identical to SEQ ID NO: 10069
  Synthetic polypeptide

SEQ ID NO: 10082 - protein, 250 aa, Artificial Sequence; identical to SEQ ID NO: 10068
  Synthetic polypeptide

SEQ ID NO: 10083 - protein, 136 aa, Artificial Sequence; identical to SEQ ID NO: 10069
  Synthetic polypeptide

SEQ ID NO: 10084 - protein, 250 aa, Artificial Sequence; identical to SEQ ID NO: 10068
  Synthetic polypeptide

SEQ ID NO: 10085 - protein, 136 aa, Artificial Sequence; identical to SEQ ID NO: 10069
  Synthetic polypeptide

SEQ ID NO: 10086 - protein, 250 aa, Artificial Sequence; identical to SEQ ID NO: 10068
  Synthetic polypeptide

SEQ ID NO: 10087 - protein, 136 aa, Artificial Sequence; identical to SEQ ID NO: 10069
  Synthetic polypeptide

SEQ ID NO: 10088 - protein, 250 aa, Artificial Sequence; identical to SEQ ID NO: 10068
  Synthetic polypeptide

SEQ ID NO: 10089 - protein, 136 aa, Artificial Sequence; identical to SEQ ID NO: 10069
  Synthetic polypeptide

SEQ ID NO: 10090 - protein, 250 aa, Artificial Sequence; identical to SEQ ID NO: 10068
  Synthetic polypeptide

SEQ ID NO: 10091 - protein, 136 aa, Artificial Sequence; identical to SEQ ID NO: 10069
  Synthetic polypeptide

SEQ ID NO: 10092 - protein, 250 aa, Artificial Sequence; identical to SEQ ID NO: 10068
  Synthetic polypeptide

SEQ ID NO: 10093 - protein, 136 aa, Artificial Sequence; identical to SEQ ID NO: 10069
  Synthetic polypeptide

SEQ ID NO: 10094 - protein, 250 aa, Artificial Sequence; identical to SEQ ID NO: 10068
  Synthetic polypeptide

SEQ ID NO: 10095 - protein, 136 aa, Artificial Sequence; identical to SEQ ID NO: 10069
  Synthetic polypeptide

SEQ ID NO: 10096 - protein, 250 aa, Artificial Sequence; identical to SEQ ID NO: 10068
  Synthetic polypeptide

SEQ ID NO: 10097 - protein, 136 aa, Artificial Sequence; identical to SEQ ID NO: 10069
  Synthetic polypeptide

SEQ ID NO: 10098 - protein, 250 aa, Artificial Sequence; identical to SEQ ID NO: 10068
  Synthetic polypeptide

SEQ ID NO: 10099 - protein, 136 aa, Artificial Sequence; identical to SEQ ID NO: 10069
  Synthetic polypeptide

SEQ ID NO: 10100 - protein, 250 aa, Artificial Sequence; identical to SEQ ID NO: 10068
  Synthetic polypeptide

SEQ ID NO: 10101 - protein, 136 aa, Artificial Sequence; identical to SEQ ID NO: 10069
  Synthetic polypeptide

SEQ ID NO: 10102 - protein, 250 aa, Artificial Sequence; identical to SEQ ID NO: 10068
  Synthetic polypeptide

SEQ ID NO: 10103 - protein, 136 aa, Artificial Sequence; identical to SEQ ID NO: 10069
  Synthetic polypeptide

SEQ ID NO: 10104 - protein, 250 aa, Artificial Sequence; identical to SEQ ID NO: 10068
  Synthetic polypeptide

SEQ ID NO: 10105 - protein, 136 aa, Artificial Sequence; identical to SEQ ID NO: 10069
  Synthetic polypeptide

SEQ ID NO: 10106 - protein, 250 aa, Artificial Sequence; identical to SEQ ID NO: 10068
  Synthetic polypeptide

SEQ ID NO: 10107 - protein, 136 aa, Artificial Sequence; identical to SEQ ID NO: 10069
  Synthetic polypeptide

SEQ ID NO: 10108 - protein, 250 aa, Artificial Sequence; identical to SEQ ID NO: 10068
  Synthetic polypeptide

SEQ ID NO: 10109 - protein, 136 aa, Artificial Sequence; identical to SEQ ID NO: 10069
  Synthetic polypeptide

SEQ ID NO: 10110 - protein, 250 aa, Artificial Sequence; identical to SEQ ID NO: 10068
  Synthetic polypeptide

SEQ ID NO: 10111 - protein, 136 aa, Artificial Sequence; identical to SEQ ID NO: 10069
  Synthetic polypeptide

SEQ ID NO: 10112 - protein, 250 aa, Artificial Sequence; identical to SEQ ID NO: 10068
  Synthetic polypeptide

SEQ ID NO: 10113 - protein, 136 aa, Artificial Sequence; identical to SEQ ID NO: 10069
  Synthetic polypeptide

SEQ ID NO: 10114 - protein, 250 aa, Artificial Sequence; identical to SEQ ID NO: 10068
  Synthetic polypeptide

SEQ ID NO: 10115 - protein, 136 aa, Artificial Sequence; identical to SEQ ID NO: 10069
  Synthetic polypeptide

SEQ ID NO: 10116 - protein, 250 aa, Artificial Sequence; identical to SEQ ID NO: 10068
  Synthetic polypeptide

SEQ ID NO: 10117 - protein, 136 aa, Artificial Sequence; identical to SEQ ID NO: 10069
  Synthetic polypeptide

SEQ ID NO: 10118 - protein, 250 aa, Artificial Sequence; identical to SEQ ID NO: 10068
  Synthetic polypeptide

SEQ ID NO: 10119 - protein, 136 aa, Artificial Sequence; identical to SEQ ID NO: 10069
  Synthetic polypeptide

SEQ ID NO: 10120 - protein, 250 aa, Artificial Sequence; identical to SEQ ID NO: 10068
  Synthetic polypeptide

SEQ ID NO: 10121 - protein, 136 aa, Artificial Sequence; identical to SEQ ID NO: 10069
  Synthetic polypeptide

SEQ ID NO: 10122 - protein, 250 aa, Artificial Sequence; identical to SEQ ID NO: 10068
  Synthetic polypeptide

SEQ ID NO: 10123 - protein, 136 aa, Artificial Sequence; identical to SEQ ID NO: 10069
  Synthetic polypeptide

SEQ ID NO: 10124 - protein, 136 aa, Artificial Sequence; identical to SEQ ID NO: 10069
  Synthetic polypeptide

SEQ ID NO: 10125 - protein, 250 aa, Artificial Sequence; identical to SEQ ID NO: 10068
  Synthetic polypeptide

SEQ ID NO: 10126 - protein, 136 aa, Artificial Sequence; identical to SEQ ID NO: 10069
  Synthetic polypeptide

SEQ ID NO: 10127 - protein, 250 aa, Artificial Sequence; identical to SEQ ID NO: 10068
  Synthetic polypeptide

SEQ ID NO: 10128 - protein, 250 aa, Artificial Sequence; identical to SEQ ID NO: 10068
  Synthetic polypeptide

SEQ ID NO: 10129 - protein, 136 aa, Artificial Sequence; identical to SEQ ID NO: 10069
  Synthetic polypeptide

SEQ ID NO: 10130 - protein, 250 aa, Artificial Sequence; identical to SEQ ID NO: 10068
  Synthetic polypeptide

SEQ ID NO: 10131 - protein, 136 aa, Artificial Sequence; identical to SEQ ID NO: 10069
  Synthetic polypeptide

SEQ ID NO: 10132 - protein, 250 aa, Artificial Sequence; identical to SEQ ID NO: 10068
  Synthetic polypeptide

SEQ ID NO: 10133 - protein, 136 aa, Artificial Sequence; identical to SEQ ID NO: 10069
  Synthetic polypeptide

SEQ ID NO: 10134 - protein, 250 aa, Artificial Sequence; identical to SEQ ID NO: 10068
  Synthetic polypeptide

SEQ ID NO: 10135 - protein, 136 aa, Artificial Sequence; identical to SEQ ID NO: 10069
  Synthetic polypeptide

SEQ ID NO: 10136 - protein, 250 aa, Artificial Sequence; identical to SEQ ID NO: 10068
  Synthetic polypeptide

SEQ ID NO: 10137 - protein, 136 aa, Artificial Sequence; identical to SEQ ID NO: 10069
  Synthetic polypeptide

SEQ ID NO: 10138 - protein, 250 aa, Artificial Sequence; identical to SEQ ID NO: 10068
  Synthetic polypeptide

SEQ ID NO: 10139 - protein, 136 aa, Artificial Sequence; identical to SEQ ID NO: 10069
  Synthetic polypeptide

SEQ ID NO: 10140 - protein, 250 aa, Artificial Sequence; identical to SEQ ID NO: 10068
  Synthetic polypeptide

SEQ ID NO: 10141 - protein, 136 aa, Artificial Sequence; identical to SEQ ID NO: 10069
  Synthetic polypeptide

SEQ ID NO: 10142 - protein, 250 aa, Artificial Sequence; identical to SEQ ID NO: 10068
  Synthetic polypeptide

SEQ ID NO: 10143 - protein, 136 aa, Artificial Sequence; identical to SEQ ID NO: 10069
  Synthetic polypeptide

SEQ ID NO: 10144 - protein, 250 aa, Artificial Sequence; identical to SEQ ID NO: 10068
  Synthetic polypeptide

SEQ ID NO: 10145 - protein, 136 aa, Artificial Sequence; identical to SEQ ID NO: 10069
  Synthetic polypeptide

SEQ ID NO: 10146 - protein, 250 aa, Artificial Sequence; identical to SEQ ID NO: 10068
  Synthetic polypeptide

SEQ ID NO: 10147 - protein, 136 aa, Artificial Sequence; identical to SEQ ID NO: 10069
  Synthetic polypeptide

SEQ ID NO: 10148 - protein, 250 aa, Artificial Sequence; identical to SEQ ID NO: 10068
  Synthetic polypeptide

SEQ ID NO: 10149 - protein, 136 aa, Artificial Sequence; identical to SEQ ID NO: 10069
  Synthetic polypeptide

SEQ ID NO: 10150 - protein, 250 aa, Artificial Sequence; identical to SEQ ID NO: 10068
  Synthetic polypeptide

SEQ ID NO: 10151 - protein, 136 aa, Artificial Sequence; identical to SEQ ID NO: 10069
  Synthetic polypeptide

SEQ ID NO: 10152 - protein, 250 aa, Artificial Sequence; identical to SEQ ID NO: 10068
  Synthetic polypeptide

SEQ ID NO: 10153 - protein, 136 aa, Artificial Sequence; identical to SEQ ID NO: 10069
  Synthetic polypeptide

SEQ ID NO: 10154 - protein, 250 aa, Artificial Sequence; identical to SEQ ID NO: 10068
  Synthetic polypeptide

SEQ ID NO: 10155 - protein, 136 aa, Artificial Sequence; identical to SEQ ID NO: 10069
  Synthetic polypeptide

SEQ ID NO: 10156 - protein, 250 aa, Artificial Sequence; identical to SEQ ID NO: 10068
  Synthetic polypeptide

SEQ ID NO: 10157 - protein, 136 aa, Artificial Sequence; identical to SEQ ID NO: 10069
  Synthetic polypeptide

SEQ ID NO: 10158 - protein, 250 aa, Artificial Sequence; identical to SEQ ID NO: 10068
  Synthetic polypeptide

SEQ ID NO: 10159 - protein, 136 aa, Artificial Sequence; identical to SEQ ID NO: 10069
  Synthetic polypeptide

SEQ ID NO: 10160 - protein, 253 aa, Artificial Sequence
  Synthetic polypeptide
MTQAGRRGPGTPEPRPRTQPMASPRLGTFCCPTRDAATQLVLSFQPRAFHALCLGSGGLRLALGLLQLLPGRRPAGPGSPATSPPASVRILRAAAACDLLGCLGMVIRSTVWLGFPNFVDSVSDMNHTEIWPAAFCVGSAMWIQLLYSACFWWLFCYAVDAYLVIRRSAGLSTILLYHIMAWGLATLLCVEGAAMLYYPSVSRDQHSVALRTNPAFFRFCVSGAWTTPSPTMSPCTCPCCWFSWRTPSCSKRQ

SEQ ID NO: 10161 - protein, 149 aa, Artificial Sequence
  Synthetic polypeptide
MVIRSTVWLGFPNFVDSVSDMNHTEIWPAAFCVGSAMWIQLLYSACFWWLFCYAVDAYLVIRRSAGLSTILLYHIMAWGLATLLCVEGAAMLYYPSVSRDQHSVALRTNPAFFRFCVSGAWTTPSPTMSPCTCPCCWFSWRTPSCSKRQ

SEQ ID NO: 10162 - protein, 34 aa, Artificial Sequence
  Synthetic polypeptide
YRGAGHGERVQRSSPRPEGYGDPVHRVVRIPKFC

SEQ ID NO: 10163 - protein, 233 aa, Artificial Sequence
  Synthetic polypeptide
MASPRLGTFCCPTRDAATQLVLSFQPRAFHALCLGSGGLRLALGLLQLLPGRRPAGPGSPATSPPASVRILRAAAACDLLGCLGMVIRSTVWLGFPNFVDSVSDMNHTEIWPAAFCVGSAMWIQLLYSACFWWLFCYAVDAYLVIRRSAGLSTILLYHIMAWGLATLLCVEGAAMLYYPSVSRDQHSVALRTNPAFFRFCVSGAWTTPSPTMSPCTCPCCWFSWRTPSCSKRQ

SEQ ID NO: 10164 - protein, 352 aa, Artificial Sequence
  Synthetic polypeptide
MAPPVAERGLKSVVWQKIKATVFDDCKKEGEWKIMLLDEFTTKLLASCCKMTDLLEEGITVVENIYKNREPVRQMKALYFITPTSKSVDCFLHDFASKSENKYKAAYIYFTDFCPDNLFNKIKASCSKSIRRCKEINISFIPHESQVYTLDVPDAFYYCYSPDPGNAKGKDAIMETMADQIVTVCATLDENPGVRYKSKPLDNASKLAQLVEKKLEDYYKIDEKSLIKGKTHSQLLIIDRGFDPVSTVLHELTFQAMAYDLLPIENDTYKYKTDGKEKEAILEEEDDLWVRIRHRHIAVVLEEIPKLMKEISSTKKATEGKRQKLKTMASGCKKPKTKQNNNNNKIRWVRQA

SEQ ID NO: 10165 - protein, 400 aa, Artificial Sequence
  Synthetic polypeptide
MEENLISMREDHSFHVRYRMEASCLELALEGERLCKSGDCRAGVSFFEAAVQVGTEDLKTLSAIYSQLGNAYFYLHDYAKALEYHHHDLTLARTIGDQLGEAKASGNLGNTLKVLGNFDEAIVCCQRHLDISRELNDKVGEARALYNLGNVYHAKGKSFGCPGPQDVGEFPEEVRDALQAAVDFYEENLSLVTALGDRAAQGRAFGNLGNTHYLLGNFRDAVIAHEQRLLIAKEFGDKAAERRAYSNLGNAYIFLGEFETASEYYKKTLLLARQLKDRAVEAQSCYSLGNTYTLLQDYEKAIDYHLKHLAIAQELNDRIGEGRACWSLGNAYTALGNHDQAMHFAEKHLEISREVGDKSGELTARLNLSDLQMVLGLSYSTNNSIMSENTEIDSSLNGKS

SEQ ID NO: 10166 - protein, 2937 aa, Artificial Sequence
  Synthetic polypeptide
MRSPATGVPLPTPPPPLLLLLLLLLPPPLLGDQVGPCRSLGSRGRGSSGACAPMGWLCPSSASNLWLYTSRCRDAGTELTGHLVPHHDGLRVWCPESEAHIPLPPAPEGCPWSCRLLGIGGHLSPQGKLTLPEEHPCLKAPRLRCQSCKLAQAPGLRAGERSPEESLGGRRKRNVNTAPQFQPPSYQATVPENQPAGTPVASLRAIDPDEGEAGRLEYTMDALFDSRSNQFFSLDPVTGAVTTAEELDRETKSTHVFRVTAQDHGMPRRSALATLTILVTDTNDHDPVFEQQEYKESLRENLEVGYEVLTVRATDGDAPPNANILYRLLEGSGGSPSEVFEIDPRSGVIRTRGPVDREEVESYQLTVEASDQGRDPGPRSTTAAVFLSVEDDNDNAPQFSEKRYVVQVREDVTPGAPVLRVTASDRDKGSNAVVHYSIMSGNARGQFYLDAQTGALDVVSPLDYETTKEYTLRVRAQDGGRPPLSNVSGLVTVQVLDINDNAPIFVSTPFQATVLESVPLGYLVLHVQAIDADAGDNARLEYRLAGVGHDFPFTINNGTGWISVAAELDREEVDFYSFGVEARDHGTPALTASASVSVTVLDVNDNNPTFTQPEYTVRLNEDAAVGTSVVTVSAVDRDAHSVITYQITSGNTRNRFSITSQSGGGLVSLALPLDYKLERQYVLAVTASDGTRQDTAQIVVNVTDANTHRPVFQSSHYTVNVNEDRPAGTTVVLISATDEDTGENARITYFMEDSIPQFRIDADTGAVTTQAELDYEDQVSYTLAITARDNGIPQKSDTTYLEILVNDVNDNAPQFLRDSYQGSVYEDVPPFTSVLQISATDRDSGLNGRVFYTFQGGDDGDGDFIVESTSGIVRTLRRLDRENVAQYVLRAYAVDKGMPPARTPMEVTVTVLDVNDNPPVFEQDEFDVFVEENSPIGLAVARVTATDPDEGTNAQIMYQIVEGNIPEVFQLDIFSGELTALVDLDYEDRPEYVLVIQATSAPLVSRATVHVRLLDRNDNPPVLGNFEILFNNYVTNRSSSFPGGAIGRVPAHDPDISDSLTYSFERGNELSLVLLNASTGELKLSRALDNNRPLEAIMSVLVSDGVHSVTAQCALRVTIITDEMLTHSITLRLEDMSPERFLSPLLGLFIQAVAATLATPPDHVVVFNVQRDTDAPGGHILNVSLSVGQPPGPGGGPPFLPSEDLQERLYLNRSLLTAISAQRVLPFDDNICLREPCENYMRCVSVLRFDSSAPFIASSSVLFRPIHPVGGLRCRCPPGFTGDYCETEVDLCYSRPCGPHGRCRSREGGYTCLCRDGYTGEHCEVSARSGRCTPGVCKNGGTCVNLLVGGFKCDCPSGDFEKPYCQVTTRSFPAHSFITFRGLRQRFHFTLALSFATKERDGLLLYNGRFNEKHDFVALEVIQEQVQLTFSAGESTTTVSPFVPGGVSDGQWHTVQLKYYNKPLLGQTGLPQGPSEQKVAVVTVDGCDTGVALRFGSVLGNYSCAAQGTQGGSKKSLDLTGPLLLGGVPDLPESFPVRMRQFVGCMRNLQVDSRHIDMADFIANNGTVPGCPAKKNVCDSNTCHNGGTCVNQWDAFSCECPLGFGGKSCAQEMANPQHFLGSSLVAWHGLSLPISQPWYLSLMFRTRQADGVLLQAITRGRSTITLQLREGHVMLSVEGTGLQASSLRLEPGRANDGDWHHAQLALGASGGPGHAILSFDYGQQRAEGNLGPRLHGLHLSNITVGGIPGPAGGVARGFRGCLQGVRVSDTPEGVNSLDPSHGESINVEQGCSLPDPCDSNPCPANSYCSNDWDSYSCSCDPGYYGDNCTNVCDLNPCEHQSVCTRKPSAPHGYTCECPPNYLGPYCETRIDQPCPRGWWGHPTCGPCNCDVSKGFDPDCNKTSGECHCKENHYRPPGSPTCLLCDCYPTGSLSRVCDPEDGQCPCKPGVIGRQCDRCDNPFAEVTTNGCEVNYDSCPRAIEAGIWWPRTRFGLPAAAPCPKGSFGTAVRHCDEHRGWLPPNLFNCTSITFSELKGFAERLQRNESGLDSGRSQQLALLLRNATQHTAGYFGSDVKVAYQLATRLLAHESTQRGFGLSATQDVHFTENLLRVGSALLDTANKRHWELIQQTEGGTAWLLQHYEAYASALAQNMRHTYLSPFTIVTPNIVISVVRLDKGNFAGAKLPRYEALRGEQPPDLETTVILPESVFRETPPVVRPAGPGEAQEPEELARRQRRHPELSQGEAVASVIIYRTLAGLLPHNYDPDKRSLRVPKRPIINTPVVSISVHDDEELLPRALDKPVTVQFRLLETEERTKPICVFWNHSILVSGTGGWSARGCEVVFRNESHVSCQCNHMTSFAVLMDVSRRENGEILPLKTLTYVALGVTLAALLLTFFFLTLLRILRSNQHGIRRNLTAALGLAQLVFLLGINQADLPFACTVIAILLHFLYLCTFSWALLEALHLYRALTEVRDVNTGPMRFYYMLGWGVPAFITGLAVGLDPEGYGNPDFCWLSIYDTLIWSFAGPVAFAVSMSVFLYILAARASCAAQRQGFEKKGPVSGLQPSFAVLLLLSATWLLALLSVNSDTLLFHYLFATCNCIQGPFIFLSYVVLSKEVRKALKLACSRKPSPDPALTTKSTLTSSYNCPSPYADGRLYQPYGDSAGSLHSTSRSGKSQPSYIPFLLREESALNPGQGPPGLGDPGSLFLEGQDQQHDPDTDSDSDLSLEDDQSGSYASTHSSDSEEEEEEEEEEAAFPGEQGWDSLLGPGAERLPLHSTPKDGGPGPGKAPWPGDFGTTAKESSGNGAPEERLRENGDALSREGSLGPLPGSSAQPHKGILKKKCLPTISEKSSLLRLPLEQCTGSSRGSSASEGSRGGPPPRPPPRQSLQEQLNGVMPIAMSIKAGTVDEDSSGSDRMRSSSRSRPVSHPSPISLMAP

SEQ ID NO: 10167 - protein, 91 aa, Artificial Sequence
  Synthetic polypeptide
MREYKLVVLGSGGVGKSALTVQFVQGIFVEKYDPTIEDSYRKQVEVDCQQCMLEILDTAGTIVLHTVTIIIPFKCKSDHVFLSLNYALNSE

SEQ ID NO: 10168 - protein, 207 aa, Artificial Sequence
  Synthetic polypeptide
MSKTLKKKKHWLSKVQECAVSWAGPPGDFGAEIRGGAERGEFPYLGRLREEPGGGTCCVVSGKAPSPGDVLLEVNGTPVSGLTNRDTLAVIRHFREPIRLKTVKPGKVINKDLRHYLSLQFQKGSIDHKLQQVIRDNLYLRTIPCTTRAPRDGEVPGVDYNFISVEQFKALEESGALLESGTYDDWQQFYSLIIARNGNSHTLLARL

SEQ ID NO: 10169 - protein, 351 aa, Artificial Sequence
  Synthetic polypeptide
MSKTLKKKKHWLSKVQECAVSWAGPPGDFGAEIRGGAERGEFPYLGRLREEPGGGTCCVVSGKAPSPGDVLLEVNGTPVSGLTNRDTLAVIRHFREPIRLKTVKPGKVINKDLRHYLSLQFQKGSIDHKLQQVIRDNLYLRTIPCTTRAPRDGEVPGVDYNFISVEQFKALEESGALLESGTYDGNFYGTPKPPAEPSPFQPDPVDQVLFDNEFDAESQRKRTTSVSKMERMDSSLPEEEEDEDKEAINGSGNAENRERHSESSDWMKTVPSYNQTNSSMDFRNYMMRDETLEPLPKNWEMAYTDTGMIYFIDHNTKTTTWLDPRLCKKAKAPEDCEDGVNYQVLSILTFK

SEQ ID NO: 10170 - protein, 903 aa, Artificial Sequence
  Synthetic polypeptide
MSKTLKKKKHWLSKVQECAVSWAGPPGDFGAEIRGGAERGEFPYLGRLREEPGGGTCCVVSGKAPSPGDVLLEVNGTPVSGLTNRDTLAVIRHFREPIRLKTVKPGKVINKDLRHYLSLQFQKGSIDHKLQQVIRDNLYLRTIPCTTRAPRDGEVPGVDYNFISVEQFKALEESGALLESGTYDGNFYGTPKPPAEPSPFQPDPVDQVLFDNEFDAESQRKRTTSVSKMERMDSSLPEEEEDEDKEAINGSGNAENRERHSESSDWMKTVPSYNQTNSSMDFRNYMMRDETLEPLPKNWEMAYTDTGMIYFIDHNTKTTTWLDPRLCKKAKAPEDCEDGELPYGWEKIEDPQYGTYYVDFTLVAQAGVQWHDLGSLQPPPPGFNHLNQKTQFENPVEEAKRKKQLGQVEIGSSKPDMEKSHFTRDPSQLKGVLVRASLKKSTMGFGFTIIGGDRPDEFLQVKNVLKDGPAAQDGKIAPGDVIVDINGNCVLGHTHADVVQMFQLVPVNQYVNLTLCRGYPLPDDSEDPVVDIVAATPVINGQSLTKGETCMNPQDFKPGAMVLEQNGKSGHTLTGDGLNGPSDASEQRVSMASSGSSQPELVTIPLIKGPKGFGFAIADSPTGQKVKMILDSQWCQGLQKGDIIKEIYHQNVQNLTHLQVVEVLKQFPVGADVPLLILRGGPPSPTKTAKMKTDKKENAGSLEAINEPIPQPMPFPPSIIRSGSPKLDPSEVYLKSKTLYEDKPPNTKDLDVFLRKQESGFGFRVLGGDGPDQSIYIGAIIPLGAAEKDGRLRAADELMCIDGIPVKGKSHKQVLDLMTTAARNGHVLLTVRRKIFYGEKQPEDDSSQAFISTQNGSPRLNRAEVPARPAPQEPYDVVLQRKENEGFGFVILTSKNKPPPGAV

SEQ ID NO: 10171 - protein, 878 aa, Artificial Sequence
  Synthetic polypeptide
MSKTLKKKKHWLSKVQECAVSWAGPPGDFGAEIRGGAERGEFPYLGRLREEPGGGTCCVVSGKAPSPGDVLLEVNGTPVSGLTNRDTLAVIRHFREPIRLKTVKPGKVINKDLRHYLSLQFQKGSIDHKLQQVIRDNLYLRTIPCTTRAPRDGEVPGVDYNFISVEQFKALEESGALLESGTYDGNFYGTPKPPAEPSPFQPDPVDQVLFDNEFDAESQRKRTTSVSKMERMDSSLPEEEEDEDKEAINGSGNAENRERHSESSDWMKTVPSYNQTNSSMDFRNYMMRDETLEPLPKNWEMAYTDTGMIYFIDHNTKTTTWLDPRLCKKAKAPEDCEDGELPYGWEKIEDPQYGTYYVDHLNQKTQFENPVEEAKRKKQLGQVEIGSSKPDMEKSHFTRDPSQLKGVLVRASLKKSTMGFGFTIIGGDRPDEFLQVKNVLKDGPAAQDGKIAPGDVIVDINGNCVLGHTHADVVQMFQLVPVNQYVNLTLCRGYPLPDDSEDPVVDIVAATPVINGQSLTKGETCMNPQDFKPGAMVLEQNGKSGHTLTGDGLNGPSDASEQRVSMASSGSSQPELVTIPLIKGPKGFGFAIADSPTGQKVKMILDSQWCQGLQKGDIIKEIYHQNVQNLTHLQVVEVLKQFPVGADVPLLILRGGPPSPTKTAKMKTDKKENAGSLEAINEPIPQPMPFPPSIIRSGSPKLDPSEVYLKSKTLYEDKPPNTKDLDVFLRKQESGFGFRVLGGDGPDQSIYIGAIIPLGAAEKDGRLRAADELMCIDGIPVKGKSHKQVLDLMTTAARNGHVLLTVRRKIFYGEKQPEDDSSQAFISTQNGSPRLNRAEVPARPAPQEPYDVVLQRKENEGFGFVILTSKNKPPPGAV

SEQ ID NO: 10172 - protein, 124 aa, Artificial Sequence
  Synthetic polypeptide
MDTESTYSGYSYYSSHSKKSHRQGERTRERHKSPRNKDGRGSEKSVTIQPPTGEPLLGNDSTRTEEVQGKQLQALRAAQGFSTQGMIINVMSMNQPNRQKDHIMFSLFEKVNTSYILKISMKIV

SEQ ID NO: 10173 - protein, 280 aa, Artificial Sequence
  Synthetic polypeptide
MDTESTYSGYSYYSSHSKKSHRQGERTRERHKSPRNKDGRGSEKSVTIQPPTGEPLLGNDSTRTEEDDNWGETTTAITGTSEHSISQEDIARISKDMEDSVGLDCKRYLGLTVASFLGLLVFLTPIAFILLPPILWRDELEPCGTICEGLFISMAFKLLILLIGTWALFFRKRRADMPRVFVFRALLLVLIFLFVVSYWLFYGVRILDSRDRNYQGIVQYAVSLVDALLFIHYLAIVLLELRQLQPMFTLQVVRSTDGESRFYSLGHLRGLVWAVNYMVI

SEQ ID NO: 10174 - protein, 282 aa, Artificial Sequence
  Synthetic polypeptide
MDTESTYSGYSYYSSHSKKSHRQGERTRERHKSPRNKDGRGSEKSVTIQPPTGEPLLGNDSTRTEEVQDDNWGETTTAITGTSEHSISQEDIARISKDMEDSVGLDCKRYLGLTVASFLGLLVFLTPIAFILLPPILWRDELEPCGTICEGLFISMAFKLLILLIGTWALFFRKRRADMPRVFVFRALLLVLIFLFVVSYWLFYGVRILDSRDRNYQGIVQYAVSLVDALLFIHYLAIVLLELRQLQPMFTLQVVRSTDGESRFYSLGHLRGLVWAVNYMVI

SEQ ID NO: 10175 - protein, 469 aa, Artificial Sequence
  Synthetic polypeptide
MDTESTYSGYSYYSSHSKKSHRQGERTRERHKSPRNKDGRGSEKSVTIQPPTGEPLLGNDSTRTEEDDNWGETTTAITGTSEHSISQEDIARISKDMEDSVGLDCKRYLGLTVASFLGLLVFLTPIAFILLPPILWRDELEPCGTICEGLFISMAFKLLILLIGTWALFFRKRRADMPRVFVFRALLLVLIFLFVVSYWLFYGVRILDSRDRNYQGIVQYAVSLVDALLFIHYLAIVLLELRQLQPMFTLQVVRSTDGESRFYSLGHLSIQRAALVVLENYYKDFTIYNPNLLTASKFRAAKHMAGLKVYNVDGPSNNATGQSRAMIAAAARRRDSSHNELYYEEAEHERRVKKRKARLVVAVEEAFIHIQRLQAEEQQKAPGEVMDPREAAQAIFPSMARALQKYLRITRQQNYHSMESILQHLAFCITNGMTPKLLRRLRQENHLNPGGGACSEPRFCHGTPAWATE

SEQ ID NO: 10176 - protein, 471 aa, Artificial Sequence
  Synthetic polypeptide
MDTESTYSGYSYYSSHSKKSHRQGERTRERHKSPRNKDGRGSEKSVTIQPPTGEPLLGNDSTRTEEVQDDNWGETTTAITGTSEHSISQEDIARISKDMEDSVGLDCKRYLGLTVASFLGLLVFLTPIAFILLPPILWRDELEPCGTICEGLFISMAFKLLILLIGTWALFFRKRRADMPRVFVFRALLLVLIFLFVVSYWLFYGVRILDSRDRNYQGIVQYAVSLVDALLFIHYLAIVLLELRQLQPMFTLQVVRSTDGESRFYSLGHLSIQRAALVVLENYYKDFTIYNPNLLTASKFRAAKHMAGLKVYNVDGPSNNATGQSRAMIAAAARRRDSSHNELYYEEAEHERRVKKRKARLVVAVEEAFIHIQRLQAEEQQKAPGEVMDPREAAQAIFPSMARALQKYLRITRQQNYHSMESILQHLAFCITNGMTPKLLRRLRQENHLNPGGGACSEPRFCHGTPAWATE

SEQ ID NO: 10177 - protein, 90 aa, Artificial Sequence
  Synthetic polypeptide
MAFKVGRDKYEPAAVSEQGDKKGKKGKKDRDMDELKKEVSMDDHKLSLDELHRKYGTDLSRVDSVGIELEETLVVGRNRHTFAHRSHLLC

SEQ ID NO: 10178 - protein, 59 aa, Artificial Sequence
  Synthetic polypeptide
MDELKKEVSMDDHKLSLDELHRKYGTDLSRVDSVGIELEETLVVGRNRHTFAHRSHLLC

SEQ ID NO: 10179 - protein, 90 aa, Artificial Sequence
  Synthetic polypeptide
MGKGVGRDKYEPAAVSEQGDKKGKKGKKDRDMDELKKEVSMDDHKLSLDELHRKYGTDLSRVDSVGIELEETLVVGRNRHTFAHRSHLLC

SEQ ID NO: 10180 - protein, 658 aa, Artificial Sequence
  Synthetic polypeptide
MAFKVGRDKYEPAAVSEQGDKKGKKGKKDRDMDELKKEVSMDDHKLSLDELHRKYGTDLSRGLTSARAAEILARDGPNALTPPPTTPEWIKFCRQLFGGFSMLLWIGAILCFLAYSIQAATEEEPQNDNLYLGVVLSAVVIITGCFSYYQEAKSSKIMESFKNMVPQQALVIRNGEKMSINAEEVVVGDLVEVKGGDRIPADLRIISANGCKVDNSSLTGESEPQTRSPDFTNENPLETRNIAFFSTNCVEGTARGIVVYTGDRTVMGRIATLASGLEGGQTPIAAEIEHFIHIITGVAVFLGVSFFILSLILEYTWLEAVIFLIGIIVANVPEGLLATVTVCLTLTAKRMARKNCLVKNLEAVETLGSTSTICSDKTGTLTQNRMTVAHMWFDNQIHEADTTENQSGVSFDKTSATWLALSRIAGLCNRAVFQANQENLPILKRAVAGDASESALLKCIELCCGSVKEMRERYAKIVEIPFNSTNKYQLSIHKNPNTSEPQHLLVMKGAPERILDRCSSILLHGKEQPLDEELKDAFQNAYLELGGLGERVLGFCHLFLPDEQFPEGFQFDTDDVNFPIDNLCFVGLISMIDPPRAAVPDAVGKCRSAGIKVIMVTGDHPITAKAIAKGVGIISEGNETVEDIAARLNIPVSQVNPR

SEQ ID NO: 10181 - protein, 627 aa, Artificial Sequence
  Synthetic polypeptide
MDELKKEVSMDDHKLSLDELHRKYGTDLSRGLTSARAAEILARDGPNALTPPPTTPEWIKFCRQLFGGFSMLLWIGAILCFLAYSIQAATEEEPQNDNLYLGVVLSAVVIITGCFSYYQEAKSSKIMESFKNMVPQQALVIRNGEKMSINAEEVVVGDLVEVKGGDRIPADLRIISANGCKVDNSSLTGESEPQTRSPDFTNENPLETRNIAFFSTNCVEGTARGIVVYTGDRTVMGRIATLASGLEGGQTPIAAEIEHFIHIITGVAVFLGVSFFILSLILEYTWLEAVIFLIGIIVANVPEGLLATVTVCLTLTAKRMARKNCLVKNLEAVETLGSTSTICSDKTGTLTQNRMTVAHMWFDNQIHEADTTENQSGVSFDKTSATWLALSRIAGLCNRAVFQANQENLPILKRAVAGDASESALLKCIELCCGSVKEMRERYAKIVEIPFNSTNKYQLSIHKNPNTSEPQHLLVMKGAPERILDRCSSILLHGKEQPLDEELKDAFQNAYLELGGLGERVLGFCHLFLPDEQFPEGFQFDTDDVNFPIDNLCFVGLISMIDPPRAAVPDAVGKCRSAGIKVIMVTGDHPITAKAIAKGVGIISEGNETVEDIAARLNIPVSQVNPR

SEQ ID NO: 10182 - protein, 658 aa, Artificial Sequence
  Synthetic polypeptide
MGKGVGRDKYEPAAVSEQGDKKGKKGKKDRDMDELKKEVSMDDHKLSLDELHRKYGTDLSRGLTSARAAEILARDGPNALTPPPTTPEWIKFCRQLFGGFSMLLWIGAILCFLAYSIQAATEEEPQNDNLYLGVVLSAVVIITGCFSYYQEAKSSKIMESFKNMVPQQALVIRNGEKMSINAEEVVVGDLVEVKGGDRIPADLRIISANGCKVDNSSLTGESEPQTRSPDFTNENPLETRNIAFFSTNCVEGTARGIVVYTGDRTVMGRIATLASGLEGGQTPIAAEIEHFIHIITGVAVFLGVSFFILSLILEYTWLEAVIFLIGIIVANVPEGLLATVTVCLTLTAKRMARKNCLVKNLEAVETLGSTSTICSDKTGTLTQNRMTVAHMWFDNQIHEADTTENQSGVSFDKTSATWLALSRIAGLCNRAVFQANQENLPILKRAVAGDASESALLKCIELCCGSVKEMRERYAKIVEIPFNSTNKYQLSIHKNPNTSEPQHLLVMKGAPERILDRCSSILLHGKEQPLDEELKDAFQNAYLELGGLGERVLGFCHLFLPDEQFPEGFQFDTDDVNFPIDNLCFVGLISMIDPPRAAVPDAVGKCRSAGIKVIMVTGDHPITAKAIAKGVGIISEGNETVEDIAARLNIPVSQVNPR

SEQ ID NO: 10183 - protein, 40 aa, Artificial Sequence
  Synthetic polypeptide
MCVTYHNGTGYCNVAIPQGSRTRNTIWPSNPITEYIPKGL

SEQ ID NO: 10184 - protein, 79 aa, Artificial Sequence
  Synthetic polypeptide
MPALRPALLWALLALWLCCAAPAHALQCRDGYEPCVNEGMCVTYHNGTGYCNVAIPQGSRTRNTIWPSNPITEYIPKGL

SEQ ID NO: 10185 - protein, 29 aa, Artificial Sequence
  Synthetic polypeptide
MRVLLAALGLLFLGALRAFPQGWCKDDMS

SEQ ID NO: 10186 - protein, 209 aa, Artificial Sequence
  Synthetic polypeptide
MFCSTSAVNSCARCFFHSVCPAGMIVKFPGTAQKNTVCEPASPGVSPACASPENCKEPSSGTIPQAKPTPVSPATSSASTMPVRGGTRLAQEAASKLTRAPDSPSSVGRPSSDPGLSPTQPCPEGSGDCRKQCEPDYYLDEAGRCTACVSCSRDDLVEKTPCAWNSSRTCECRPGMICATSATNSRARCVPYPICAAETVTKPQGTQEE

SEQ ID NO: 10187 - protein, 320 aa, Artificial Sequence
  Synthetic polypeptide
MRVLLAALGLLFLGALRAFPQDRPFEDTCHGNPSHYYDKAVRRCCYRCPMGLFPTQQCPQRPTDCRKQCEPDYYLDEADRCTACVTCSRDDLVEKTPCAWNSSRVCECRPGMFCSTSAVNSCARCFFHSVCPAGMIVKFPGTAQKNTVCEPASPGVSPACASPENCKEPSSGTIPQAKPTPVSPATSSASTMPVRGGTRLAQEAASKLTRAPDSPSSVGRPSSDPGLSPTQPCPEGSGDCRKQCEPDYYLDEAGRCTACVSCSRDDLVEKTPCAWNSSRTCECRPGMICATSATNSRARCVPYPICAAETVTKPQGTQEE

SEQ ID NO: 10188 - protein, 406 aa, Artificial Sequence; identical to SEQ ID NO: 499
  Synthetic polypeptide

SEQ ID NO: 10189 - protein, 231 aa, Artificial Sequence; identical to SEQ ID NO: 809
  Synthetic polypeptide

SEQ ID NO: 10190 - protein, 181 aa, Artificial Sequence
  Synthetic polypeptide
MGTSEQRLAGMPGPGIRASTGQPEDDTETTGLEGGVAMPGAEDDVVTPGTSEDRYKSGLTTLVATSVNSVTGIRIEDLPTSESTVHAQEQSPSATASNVATSHSTEKVDGDTQTTVEKDGLSTVTLVGIIVGVLLAIGFIGAIIVVVMRKMSGRSFGLGEVSCHVVRMLKQPYGDTHMTKN

SEQ ID NO: 10191 - protein, 262 aa, Artificial Sequence
  Synthetic polypeptide
MLTPLGKFSTAKFAVRLPRVWEARAPSLSGAPAPTPPAPPPSRSSRLGLWPRCFLIFPQLRILLLGPQESNNSTGTMWKVSALLFVLGSASLWVLAEGASTGQPEDDTETTGLEGGVAMPGAEDDVVTPGTSEDRYKSGLTTLVATSVNSVTGIRIEDLPTSESTVHAQEQSPSATASNVATSHSTEKVDGDTQTTVEKDGLSTVTLVGIIVGVLLAIGFIGAIIVVVMRKMSGRSFGLGEVSCHVVRMLKQPYGDTHMTKN

SEQ ID NO: 10192 - protein, 144 aa, Artificial Sequence
  Synthetic polypeptide
MPGAEDDVVTPGTSEDRYKSGLTTLVATSVNSVTGIRIEDLPTSESTVHAQEQSPSATASNVATSHSTEKVDGDTQTTVEKDGLSTVTLVGIIVGVLLAIGFIGAIIVVVMRKMSGRSFGLGEVSCHVVRMLKQPYGDTHMTKN

SEQ ID NO: 10193 - protein, 253 aa, Artificial Sequence
  Synthetic polypeptide
TAKFAVRLPRVWEARAPSLSGAPAPTPPAPPPSRSSRLGLWPRCFLIFPQLRILLLGPQESNNSTGTMWKVSALLFVLGSASLWVLAEGASTGQPEDDTETTGLEGGVAMPGAEDDVVTPGTSEDRYKSGLTTLVATSVNSVTGIRIEDLPTSESTVHAQEQSPSATASNVATSHSTEKVDGDTQTTVEKDGLSTVTLVGIIVGVLLAIGFIGAIIVVVMRKMSGRSFGLGEVSCHVVRMLKQPYGDTHMTKN

SEQ ID NO: 10194 - protein, 183 aa, Artificial Sequence; identical to SEQ ID NO: 922
  Synthetic polypeptide

SEQ ID NO: 10195 - protein, 264 aa, Artificial Sequence; identical to SEQ ID NO: 748
  Synthetic polypeptide

SEQ ID NO: 10196 - protein, 146 aa, Artificial Sequence; identical to SEQ ID NO: 1054
  Synthetic polypeptide

SEQ ID NO: 10197 - protein, 255 aa, Artificial Sequence; identical to SEQ ID NO: 774
  Synthetic polypeptide

SEQ ID NO: 10198 - protein, 49 aa, Artificial Sequence
  Synthetic polypeptide
MLLWSLLVIFDAVTEQAERKVGSLQPRRWPSSQPDNAGTLTSDFQRPEL

SEQ ID NO: 10199 - protein, 70 aa, Artificial Sequence
  Synthetic polypeptide
MLSLLVWILTLSDTFSQGKLLLIPRILSKTSLPTGFVPAPQVLSSMLPHHGRCRTVWTWCLGMSTRLEAG

SEQ ID NO: 10200 - protein, 231 aa, Artificial Sequence
  Synthetic polypeptide
MLSLLVWILTLSDTFSQGTQTRFSQEPADQTVVAGQRAVLPCVLLNYSGIVQWTKDGLALGMGQGLKAWPRYRVVGSADAGQYNLEITDAELSDDASYECQATEAALRSRRAKLTVLIPPEDTRIDGGPVILLQAGTPHNLTCRAFNAKPAATIIWFRDGTQQEGAVASTELLKDGKRETTVSQLLINPTDLDIGRVFTCRSMNEAIPSGKETSIELDVHLLRVSNKGLWT

SEQ ID NO: 10201 - protein, 131 aa, Artificial Sequence
  Synthetic polypeptide
MLSLLVWILTLSDTFSQVPPEDTRIDGGPVILLQAGTPHNLTCRAFNAKPAATIIWFRDGTQQEGAVASTELLKDGKRETTVSQLLINPTDLDIGRVFTCRSMNEAIPSGKETSIELDVHLLRVSNKGLWT

SEQ ID NO: 10202 - protein, 29 aa, Artificial Sequence
  Synthetic polypeptide
MNEAIPSGKETSIELDVHLLRVSNKGLWT

SEQ ID NO: 10203 - protein, 238 aa, Artificial Sequence
  Synthetic polypeptide
MVWCLGLAVLSLVISQGADGRGKPEVVSVVGRAGESVVLGCDLLPPAGRPPLHVIEWLRFGFLLPIFIQFGLYSPRIDPDYVGRVRLQKGASLQIEGLRVEDQGWYECRVFFLDQHIPEDDFANGSWVHLTVNSPPQFQETPPAVLEVQELEPVTLRCVARGSPLPHVTWKLRGKDLGQGQGQVQVQNGTLRIRRVERGSSGVYTCQASSTEGSATHATQLLVLENGDNSHHKAFGED

SEQ ID NO: 10204 - protein, 39 aa, Artificial Sequence
  Synthetic polypeptide
MCSRGWDSCLALELLLLPLSLLVTSIQGGSSINQKSTHS

SEQ ID NO: 10205 - protein, 263 aa, Artificial Sequence
  Synthetic polypeptide
MAPGAPSSSPSPILAVLLFSSLVLSPAQAIVVYTDREVHGAVGSRVTLHCSFWSSEWVSDDISFTWRYQPEGGRDAISIFHYAKGQPYIDEVGTFKERIQWVGDPRWKDGSIVIHNLDYSDNGTFTCDVKNPPDIVGKTSQVTLYVFEKVPTRYGVVLGAVIGGVLGVVLLLLLLFYVVRYCWLRRQAALQRRLSAMEKGKLHKPGKDASKRGRQPALASQSAEIAASAWLPPHLGSEERLCLAAHRLGCEERLFPAAIPSRK

SEQ ID NO: 10206 - protein, 67 aa, Artificial Sequence
  Synthetic polypeptide
MEKGKLHKPGKDASKRGRQPALASQSAEIAASAWLPPHLGSEERLCLAAHRLGCEERLFPAAIPSRK

SEQ ID NO: 10207 - protein, 273 aa, Artificial Sequence
  Synthetic polypeptide
MLRAPAPAPAMAPGAPSSSPSPILAVLLFSSLVLSPAQAIVVYTDREVHGAVGSRVTLHCSFWSSEWVSDDISFTWRYQPEGGRDAISIFHYAKGQPYIDEVGTFKERIQWVGDPRWKDGSIVIHNLDYSDNGTFTCDVKNPPDIVGKTSQVTLYVFEKVPTRYGVVLGAVIGGVLGVVLLLLLLFYVVRYCWLRRQAALQRRLSAMEKGKLHKPGKDASKRGRQPALASQSAEIAASAWLPPHLGSEERLCLAAHRLGCEERLFPAAIPSRK

SEQ ID NO: 10208 - protein, 264 aa, Artificial Sequence
  Synthetic polypeptide
MAPGAPSSSPSPILAVLLFSSLVLSPAQAIVVYTDREVHGAVGSRVTLHCSFWSSEWVSDDISFTWRYQPEGGRDAISIFHYAKGQPYIDEVGTFKERIQWVGDPRWKDGSIVIHNLDYSDNGTFTCDVKNPPDIVGKTSQVTLYVFEKVPTRYGVVLGAVIGGVLGVVLLLLLLFYVVRYCWLRRQAALQRRLSAMEKGKLHKPGKDASKRGRQQPALASQSAEIAASAWLPPHLGSEERLCLAAHRLGCEERLFPAAIPSRK

SEQ ID NO: 10209 - protein, 68 aa, Artificial Sequence
  Synthetic polypeptide
MEKGKLHKPGKDASKRGRQQPALASQSAEIAASAWLPPHLGSEERLCLAAHRLGCEERLFPAAIPSRK

SEQ ID NO: 10210 - protein, 274 aa, Artificial Sequence
  Synthetic polypeptide
MLRAPAPAPAMAPGAPSSSPSPILAVLLFSSLVLSPAQAIVVYTDREVHGAVGSRVTLHCSFWSSEWVSDDISFTWRYQPEGGRDAISIFHYAKGQPYIDEVGTFKERIQWVGDPRWKDGSIVIHNLDYSDNGTFTCDVKNPPDIVGKTSQVTLYVFEKVPTRYGVVLGAVIGGVLGVVLLLLLLFYVVRYCWLRRQAALQRRLSAMEKGKLHKPGKDASKRGRQQPALASQSAEIAASAWLPPHLGSEERLCLAAHRLGCEERLFPAAIPSRK

SEQ ID NO: 10211 - protein, 227 aa, Artificial Sequence
  Synthetic polypeptide
MAPGAPSSSPSPILAVLLFSSLVLSPAQAIVVYTDREVHGAVGSRVTLHCSFWSSEWVSDDISFTWRYQPEGGRDAISIFHYAKGQPYIDEVGTFKERIQWVGDPRWKDGSIVIHNLDYSDNGTFTCDVKNPPDIVGKTSQVTLYVFEKVPTRYGVVLGAVIGGVLGVVLLLLLLFYVVRYCWLRRQAALQRRLSAMEKGKLHKPGKDASKRGRQGFAVLVGLVSSS

SEQ ID NO: 10212 - protein, 31 aa, Artificial Sequence
  Synthetic polypeptide
MEKGKLHKPGKDASKRGRQGFAVLVGLVSSS

SEQ ID NO: 10213 - protein, 237 aa, Artificial Sequence
  Synthetic polypeptide
MLRAPAPAPAMAPGAPSSSPSPILAVLLFSSLVLSPAQAIVVYTDREVHGAVGSRVTLHCSFWSSEWVSDDISFTWRYQPEGGRDAISIFHYAKGQPYIDEVGTFKERIQWVGDPRWKDGSIVIHNLDYSDNGTFTCDVKNPPDIVGKTSQVTLYVFEKVPTRYGVVLGAVIGGVLGVVLLLLLLFYVVRYCWLRRQAALQRRLSAMEKGKLHKPGKDASKRGRQGFAVLVGLVSSS

SEQ ID NO: 10214 - protein, 230 aa, Artificial Sequence
  Synthetic polypeptide
MAPGAPSSSPSPILAVLLFSSLVLSPAQAIVVYTDREVHGAVGSRVTLHCSFWSSEWVSDDISFTWRYQPEGGRDAISIFHYAKGQPYIDEVGTFKERIQWVGDPRWKDGSIVIHNLDYSDNGTFTCDVKNPPDIVGKTSQVTLYVFEKVPTRYGVVLGAVIGGVLGVVLLLLLLFYVVRYCWLRRQAALQRRLSAMEKGKLHKPGKDASKRGRQGFYNNQMRSCVWKTL

SEQ ID NO: 10215 - protein, 34 aa, Artificial Sequence
  Synthetic polypeptide
MEKGKLHKPGKDASKRGRQGFYNNQMRSCVWKTL

SEQ ID NO: 10216 - protein, 240 aa, Artificial Sequence
  Synthetic polypeptide
MLRAPAPAPAMAPGAPSSSPSPILAVLLFSSLVLSPAQAIVVYTDREVHGAVGSRVTLHCSFWSSEWVSDDISFTWRYQPEGGRDAISIFHYAKGQPYIDEVGTFKERIQWVGDPRWKDGSIVIHNLDYSDNGTFTCDVKNPPDIVGKTSQVTLYVFEKVPTRYGVVLGAVIGGVLGVVLLLLLLFYVVRYCWLRRQAALQRRLSAMEKGKLHKPGKDASKRGRQGFYNNQMRSCVWKTL

SEQ ID NO: 10217 - protein, 275 aa, Artificial Sequence
  Synthetic polypeptide
MTMETQMSQNVCPRNLWLLQPLTVLLLLASADSQAAAPPKAVLKLEPPWINVLQEDSVTLTCQGARSPESDSIQWFHNGNLIPTHTQPSYRFKANNNDSGEYTCQTGQTSLSDPVHLTVLSEWLVLQTPHLEFQEGETIMLRCHSWKDKPLVKVTFFQNGKSQKFSHLDPTFSIPQANHSHSGDYHCTGNIGYTLFSSKPVTITVQVPSMGSSSPMGIIVAVVIATAVAAIVAAVVALIYCRKKRISANSTDPVKAAQFELLYLPPRCIELSYGF

SEQ ID NO: 10218 - protein, 274 aa, Artificial Sequence
  Synthetic polypeptide
MTMETQMSQNVCPRNLWLLQPLTVLLLLASADSQAAPPKAVLKLEPPWINVLQEDSVTLTCQGARSPESDSIQWFHNGNLIPTHTQPSYRFKANNNDSGEYTCQTGQTSLSDPVHLTVLSEWLVLQTPHLEFQEGETIMLRCHSWKDKPLVKVTFFQNGKSQKFSHLDPTFSIPQANHSHSGDYHCTGNIGYTLFSSKPVTITVQVPSMGSSSPMGIIVAVVIATAVAAIVAAVVALIYCRKKRISANSTDPVKAAQFELLYLPPRCIELSYGF

SEQ ID NO: 10219 - protein, 27 aa, Artificial Sequence
  Synthetic polypeptide
  misc_feature (1)..(1): Xaa can be any naturally occurring amino acid
XSTDPVKAAQFELLYLPPRCIELSYGF

SEQ ID NO: 10220 - protein, 29 aa, Artificial Sequence
  Synthetic polypeptide
MILIPRMLLVLFLLLPILSSAKAQVNPDG

SEQ ID NO: 10221 - protein, 326 aa, Artificial Sequence; identical to SEQ ID NO: 642
  Synthetic polypeptide

SEQ ID NO: 10222 - protein, 290 aa, Artificial Sequence; identical to SEQ ID NO: 703
  Synthetic polypeptide

SEQ ID NO: 10223 - protein, 424 aa, Artificial Sequence; identical to SEQ ID NO: 482
  Synthetic polypeptide

SEQ ID NO: 10224 - protein, 404 aa, Artificial Sequence; identical to SEQ ID NO: 504
  Synthetic polypeptide

SEQ ID NO: 10225 - protein, 272 aa, Artificial Sequence; identical to SEQ ID NO: 737
  Synthetic polypeptide

SEQ ID NO: 10226 - protein, 344 aa, Artificial Sequence
  Synthetic polypeptide
MPRKKAAAAAWEEPSSGNGTARAGPRKRGGPAGRKRERPERCSSSSGGGSSGDEDGLELDGAPGGGKRAARPATAGKAGGAAVVITEPEHTKERVKLEGSKCKGQLLIFGATNWDLIGRKEVPKQQAAYRNLGQNLWGPHRYGCLAGVRVRTVVSGSCAAHSLLITTEGKLWSWGRNEKGQLGHGDTKRVEAPRLIEGLSHEVIVSAACGRNHTLALTETGSVFAFGENKMGQLGLGNQTDAVPSPAQIMYNGQPITKMACGAEFSMIMDCKGNLYSFGCPEYGQLGHNSDGKFIARAQRIEYDCELVPRRVAIFIEKTKDGQILPVPNVVVRDVACGANHTPR

SEQ ID NO: 10227 - protein, 623 aa, Artificial Sequence
  Synthetic polypeptide
MKFAEHLSAHITPEWRKQYIQYEAFKDMLYSAQDQAPSVEVTDEDTVKRYFAKFEEKFFQTCEKELAKINTFYSEKLAEAQRRFATLQNELQSSLDAQKESTGVTTLRQRRKPVFHLSHEERVQHRNIKDLKLAFSEFYLSLILLQNYQNLNFTGFRKILKKHDKILETSRGADWRVAHVEVAPFYTCKKINQLISETEAVVTNELEDGDRQKAMKRLRVPPLGAAQPAPAWTTFRVGLFCGIFIVLNITLVLAAVFKLETDRSIWPLIRIYRGGFLLIEFLFLLGINTYGWRQAGVNHVLIFELNPRSNLSHQHLFEIAGFLGILWCLSLLACFFAPISVIPTYVYPLALYGFMVFFLINPTKTFYYKSRFWLLKLLFRVFTAPFHKVGFADFWLADQLNSLSVILMDLEYMICFYSLELKWDESKGLLPNNSEERGHSDTMVFFYLWIVFYIISSCYTLIWDLKMDWGLFDKNAGENTFLREEIVYPQKAYYYCAIIEDVILRFAWTIQISITSTTLLPHSGDIIATVFAPLEVFRRFVWNFFRLENEHLNNCGEFRAVRDISVAPLNADDQTLLEQMMDQDDGVRNRQKNRSWKYNQSISLRRPRLASHQNQKQFTFSWK

SEQ ID NO: 10228 - protein, 688 aa, Artificial Sequence
  Synthetic polypeptide
MKFAEHLSAHITPEWRKQYIQYEAFKDMLYSAQDQAPSVEVTDEDTVKRYFAKFEEKFFQTCEKELAKINTFYSEKLAEAQRRFATLQNELQSSLDAQKESTGVTTLRQRRKPVFHLSHEERVQHRNIKDLKLAFSEFYLSLILLQNYQNLNFTGFRKILKKHDKILETSRGADWRVAHVEVAPFYTCKKINQLISETEAVVTNELEDGDRQKAMKRLRVPPLGAAQPAPAWTTFRVGLFCGIFIVLNITLVLAAVFKLETDRSIWPLIRIYRGGFLLIEFLFLLGINTYGWRQAGVNHVLIFELNPRSNLSHQHLFEIAGFLGILWCLSLLACFFAPISVIPTYVYPLALYGFMVFFLINPTKTFYYKSRFWLLKLLFRVFTAPFHKVGFADFWLADQLNSLSVILMDLEYMICFYSLELKWDESKGLLPNNSEESGICHKYTYGVRAIVQCIPAWLRFIQCLRRYRDTKRAFPHLVNAGKYSTTFFMVTFAALYSTHKERGHSDTMVFFYLWIVFYIISSCYTLIWDLKMDWGLFDKNAGENTFLREEIVYPQKAYYYCAIIEDVILRFAWTIQISITSTTLLPHSGDIIATVFAPLEVFRRFVWNFFRLENEHLNNCGEFRAVRDISVAPLNADDQTLLEQMMDQDDGVRNRQKNRSWKYNQSISLRRPRLASHQNQKQFTFSWK

SEQ ID NO: 10229 - protein, 51 aa, Artificial Sequence
  Synthetic polypeptide
MVDLESEVPPLPPRYRFRDLLLGDQGWQNDDRTSNFSLQGCDRSHHTEELP

SEQ ID NO: 10230 - protein, 26 aa, Artificial Sequence
  Synthetic polypeptide
MALKNINYLLIFYLSFSLLIYIKTTM

SEQ ID NO: 10231 - protein, 33 aa, Artificial Sequence
  Synthetic polypeptide
MTMYLWLKLLAFGFAFLDTEVFVTALIWATHIS

SEQ ID NO: 10232 - protein, 31 aa, Artificial Sequence
  Synthetic polypeptide
MYLWLKLLAFGFAFLDTEVFVTALIWATHIS

SEQ ID NO: 10233 - protein, 465 aa, Artificial Sequence; identical to SEQ ID NO: 420
  Synthetic polypeptide

SEQ ID NO: 10234 - protein, 578 aa, Artificial Sequence; identical to SEQ ID NO: 298
  Synthetic polypeptide

SEQ ID NO: 10235 - protein, 626 aa, Artificial Sequence; identical to SEQ ID NO: 235
  Synthetic polypeptide

SEQ ID NO: 10236 - protein, 512 aa, Artificial Sequence; identical to SEQ ID NO: 365
  Synthetic polypeptide

SEQ ID NO: 10237 - protein, 560 aa, Artificial Sequence; identical to SEQ ID NO: 315
  Synthetic polypeptide

SEQ ID NO: 10238 - protein, 463 aa, Artificial Sequence; identical to SEQ ID NO: 424
  Synthetic polypeptide

SEQ ID NO: 10239 - protein, 576 aa, Artificial Sequence; identical to SEQ ID NO: 301
  Synthetic polypeptide

SEQ ID NO: 10240 - protein, 624 aa, Artificial Sequence; identical to SEQ ID NO: 236
  Synthetic polypeptide

SEQ ID NO: 10241 - protein, 482 aa, Artificial Sequence
  Synthetic polypeptide
MTMYLWLKLLAFGFAFLDTEVFVTGQSPTPSPTDAYLNASETTTLSPSGSAVISTTTIATTPSKPTCDEKYANITVDYLYNKETKLFTAKLNVNENVECGNNTCTNNEVHNLTECKNASVSISHNSCTAPDKTLILDVPPGVEKFQLHDCTQVEKADTTICLKWKNIETFTCDTQNITYRFQCGNMIFDNKEIKLENLEPEHEYKCDSEILYNNHKFTNASKIIKTDFGSPGEPQIIFCRSEAAHQGVITWNPPQRSFHNFTLCYIKETEKDCLNLDKNLIKYDLQNLKPYTKYVLSLHAYIIAKVQRNGSAAMCHFTTKSAPPSQVWNMTVSMTSDNSMHVKCRPPRDRNGPHERYHLEVEAGNTLVRNESHKNCDFRVKDLQYSTDYTFKAYFHNGDYPGEPFILHHSTSYNSKALIAFLAFLIIVTSIALLVVLYKIYDLHKKRSCNLDEQQELVERECKLCESVEAFFLFTALCPVPK

SEQ ID NO: 10242 - protein, 595 aa, Artificial Sequence
  Synthetic polypeptide
MTMYLWLKLLAFGFAFLDTEVFVTGQSPTPSPTGLTTAKMPSVPLSSDPLPTHTTAFSPASTFERENDFSETTTSLSPDNTSTQVSPDSLDNASAFNTTGVSSVQTPHLPTHADSQTPSAGTDTQTFSGSAANAKLNPTPGSNAISDAYLNASETTTLSPSGSAVISTTTIATTPSKPTCDEKYANITVDYLYNKETKLFTAKLNVNENVECGNNTCTNNEVHNLTECKNASVSISHNSCTAPDKTLILDVPPGVEKFQLHDCTQVEKADTTICLKWKNIETFTCDTQNITYRFQCGNMIFDNKEIKLENLEPEHEYKCDSEILYNNHKFTNASKIIKTDFGSPGEPQIIFCRSEAAHQGVITWNPPQRSFHNFTLCYIKETEKDCLNLDKNLIKYDLQNLKPYTKYVLSLHAYIIAKVQRNGSAAMCHFTTKSAPPSQVWNMTVSMTSDNSMHVKCRPPRDRNGPHERYHLEVEAGNTLVRNESHKNCDFRVKDLQYSTDYTFKAYFHNGDYPGEPFILHHSTSYNSKALIAFLAFLIIVTSIALLVVLYKIYDLHKKRSCNLDEQQELVERECKLCESVEAFFLFTALCPVPK

SEQ ID NO: 10243 - protein, 643 aa, Artificial Sequence
  Synthetic polypeptide
MTMYLWLKLLAFGFAFLDTEVFVTGQSPTPSPTGLTTAKMPSVPLSSDPLPTHTTAFSPASTFERENDFSETTTSLSPDNTSTQVSPDSLDNASAFNTTGVSSVQTPHLPTHADSQTPSAGTDTQTFSGSAANAKLNPTPGSNAISDVPGERSTASTFPTDPVSPLTTTLSLAHHSSAALPARTSNTTITANTSDAYLNASETTTLSPSGSAVISTTTIATTPSKPTCDEKYANITVDYLYNKETKLFTAKLNVNENVECGNNTCTNNEVHNLTECKNASVSISHNSCTAPDKTLILDVPPGVEKFQLHDCTQVEKADTTICLKWKNIETFTCDTQNITYRFQCGNMIFDNKEIKLENLEPEHEYKCDSEILYNNHKFTNASKIIKTDFGSPGEPQIIFCRSEAAHQGVITWNPPQRSFHNFTLCYIKETEKDCLNLDKNLIKYDLQNLKPYTKYVLSLHAYIIAKVQRNGSAAMCHFTTKSAPPSQVWNMTVSMTSDNSMHVKCRPPRDRNGPHERYHLEVEAGNTLVRNESHKNCDFRVKDLQYSTDYTFKAYFHNGDYPGEPFILHHSTSYNSKALIAFLAFLIIVTSIALLVVLYKIYDLHKKRSCNLDEQQELVERECKLCESVEAFFLFTALCPVPK

SEQ ID NO: 10244 - protein, 529 aa, Artificial Sequence
  Synthetic polypeptide
MTMYLWLKLLAFGFAFLDTEVFVTGQSPTPSPTGVSSVQTPHLPTHADSQTPSAGTDTQTFSGSAANAKLNPTPGSNAISDAYLNASETTTLSPSGSAVISTTTIATTPSKPTCDEKYANITVDYLYNKETKLFTAKLNVNENVECGNNTCTNNEVHNLTECKNASVSISHNSCTAPDKTLILDVPPGVEKFQLHDCTQVEKADTTICLKWKNIETFTCDTQNITYRFQCGNMIFDNKEIKLENLEPEHEYKCDSEILYNNHKFTNASKIIKTDFGSPGEPQIIFCRSEAAHQGVITWNPPQRSFHNFTLCYIKETEKDCLNLDKNLIKYDLQNLKPYTKYVLSLHAYIIAKVQRNGSAAMCHFTTKSAPPSQVWNMTVSMTSDNSMHVKCRPPRDRNGPHERYHLEVEAGNTLVRNESHKNCDFRVKDLQYSTDYTFKAYFHNGDYPGEPFILHHSTSYNSKALIAFLAFLIIVTSIALLVVLYKIYDLHKKRSCNLDEQQELVERECKLCESVEAFFLFTALCPVPK

SEQ ID NO: 10245 - protein, 577 aa, Artificial Sequence
  Synthetic polypeptide
MTMYLWLKLLAFGFAFLDTEVFVTGQSPTPSPTGVSSVQTPHLPTHADSQTPSAGTDTQTFSGSAANAKLNPTPGSNAISDVPGERSTASTFPTDPVSPLTTTLSLAHHSSAALPARTSNTTITANTSDAYLNASETTTLSPSGSAVISTTTIATTPSKPTCDEKYANITVDYLYNKETKLFTAKLNVNENVECGNNTCTNNEVHNLTECKNASVSISHNSCTAPDKTLILDVPPGVEKFQLHDCTQVEKADTTICLKWKNIETFTCDTQNITYRFQCGNMIFDNKEIKLENLEPEHEYKCDSEILYNNHKFTNASKIIKTDFGSPGEPQIIFCRSEAAHQGVITWNPPQRSFHNFTLCYIKETEKDCLNLDKNLIKYDLQNLKPYTKYVLSLHAYIIAKVQRNGSAAMCHFTTKSAPPSQVWNMTVSMTSDNSMHVKCRPPRDRNGPHERYHLEVEAGNTLVRNESHKNCDFRVKDLQYSTDYTFKAYFHNGDYPGEPFILHHSTSYNSKALIAFLAFLIIVTSIALLVVLYKIYDLHKKRSCNLDEQQELVERECKLCESVEAFFLFTALCPVPK

SEQ ID NO: 10246 - protein, 480 aa, Artificial Sequence
  Synthetic polypeptide
MYLWLKLLAFGFAFLDTEVFVTGQSPTPSPTDAYLNASETTTLSPSGSAVISTTTIATTPSKPTCDEKYANITVDYLYNKETKLFTAKLNVNENVECGNNTCTNNEVHNLTECKNASVSISHNSCTAPDKTLILDVPPGVEKFQLHDCTQVEKADTTICLKWKNIETFTCDTQNITYRFQCGNMIFDNKEIKLENLEPEHEYKCDSEILYNNHKFTNASKIIKTDFGSPGEPQIIFCRSEAAHQGVITWNPPQRSFHNFTLCYIKETEKDCLNLDKNLIKYDLQNLKPYTKYVLSLHAYIIAKVQRNGSAAMCHFTTKSAPPSQVWNMTVSMTSDNSMHVKCRPPRDRNGPHERYHLEVEAGNTLVRNESHKNCDFRVKDLQYSTDYTFKAYFHNGDYPGEPFILHHSTSYNSKALIAFLAFLIIVTSIALLVVLYKIYDLHKKRSCNLDEQQELVERECKLCESVEAFFLFTALCPVPK

SEQ ID NO: 10247 - protein, 593 aa, Artificial Sequence
  Synthetic polypeptide
MYLWLKLLAFGFAFLDTEVFVTGQSPTPSPTGLTTAKMPSVPLSSDPLPTHTTAFSPASTFERENDFSETTTSLSPDNTSTQVSPDSLDNASAFNTTGVSSVQTPHLPTHADSQTPSAGTDTQTFSGSAANAKLNPTPGSNAISDAYLNASETTTLSPSGSAVISTTTIATTPSKPTCDEKYANITVDYLYNKETKLFTAKLNVNENVECGNNTCTNNEVHNLTECKNASVSISHNSCTAPDKTLILDVPPGVEKFQLHDCTQVEKADTTICLKWKNIETFTCDTQNITYRFQCGNMIFDNKEIKLENLEPEHEYKCDSEILYNNHKFTNASKIIKTDFGSPGEPQIIFCRSEAAHQGVITWNPPQRSFHNFTLCYIKETEKDCLNLDKNLIKYDLQNLKPYTKYVLSLHAYIIAKVQRNGSAAMCHFTTKSAPPSQVWNMTVSMTSDNSMHVKCRPPRDRNGPHERYHLEVEAGNTLVRNESHKNCDFRVKDLQYSTDYTFKAYFHNGDYPGEPFILHHSTSYNSKALIAFLAFLIIVTSIALLVVLYKIYDLHKKRSCNLDEQQELVERECKLCESVEAFFLFTALCPVPK

SEQ ID NO: 10248 - protein, 641 aa, Artificial Sequence
  Synthetic polypeptide
MYLWLKLLAFGFAFLDTEVFVTGQSPTPSPTGLTTAKMPSVPLSSDPLPTHTTAFSPASTFERENDFSETTTSLSPDNTSTQVSPDSLDNASAFNTTGVSSVQTPHLPTHADSQTPSAGTDTQTFSGSAANAKLNPTPGSNAISDVPGERSTASTFPTDPVSPLTTTLSLAHHSSAALPARTSNTTITANTSDAYLNASETTTLSPSGSAVISTTTIATTPSKPTCDEKYANITVDYLYNKETKLFTAKLNVNENVECGNNTCTNNEVHNLTECKNASVSISHNSCTAPDKTLILDVPPGVEKFQLHDCTQVEKADTTICLKWKNIETFTCDTQNITYRFQCGNMIFDNKEIKLENLEPEHEYKCDSEILYNNHKFTNASKIIKTDFGSPGEPQIIFCRSEAAHQGVITWNPPQRSFHNFTLCYIKETEKDCLNLDKNLIKYDLQNLKPYTKYVLSLHAYIIAKVQRNGSAAMCHFTTKSAPPSQVWNMTVSMTSDNSMHVKCRPPRDRNGPHERYHLEVEAGNTLVRNESHKNCDFRVKDLQYSTDYTFKAYFHNGDYPGEPFILHHSTSYNSKALIAFLAFLIIVTSIALLVVLYKIYDLHKKRSCNLDEQQELVERECKLCESVEAFFLFTALCPVPK

SEQ ID NO: 10249 - protein, 645 aa, Artificial Sequence
  Synthetic polypeptide
MTMYLWLKLLAFGFAFLDTEVFVTGQSPTPSPTDAYLNASETTTLSPSGSAVISTTTIATTPSKPTCDEKYANITVDYLYNKETKLFTAKLNVNENVECGNNTCTNNEVHNLTECKNASVSISHNSCTAPDKTLILDVPPGVEKFQLHDCTQVEKADTTICLKWKNIETFTCDTQNITYRFQCGNMIFDNKEIKLENLEPEHEYKCDSEILYNNHKFTNASKIIKTDFGSPGEPQIIFCRSEAAHQGVITWNPPQRSFHNFTLCYIKETEKDCLNLDKNLIKYDLQNLKPYTKYVLSLHAYIIAKVQRNGSAAMCHFTTKSAPPSQVWNMTVSMTSDNSMHVKCRPPRDRNGPHERYHLEVEAGNTLVRNESHKNCDFRVKDLQYSTDYTFKAYFHNGDYPGEPFILHHSTSYNSKALIAFLAFLIIVTSIALLVVLYKIYDLHKKRSCNLDEQQELVERDDEKQLMNVEPIHADILLETYKRKIADEGRLFLAEFQSIPRVFSKFPIKEARKPFNQNKNRYVDILPYDYNRVELSEINGDAGSNYINASYIDGFKEPRKYIAAQGPRDETVDDFWRMIWEQKATVIVMVTRCEEGNRNKCAEYWPSMEEGTRAFGDVVVKINQHKRCPDYIIQKLNIVNHSTDT

SEQ ID NO: 10250 - protein, 758 aa, Artificial Sequence
  Synthetic polypeptide
MTMYLWLKLLAFGFAFLDTEVFVTGQSPTPSPTGLTTAKMPSVPLSSDPLPTHTTAFSPASTFERENDFSETTTSLSPDNTSTQVSPDSLDNASAFNTTGVSSVQTPHLPTHADSQTPSAGTDTQTFSGSAANAKLNPTPGSNAISDAYLNASETTTLSPSGSAVISTTTIATTPSKPTCDEKYANITVDYLYNKETKLFTAKLNVNENVECGNNTCTNNEVHNLTECKNASVSISHNSCTAPDKTLILDVPPGVEKFQLHDCTQVEKADTTICLKWKNIETFTCDTQNITYRFQCGNMIFDNKEIKLENLEPEHEYKCDSEILYNNHKFTNASKIIKTDFGSPGEPQIIFCRSEAAHQGVITWNPPQRSFHNFTLCYIKETEKDCLNLDKNLIKYDLQNLKPYTKYVLSLHAYIIAKVQRNGSAAMCHFTTKSAPPSQVWNMTVSMTSDNSMHVKCRPPRDRNGPHERYHLEVEAGNTLVRNESHKNCDFRVKDLQYSTDYTFKAYFHNGDYPGEPFILHHSTSYNSKALIAFLAFLIIVTSIALLVVLYKIYDLHKKRSCNLDEQQELVERDDEKQLMNVEPIHADILLETYKRKIADEGRLFLAEFQSIPRVFSKFPIKEARKPFNQNKNRYVDILPYDYNRVELSEINGDAGSNYINASYIDGFKEPRKYIAAQGPRDETVDDFWRMIWEQKATVIVMVTRCEEGNRNKCAEYWPSMEEGTRAFGDVVVKINQHKRCPDYIIQKLNIVNHSTDT

SEQ ID NO: 10251 - protein, 806 aa, Artificial Sequence
  Synthetic polypeptide
MTMYLWLKLLAFGFAFLDTEVFVTGQSPTPSPTGLTTAKMPSVPLSSDPLPTHTTAFSPASTFERENDFSETTTSLSPDNTSTQVSPDSLDNASAFNTTGVSSVQTPHLPTHADSQTPSAGTDTQTFSGSAANAKLNPTPGSNAISDVPGERSTASTFPTDPVSPLTTTLSLAHHSSAALPARTSNTTITANTSDAYLNASETTTLSPSGSAVISTTTIATTPSKPTCDEKYANITVDYLYNKETKLFTAKLNVNENVECGNNTCTNNEVHNLTECKNASVSISHNSCTAPDKTLILDVPPGVEKFQLHDCTQVEKADTTICLKWKNIETFTCDTQNITYRFQCGNMIFDNKEIKLENLEPEHEYKCDSEILYNNHKFTNASKIIKTDFGSPGEPQIIFCRSEAAHQGVITWNPPQRSFHNFTLCYIKETEKDCLNLDKNLIKYDLQNLKPYTKYVLSLHAYIIAKVQRNGSAAMCHFTTKSAPPSQVWNMTVSMTSDNSMHVKCRPPRDRNGPHERYHLEVEAGNTLVRNESHKNCDFRVKDLQYSTDYTFKAYFHNGDYPGEPFILHHSTSYNSKALIAFLAFLIIVTSIALLVVLYKIYDLHKKRSCNLDEQQELVERDDEKQLMNVEPIHADILLETYKRKIADEGRLFLAEFQSIPRVFSKFPIKEARKPFNQNKNRYVDILPYDYNRVELSEINGDAGSNYINASYIDGFKEPRKYIAAQGPRDETVDDFWRMIWEQKATVIVMVTRCEEGNRNKCAEYWPSMEEGTRAFGDVVVKINQHKRCPDYIIQKLNIVNHSTDT

SEQ ID NO: 10252 - protein, 740 aa, Artificial Sequence
  Synthetic polypeptide
MTMYLWLKLLAFGFAFLDTEVFVTGQSPTPSPTGVSSVQTPHLPTHADSQTPSAGTDTQTFSGSAANAKLNPTPGSNAISDVPGERSTASTFPTDPVSPLTTTLSLAHHSSAALPARTSNTTITANTSDAYLNASETTTLSPSGSAVISTTTIATTPSKPTCDEKYANITVDYLYNKETKLFTAKLNVNENVECGNNTCTNNEVHNLTECKNASVSISHNSCTAPDKTLILDVPPGVEKFQLHDCTQVEKADTTICLKWKNIETFTCDTQNITYRFQCGNMIFDNKEIKLENLEPEHEYKCDSEILYNNHKFTNASKIIKTDFGSPGEPQIIFCRSEAAHQGVITWNPPQRSFHNFTLCYIKETEKDCLNLDKNLIKYDLQNLKPYTKYVLSLHAYIIAKVQRNGSAAMCHFTTKSAPPSQVWNMTVSMTSDNSMHVKCRPPRDRNGPHERYHLEVEAGNTLVRNESHKNCDFRVKDLQYSTDYTFKAYFHNGDYPGEPFILHHSTSYNSKALIAFLAFLIIVTSIALLVVLYKIYDLHKKRSCNLDEQQELVERDDEKQLMNVEPIHADILLETYKRKIADEGRLFLAEFQSIPRVFSKFPIKEARKPFNQNKNRYVDILPYDYNRVELSEINGDAGSNYINASYIDGFKEPRKYIAAQGPRDETVDDFWRMIWEQKATVIVMVTRCEEGNRNKCAEYWPSMEEGTRAFGDVVVKINQHKRCPDYIIQKLNIVNHSTDT

SEQ ID NO: 10253 - protein, 643 aa, Artificial Sequence
  Synthetic polypeptide
MYLWLKLLAFGFAFLDTEVFVTGQSPTPSPTDAYLNASETTTLSPSGSAVISTTTIATTPSKPTCDEKYANITVDYLYNKETKLFTAKLNVNENVECGNNTCTNNEVHNLTECKNASVSISHNSCTAPDKTLILDVPPGVEKFQLHDCTQVEKADTTICLKWKNIETFTCDTQNITYRFQCGNMIFDNKEIKLENLEPEHEYKCDSEILYNNHKFTNASKIIKTDFGSPGEPQIIFCRSEAAHQGVITWNPPQRSFHNFTLCYIKETEKDCLNLDKNLIKYDLQNLKPYTKYVLSLHAYIIAKVQRNGSAAMCHFTTKSAPPSQVWNMTVSMTSDNSMHVKCRPPRDRNGPHERYHLEVEAGNTLVRNESHKNCDFRVKDLQYSTDYTFKAYFHNGDYPGEPFILHHSTSYNSKALIAFLAFLIIVTSIALLVVLYKIYDLHKKRSCNLDEQQELVERDDEKQLMNVEPIHADILLETYKRKIADEGRLFLAEFQSIPRVFSKFPIKEARKPFNQNKNRYVDILPYDYNRVELSEINGDAGSNYINASYIDGFKEPRKYIAAQGPRDETVDDFWRMIWEQKATVIVMVTRCEEGNRNKCAEYWPSMEEGTRAFGDVVVKINQHKRCPDYIIQKLNIVNHSTDT

SEQ ID NO: 10254 - protein, 756 aa, Artificial Sequence
  Synthetic polypeptide
MYLWLKLLAFGFAFLDTEVFVTGQSPTPSPTGLTTAKMPSVPLSSDPLPTHTTAFSPASTFERENDFSETTTSLSPDNTSTQVSPDSLDNASAFNTTGVSSVQTPHLPTHADSQTPSAGTDTQTFSGSAANAKLNPTPGSNAISDAYLNASETTTLSPSGSAVISTTTIATTPSKPTCDEKYANITVDYLYNKETKLFTAKLNVNENVECGNNTCTNNEVHNLTECKNASVSISHNSCTAPDKTLILDVPPGVEKFQLHDCTQVEKADTTICLKWKNIETFTCDTQNITYRFQCGNMIFDNKEIKLENLEPEHEYKCDSEILYNNHKFTNASKIIKTDFGSPGEPQIIFCRSEAAHQGVITWNPPQRSFHNFTLCYIKETEKDCLNLDKNLIKYDLQNLKPYTKYVLSLHAYIIAKVQRNGSAAMCHFTTKSAPPSQVWNMTVSMTSDNSMHVKCRPPRDRNGPHERYHLEVEAGNTLVRNESHKNCDFRVKDLQYSTDYTFKAYFHNGDYPGEPFILHHSTSYNSKALIAFLAFLIIVTSIALLVVLYKIYDLHKKRSCNLDEQQELVERDDEKQLMNVEPIHADILLETYKRKIADEGRLFLAEFQSIPRVFSKFPIKEARKPFNQNKNRYVDILPYDYNRVELSEINGDAGSNYINASYIDGFKEPRKYIAAQGPRDETVDDFWRMIWEQKATVIVMVTRCEEGNRNKCAEYWPSMEEGTRAFGDVVVKINQHKRCPDYIIQKLNIVNHSTDT

SEQ ID NO: 10255 - protein, 804 aa, Artificial Sequence
  Synthetic polypeptide
MYLWLKLLAFGFAFLDTEVFVTGQSPTPSPTGLTTAKMPSVPLSSDPLPTHTTAFSPASTFERENDFSETTTSLSPDNTSTQVSPDSLDNASAFNTTGVSSVQTPHLPTHADSQTPSAGTDTQTFSGSAANAKLNPTPGSNAISDVPGERSTASTFPTDPVSPLTTTLSLAHHSSAALPARTSNTTITANTSDAYLNASETTTLSPSGSAVISTTTIATTPSKPTCDEKYANITVDYLYNKETKLFTAKLNVNENVECGNNTCTNNEVHNLTECKNASVSISHNSCTAPDKTLILDVPPGVEKFQLHDCTQVEKADTTICLKWKNIETFTCDTQNITYRFQCGNMIFDNKEIKLENLEPEHEYKCDSEILYNNHKFTNASKIIKTDFGSPGEPQIIFCRSEAAHQGVITWNPPQRSFHNFTLCYIKETEKDCLNLDKNLIKYDLQNLKPYTKYVLSLHAYIIAKVQRNGSAAMCHFTTKSAPPSQVWNMTVSMTSDNSMHVKCRPPRDRNGPHERYHLEVEAGNTLVRNESHKNCDFRVKDLQYSTDYTFKAYFHNGDYPGEPFILHHSTSYNSKALIAFLAFLIIVTSIALLVVLYKIYDLHKKRSCNLDEQQELVERDDEKQLMNVEPIHADILLETYKRKIADEGRLFLAEFQSIPRVFSKFPIKEARKPFNQNKNRYVDILPYDYNRVELSEINGDAGSNYINASYIDGFKEPRKYIAAQGPRDETVDDFWRMIWEQKATVIVMVTRCEEGNRNKCAEYWPSMEEGTRAFGDVVVKINQHKRCPDYIIQKLNIVNHSTDT

SEQ ID NO: 10256 - protein, 598 aa, Artificial Sequence
  Synthetic polypeptide
IEIPMDLTQPPTITKQSAKDHIVDPRDNILIECEAKGNPAPSFHWTRNSRFFNIAKDPRVSMRRRSGTLVIDFRSGGRPEEYEGEYQCFARNKFGTALSNRIRLQVSKSPLWPKENLDPVVVQEGAPLTLQCNPPPGLPSPVIFWMSSSMEPITQDKRVSQGHNGDLYFSNVMLQDMQTDYSCNARFHFTHTIQQKNPFTLKVLTNHPYNDSSLRNHPDMYSARGVAERTPSFMYPQGTASSQMVLRGMDLLLECIASGVPTPDIAWYKKGGDLPSDKAKFENFNKALRITNVSEEDSGEYFCLASNKMGSIRHTISVRVKAAPYWLDEPKNLILAPGEDGRLVCRANGNPKPTVQWMVNGEPLQSAPPNPNREVAGDTIIFRDTQISSRAVYQCNTSNEHGYLLANAFVSVLDVPPRMLSPRNQLIRVILYNRTRLDCPFFGSPIPTLRWFKNGQGSNLDGGNYHVYENGSLEIKMIRKEDQGIYTCVATNILGKAENQVRLEVKDPTRIYRMPEDQVARRGTTVQLECRVKHDPSLKLTVSWLKDDEPLYIGNSSLLLSPTPPLSPSSQSLHFSSPCLPSLRLFSLSFLPLSSLFL

SEQ ID NO: 10257 - protein, 611 aa, Artificial Sequence
  Synthetic polypeptide
MARQPPPPWVHAAFLLCLLSLGGAIEIPMDLSIETTVTQPPTITKQSAKDHIVDPRDNILIECEAKGNPAPSFHWTRNSRFFNIAKDPRVSMRRRSGTLVIDFRSGGRPEEYEGEYQCFARNKFGTALSNRIRLQVSKSPLWPKENLDPVVVQEGAPLTLQCNPPPGLPSPVIFWMSSSMEPITQDKRVSQGHNGDLYFSNVMLQDMQTDYSCNARFHFTHTIQQKNPFTLKVLTTRGVAERTPSFMYPQGTASSQMVLRGMDLLLECIASGVPTPDIAWYKKGGDLPSDKAKFENFNKALRITNVSEEDSGEYFCLASNKMGSIRHTISVRVKAAPYWLDEPKNLILAPGEDGRLVCRANGNPKPTVQWMVNGEPLQSAPPNPNREVAGDTIIFRDTQISSRAVYQCNTSNEHGYLLANAFVSVLDVPPRMLSPRNQLIRVILYNRTRLDCPFFGSPIPTLRWFKNGQGSNLDGGNYHVYENGSLEIKMIRKEDQGIYTCVATNILGKAENQVRLEVKDPTRIYRMPEDQVARRGTTVQLECRVKHDPSLKLTVSWLKDDEPLYIGNSSLLLSPTPPLSPSSQSLHFSSPCLPSLRLFSLSFLPLSSLFL

SEQ ID NO: 10258 - protein, 622 aa, Artificial Sequence
  Synthetic polypeptide
MARQPPPPWVHAAFLLCLLSLGGAIEIPMDLTQPPTITKQSAKDHIVDPRDNILIECEAKGNPAPSFHWTRNSRFFNIAKDPRVSMRRRSGTLVIDFRSGGRPEEYEGEYQCFARNKFGTALSNRIRLQVSKSPLWPKENLDPVVVQEGAPLTLQCNPPPGLPSPVIFWMSSSMEPITQDKRVSQGHNGDLYFSNVMLQDMQTDYSCNARFHFTHTIQQKNPFTLKVLTNHPYNDSSLRNHPDMYSARGVAERTPSFMYPQGTASSQMVLRGMDLLLECIASGVPTPDIAWYKKGGDLPSDKAKFENFNKALRITNVSEEDSGEYFCLASNKMGSIRHTISVRVKAAPYWLDEPKNLILAPGEDGRLVCRANGNPKPTVQWMVNGEPLQSAPPNPNREVAGDTIIFRDTQISSRAVYQCNTSNEHGYLLANAFVSVLDVPPRMLSPRNQLIRVILYNRTRLDCPFFGSPIPTLRWFKNGQGSNLDGGNYHVYENGSLEIKMIRKEDQGIYTCVATNILGKAENQVRLEVKDPTRIYRMPEDQVARRGTTVQLECRVKHDPSLKLTVSWLKDDEPLYIGNSSLLLSPTPPLSPSSQSLHFSSPCLPSLRLFSLSFLPLSSLFL

SEQ ID NO: 10259 - protein, 605 aa, Artificial Sequence
  Synthetic polypeptide
MARQPPPPWVHAAFLLCLLSLGGAIEIPMDLTQPPTITKQSAKDHIVDPRDNILIECEAKGNPAPSFHWTRNSRFFNIAKDPRVSMRRRSGTLVIDFRSGGRPEEYEGEYQCFARNKFGTALSNRIRLQVSKSPLWPKENLDPVVVQEGAPLTLQCNPPPGLPSPVIFWMSSSMEPITQDKRVSQGHNGDLYFSNVMLQDMQTDYSCNARFHFTHTIQQKNPFTLKVLTTRGVAERTPSFMYPQGTASSQMVLRGMDLLLECIASGVPTPDIAWYKKGGDLPSDKAKFENFNKALRITNVSEEDSGEYFCLASNKMGSIRHTISVRVKAAPYWLDEPKNLILAPGEDGRLVCRANGNPKPTVQWMVNGEPLQSAPPNPNREVAGDTIIFRDTQISSRAVYQCNTSNEHGYLLANAFVSVLDVPPRMLSPRNQLIRVILYNRTRLDCPFFGSPIPTLRWFKNGQGSNLDGGNYHVYENGSLEIKMIRKEDQGIYTCVATNILGKAENQVRLEVKDPTRIYRMPEDQVARRGTTVQLECRVKHDPSLKLTVSWLKDDEPLYIGNSSLLLSPTPPLSPSSQSLHFSSPCLPSLRLFSLSFLPLSSLFL

SEQ ID NO: 10260 - protein, 611 aa, Artificial Sequence
  Synthetic polypeptide
MARQPPPPWVHAAFLLCLLSLGGAIEIPMDPNPQHRLTQPPTITKQSAKDHIVDPRDNILIECEAKGNPAPSFHWTRNSRFFNIAKDPRVSMRRRSGTLVIDFRSGGRPEEYEGEYQCFARNKFGTALSNRIRLQVSKSPLWPKENLDPVVVQEGAPLTLQCNPPPGLPSPVIFWMSSSMEPITQDKRVSQGHNGDLYFSNVMLQDMQTDYSCNARFHFTHTIQQKNPFTLKVLTTRGVAERTPSFMYPQGTASSQMVLRGMDLLLECIASGVPTPDIAWYKKGGDLPSDKAKFENFNKALRITNVSEEDSGEYFCLASNKMGSIRHTISVRVKAAPYWLDEPKNLILAPGEDGRLVCRANGNPKPTVQWMVNGEPLQSAPPNPNREVAGDTIIFRDTQISSRAVYQCNTSNEHGYLLANAFVSVLDVPPRMLSPRNQLIRVILYNRTRLDCPFFGSPIPTLRWFKNGQGSNLDGGNYHVYENGSLEIKMIRKEDQGIYTCVATNILGKAENQVRLEVKDPTRIYRMPEDQVARRGTTVQLECRVKHDPSLKLTVSWLKDDEPLYIGNSSLLLSPTPPLSPSSQSLHFSSPCLPSLRLFSLSFLPLSSLFL

SEQ ID NO: 10261 - protein, 611 aa, Artificial Sequence
  Synthetic polypeptide
MARQPPPPWVHAAFLLCLLSLGGAIEIPMDPSIQNELTQPPTITKQSAKDHIVDPRDNILIECEAKGNPAPSFHWTRNSRFFNIAKDPRVSMRRRSGTLVIDFRSGGRPEEYEGEYQCFARNKFGTALSNRIRLQVSKSPLWPKENLDPVVVQEGAPLTLQCNPPPGLPSPVIFWMSSSMEPITQDKRVSQGHNGDLYFSNVMLQDMQTDYSCNARFHFTHTIQQKNPFTLKVLTTRGVAERTPSFMYPQGTASSQMVLRGMDLLLECIASGVPTPDIAWYKKGGDLPSDKAKFENFNKALRITNVSEEDSGEYFCLASNKMGSIRHTISVRVKAAPYWLDEPKNLILAPGEDGRLVCRANGNPKPTVQWMVNGEPLQSAPPNPNREVAGDTIIFRDTQISSRAVYQCNTSNEHGYLLANAFVSVLDVPPRMLSPRNQLIRVILYNRTRLDCPFFGSPIPTLRWFKNGQGSNLDGGNYHVYENGSLEIKMIRKEDQGIYTCVATNILGKAENQVRLEVKDPTRIYRMPEDQVARRGTTVQLECRVKHDPSLKLTVSWLKDDEPLYIGNSSLLLSPTPPLSPSSQSLHFSSPCLPSLRLFSLSFLPLSSLFL

SEQ ID NO: 10262 - protein, 581 aa, Artificial Sequence
  Synthetic polypeptide
  misc_feature (1)..(1): Xaa can be any naturally occurring amino acid
XSIQNELTQPPTITKQSAKDHIVDPRDNILIECEAKGNPAPSFHWTRNSRFFNIAKDPRVSMRRRSGTLVIDFRSGGRPEEYEGEYQCFARNKFGTALSNRIRLQVSKSPLWPKENLDPVVVQEGAPLTLQCNPPPGLPSPVIFWMSSSMEPITQDKRVSQGHNGDLYFSNVMLQDMQTDYSCNARFHFTHTIQQKNPFTLKVLTTRGVAERTPSFMYPQGTASSQMVLRGMDLLLECIASGVPTPDIAWYKKGGDLPSDKAKFENFNKALRITNVSEEDSGEYFCLASNKMGSIRHTISVRVKAAPYWLDEPKNLILAPGEDGRLVCRANGNPKPTVQWMVNGEPLQSAPPNPNREVAGDTIIFRDTQISSRAVYQCNTSNEHGYLLANAFVSVLDVPPRMLSPRNQLIRVILYNRTRLDCPFFGSPIPTLRWFKNGQGSNLDGGNYHVYENGSLEIKMIRKEDQGIYTCVATNILGKAENQVRLEVKDPTRIYRMPEDQVARRGTTVQLECRVKHDPSLKLTVSWLKDDEPLYIGNSSLLLSPTPPLSPSSQSLHFSSPCLPSLRLFSLSFLPLSSLFL

SEQ ID NO: 10263 - protein, 778 aa, Artificial Sequence
  Synthetic polypeptide
MSQPRPRYVVDRAAYSLTLFDDEFEKKDRTYPVGEKLRNAFRCSSAKIKAVVFGLLPVLSWLPKYKIKDYIIPDLLGGLSGGSIQVPQGMAFALLANLPAVNGLYSSFFPLLTYFFLGGVHQMVPGTFAVISILVGNICLQLAPESKFQVFNNATNESYVDTAAMEAERLHVSATLACLTAIIQMGLGFMQFGFVAIYLSESFIRGFMTAAGLQILISVLKYIFGLTIPSYTGPGSIVFTFIDICKNLPHTNIASLIFALISGAFLVLVKELNARYMHKIRFPIPTEMIVVVVATAISGGCKMPKKYHMQIVGEIQRGFPTPVSPVVSQWKDMIGTAFSLAIVSYVINLAMGRTLANKHGYDVDSNQEMIALGCSNFFGSFFKIHVICCALSVTLAVDGAGGKSQVASLCVSLVVMITMLVLGIYLYPLPKSVLGALIAVNLKNSLKQLTDPYYLWRKSKLDCCIWVVSFLSSFFLSLPYGVAVGVAFSVLVVVFQTQFRNGYALAQVMDTDIYVNPKTYNRAQDIQGIKIITYCSPLYFANSEIFRQKVIAKTGMDPQKVLLAKQKYLKKQEKRRMRPTQQRRSLFMKTKTVSLQELQQDFENAPPTDPNNNQTPANGTSVSYITFSPDSSSPAQSEPPASAEAPGEPSDMLASVPPFVTFHTLILDMSGVSFVDLMGIKALAKLSSTYGKIGVKVFLVNIHAQVYNDISHGGVFEDGSLECKHVFPSIHDAVLFAQANARDVTPGHNFQGAPGDAELSLYDSEEDIRSYWDLEQVK

SEQ ID NO: 10264 - protein, 298 aa, Artificial Sequence
  Synthetic polypeptide
MTVARPSVPAALPLLGELPRLLLLVLLCLPAVWGDCGLPPDVPNAQPALEGRTSFPEDTVITYKCEESFVKIPGEKDSVICLKGSQWSDIEEFCNQKSCPNPGEIRNGQIDVPGGILFGATISFSCNTGYKLFGSTSSFCLISGSSVQWSDPLPECREIYCPAPPQIDNGIIQGERDHYGYRQSVTYACNKGFTMIGEHSIYCTVNNDEGEWSGPPPECRGKSLTSKVPPTVQKPTTVNVPTTEVSPTSQKTTTKTTTPNAQATRSTPVSRTTKHFHETTPNKGSGTTSGTTRLLSEL

SEQ ID NO: 10265 - protein, 362 aa, Artificial Sequence
  Synthetic polypeptide
MTVARPSVPAALPLLGELPRLLLLVLLCLPAVWGDCGLPPDVPNAQPALEGRTSFPEDTVITYKCEESFVKIPGEKDSVICLKGSQWSDIEEFCNRSCEVPTRLNSASLKQPYITQNYFPVGTVVEYECRPGYRREPSLSPKLTCLQNLKWSTAVEFCKKKSCPNPGEIRNGQIDVPGGILFGATISFSCNTGYKLFGSTSSFCLISGSSVQWSDPLPECREIYCPAPPQIDNGIIQGERDHYGYRQSVTYACNKGFTMIGEHSIYCTVNNDEGEWSGPPPECRGKSLTSKVPPTVQKPTTVNVPTTEVSPTSQKTTTKTTTPNAQATRSTPVSRTTKHFHETTPNKGSGTTSGTTRLLSEL

SEQ ID NO: 10266 - protein, 157 aa, Artificial Sequence
  Synthetic polypeptide
MGAAGLLGVFLALVAPGVLGISCGSPPPILNGRISYYSTPIAVGTVIRYSCSGTFRLIGEKSLLCITKDKVDGTWDKPAPKCEYFNKYSSCPEPIVPGGYKIRGSTPYRHGDSVTFACKTNFSMNGNKSVWCQANNMWGPTRLPTCVSGKPKDWTPL

SEQ ID NO: 10267 - protein, 524 aa, Artificial Sequence
  Synthetic polypeptide
MGAAGLLGVFLALVAPGVLGISCGSPPPILNGRISYYSTPIAVGTVIRYSCSGTFRLIGEKSLLCITKDKVDGTWDKPAPKCEYFNKYSSCPEPIVPGGYKIRGSTPYRHGDSVTFACKTNFSMNGNKSVWCQANNMWGPTRLPTCVSVFPLECPALPMIHNGHHTSENVGSIAPGLSVTYSCESGYLLVGEKIINCLSSGKWSAVPPTCEEARCKSLGRFPNGKVKEPPILRVGVTANFFCDEGYRLQGPPSSRCVIAGQGVAWTKMPVCEEIFCPSPPPILNGRHIGNSLANVSYGSIVTYTCDPDPEEGVNFILIGESTLRCTVDSQKTGTWSGPAPRCELSTSAVQCPHPQILRGRMVSGQKDRYTYNDTVIFACMFGFTLKGSKQIRCNAQGTWEPSAPVCEKECQAPPNILNGQKEDRHMVRFDPGTSIKYSCNPGYVLVGEESIQCTSEGVWTPPVPQCKVAACEATGRQLLTKPQHQFVRPDVNSSCGEGYKLSGSVYQECQGTIPWFMEIRLCKV

SEQ ID NO: 10268 - protein, 696 aa, Artificial Sequence
  Synthetic polypeptide
MTMAGGRRGLVAPQNTFLENIVRRSNDTNFVLGNAQIVDWPIVYSNDGFCKLSGYHRAEVMQKSSTCSFMYGELTDKDTIEKVRQTFENYEMNSFEILMYKKNRTPVWFFVKIAPIRNEQDKVVLFLCTFSDITAFKQPIEDDSCKGWGKFARLTRALTSSRGVLQQLAPSVQKGENVHKHSRLAEVLQLGSDILPQYKQEAPKTPPHIILHYCVFKTTWDWIILILTFYTAILVPYNVSFKTRQNNVAWLVVDSIVDVIFLVDIVLNFHTTFVGPAGEVISDPKLIRMNYLKTWFVIDLLSCLPYDVINAFENVDEGISSLFSSLKVVRLLRLGRVARKLDHYIEYGAAVLVLLVCVFGLAAHWMACIWYSIGDYEIFDEDTKTIRNNSWLYQLAMDIGTPYQFNGSGSGKWEGGPSKNSVYISSLYFTMTSLTSVGFGNIAPSTDIEKIFAVAIMMIGSLLYATIFGNVTTIFQQMYANTNRYHEMLNSVRDFLKLYQVPKGLSERVMDYIVSTWSMSRGIDTEKVLQICPKDMRADICVHLNRKVFKEHPAFRLASDGCLRALAMEFQTVHCAPGDLIYHAGESVDSLCFVVSGSLEVIQDDEVVAILGKGDVFGDVFWKEATLAQSCANVRALTYCDLHVIKRDALQKVLEFYTAFSHSFSRNLILTYNLRKRSLPQSWQLEDAHLILMEER

SEQ ID NO: 10269 - protein, 723 aa, Artificial Sequence
  Synthetic polypeptide
MTMAGGRRGLVAPQNTFLENIVRRSNDTNFVLGNAQIVDWPIVYSNDGFCKLSGYHRAEVMQKSSTCSFMYGELTDKDTIEKVRQTFENYEMNSFEILMYKKNRTPVWFFVKIAPIRNEQDKVVLFLCTFSDITAFKQPIEDDSCKGWGKFARLTRALTSSRGVLQQLAPSVQKGENVHKHSRLAEVLQLGSDILPQYKQEAPKTPPHIILHYCVFKTTWDWIILILTFYTAILVPYNVSFKTRQNNVAWLVVDSIVDVIFLVDIVLNFHTTFVGPAGEVISDPKLIRMNYLKTWFVIDLLSCLPYDVINAFENVDEVSAFMGDPGKIGFADQIPPPLEGRESQGISSLFSSLKVVRLLRLGRVARKLDHYIEYGAAVLVLLVCVFGLAAHWMACIWYSIGDYEIFDEDTKTIRNNSWLYQLAMDIGTPYQFNGSGSGKWEGGPSKNSVYISSLYFTMTSLTSVGFGNIAPSTDIEKIFAVAIMMIGSLLYATIFGNVTTIFQQMYANTNRYHEMLNSVRDFLKLYQVPKGLSERVMDYIVSTWSMSRGIDTEKVLQICPKDMRADICVHLNRKVFKEHPAFRLASDGCLRALAMEFQTVHCAPGDLIYHAGESVDSLCFVVSGSLEVIQDDEVVAILGKGDVFGDVFWKEATLAQSCANVRALTYCDLHVIKRDALQKVLEFYTAFSHSFSRNLILTYNLRKRSLPQSWQLEDAHLILMEER

SEQ ID NO: 10270 - protein, 13 aa, Artificial Sequence
  Synthetic polypeptide
MIRQERSTSYQEV

SEQ ID NO: 10271 - protein, 231 aa, Artificial Sequence
  Synthetic polypeptide
MPFGLKLRRTRRYNVLSKNCFVTRIRLLDSNVIECTLSVESTGQECLEAVAQRLELRETHYFGLWFLSKSQQARWVELEKPLKKHLDKFANEPLLFFGVMFYVPNVSWLQQEATRYQYYLQVKKDVLEGRLRCTLDQVIRLAGLAVQADFGDYNQFDSQDFLREYVLFPMDLALEEAVLEELTQKVAQEHKAHSGILPAEAELMYINEVERLDGFGQEIFPVKAGHGGSRL

SEQ ID NO: 10272 - protein, 711 aa, Artificial Sequence
  Synthetic polypeptide
MEALRESVLHLALQMSTYKRATLDEEDLVDSLSEGDAYPNGLQVNFHSPRSGQRCWAARTQVEKRLVVLVVLLAAGLVACLAALGIQYQTRSPSVCLSEACVSVTSSILSSMDPTVDPCHDFFSYACGGWIKANPVPDGHSRWGTFSNLWEHNQAIIKHLLENSTASVSEAERKAQVYYRACMNETRIEELRAKPLMELIERLGGWNITGPWAKDNFQDTLQVVTAHYRTSPFFSVYVSADSKNSNSNVIQVDQSGLGLPSRDYYLNKTENEKVLTGYLNYMVQLGKLLGGGDEEAIRPQMQQILDFETALANITIPQEKRRDEELIYHKVTAAELQTLAPAINWLPFLNTIFYPVEINESEPIVVYDKEYLEQISTLINTTDRCLLNNYMIWNLVRKTSSFLDQRFQDADEKFMEVMYGTKKTCLPRWKFCVSDTENNLGFALGPMFVKATFAEDSKSIATEIILEIKKAFEESLSTLKWMDEETRKSAKEKADAIYNMIGYPNFIMDPKELDKVFNDYTAVPDLYFENAMRFFNFSWRVTADQLRKAPNRDQWSMTPPMVNAYYSPTKNEIVFPAGILQAPFYTRSSPKALNFGGIGVVVGHELTHAFDDQGREYDKDGNLRPWWKNSSVEAFKRQTECMVEQYSNYSVNGEPVNGRHTLGENIADNGGLKAAYRAYQNWVKKNGAEHSLPTLGLTNNQLFFLGFAQGS

SEQ ID NO: 10273 - protein, 698 aa, Artificial Sequence
  Synthetic polypeptide
MMSTYKRATLDEEDLVDSLSEGDAYPNGLQVNFHSPRSGQRCWAARTQVEKRLVVLVVLLAAGLVACLAALGIQYQTRSPSVCLSEACVSVTSSILSSMDPTVDPCHDFFSYACGGWIKANPVPDGHSRWGTFSNLWEHNQAIIKHLLENSTASVSEAERKAQVYYRACMNETRIEELRAKPLMELIERLGGWNITGPWAKDNFQDTLQVVTAHYRTSPFFSVYVSADSKNSNSNVIQVDQSGLGLPSRDYYLNKTENEKVLTGYLNYMVQLGKLLGGGDEEAIRPQMQQILDFETALANITIPQEKRRDEELIYHKVTAAELQTLAPAINWLPFLNTIFYPVEINESEPIVVYDKEYLEQISTLINTTDRCLLNNYMIWNLVRKTSSFLDQRFQDADEKFMEVMYGTKKTCLPRWKFCVSDTENNLGFALGPMFVKATFAEDSKSIATEIILEIKKAFEESLSTLKWMDEETRKSAKEKADAIYNMIGYPNFIMDPKELDKVFNDYTAVPDLYFENAMRFFNFSWRVTADQLRKAPNRDQWSMTPPMVNAYYSPTKNEIVFPAGILQAPFYTRSSPKALNFGGIGVVVGHELTHAFDDQGREYDKDGNLRPWWKNSSVEAFKRQTECMVEQYSNYSVNGEPVNGRHTLGENIADNGGLKAAYRAYQNWVKKNGAEHSLPTLGLTNNQLFFLGFAQGS

SEQ ID NO: 10274 - protein, 702 aa, Artificial Sequence
  Synthetic polypeptide
MPLQGLGLQRNPFLQGKRGPGLTSSPPLLPPSLQVNFHSPRSGQRCWAARTQVEKRLVVLVVLLAAGLVACLAALGIQYQTRSPSVCLSEACVSVTSSILSSMDPTVDPCHDFFSYACGGWIKANPVPDGHSRWGTFSNLWEHNQAIIKHLLENSTASVSEAERKAQVYYRACMNETRIEELRAKPLMELIERLGGWNITGPWAKDNFQDTLQVVTAHYRTSPFFSVYVSADSKNSNSNVIQVDQSGLGLPSRDYYLNKTENEKVLTGYLNYMVQLGKLLGGGDEEAIRPQMQQILDFETALANITIPQEKRRDEELIYHKVTAAELQTLAPAINWLPFLNTIFYPVEINESEPIVVYDKEYLEQISTLINTTDRCLLNNYMIWNLVRKTSSFLDQRFQDADEKFMEVMYGTKKTCLPRWKFCVSDTENNLGFALGPMFVKATFAEDSKSIATEIILEIKKAFEESLSTLKWMDEETRKSAKEKADAIYNMIGYPNFIMDPKELDKVFNDYTAVPDLYFENAMRFFNFSWRVTADQLRKAPNRDQWSMTPPMVNAYYSPTKNEIVFPAGILQAPFYTRSSPKALNFGGIGVVVGHELTHAFDDQGREYDKDGNLRPWWKNSSVEAFKRQTECMVEQYSNYSVNGEPVNGRHTLGENIADNGGLKAAYRAYQNWVKKNGAEHSLPTLGLTNNQLFFLGFAQGS

SEQ ID NO: 10275 - protein, 714 aa, Artificial Sequence
  Synthetic polypeptide
MRGVWPPPVSALLSALGMSTYKRATLDEEDLVDSLSEGDAYPNGLQVNFHSPRSGQRCWAARTQVEKRLVVLVVLLAAGLVACLAALGIQYQTRSPSVCLSEACVSVTSSILSSMDPTVDPCHDFFSYACGGWIKANPVPDGHSRWGTFSNLWEHNQAIIKHLLENSTASVSEAERKAQVYYRACMNETRIEELRAKPLMELIERLGGWNITGPWAKDNFQDTLQVVTAHYRTSPFFSVYVSADSKNSNSNVIQVDQSGLGLPSRDYYLNKTENEKVLTGYLNYMVQLGKLLGGGDEEAIRPQMQQILDFETALANITIPQEKRRDEELIYHKVTAAELQTLAPAINWLPFLNTIFYPVEINESEPIVVYDKEYLEQISTLINTTDRCLLNNYMIWNLVRKTSSFLDQRFQDADEKFMEVMYGTKKTCLPRWKFCVSDTENNLGFALGPMFVKATFAEDSKSIATEIILEIKKAFEESLSTLKWMDEETRKSAKEKADAIYNMIGYPNFIMDPKELDKVFNDYTAVPDLYFENAMRFFNFSWRVTADQLRKAPNRDQWSMTPPMVNAYYSPTKNEIVFPAGILQAPFYTRSSPKALNFGGIGVVVGHELTHAFDDQGREYDKDGNLRPWWKNSSVEAFKRQTECMVEQYSNYSVNGEPVNGRHTLGENIADNGGLKAAYRAYQNWVKKNGAEHSLPTLGLTNNQLFFLGFAQGS

SEQ ID NO: 10276 - protein, 560 aa, Artificial Sequence
  Synthetic polypeptide
MEALRESVLHLALQMSTYKRATLDEEDLVDSLSEGDAYPNGLQVNFHSPRSGQRCWAARTQVEKRLVVLVVLLAAGLVACLAALGIQYQTRSPSVCLSEACVSVTSSILSSMDPTVDPCHDFFSYACGGWIKANPVPDGHSRWGTFSNLWEHNQAIIKHLLENSTASVSEAERKAQVYYRACMNETRIEELRAKPLMELIERLGGWNITGPWAKDNFQDTLQVVTAHYRTSPFFSVYVSADSKNSNSNVIQVDQSGLGLPSRDYYLNKTENEKVLTGYLNYMVQLGKLLGGGDEEAIRPQMQQILDFETALANITIPQEKRRDEELIYHKVTAAELQTLAPAINWLPFLNTIFYPVEINESEPIVVYDKEYLEQISTLINTTDRCLLNNYMIWNLVRKTSSFLDQRFQDADEKFMEVMYGTKKTCLPRWKFCVSDTENNLGFALGPMFVKATFAEDSKSIATEIILEIKKAFEESLSTLKWMDEETRKSAKEKADAIYNMIGYPNFIMDPKELDKVFNDYTAVPDLYFENAMRFFNFSWRVTADQLRKAPNRDQYSGPRL

SEQ ID NO: 10277 - protein, 547 aa, Artificial Sequence
  Synthetic polypeptide
MMSTYKRATLDEEDLVDSLSEGDAYPNGLQVNFHSPRSGQRCWAARTQVEKRLVVLVVLLAAGLVACLAALGIQYQTRSPSVCLSEACVSVTSSILSSMDPTVDPCHDFFSYACGGWIKANPVPDGHSRWGTFSNLWEHNQAIIKHLLENSTASVSEAERKAQVYYRACMNETRIEELRAKPLMELIERLGGWNITGPWAKDNFQDTLQVVTAHYRTSPFFSVYVSADSKNSNSNVIQVDQSGLGLPSRDYYLNKTENEKVLTGYLNYMVQLGKLLGGGDEEAIRPQMQQILDFETALANITIPQEKRRDEELIYHKVTAAELQTLAPAINWLPFLNTIFYPVEINESEPIVVYDKEYLEQISTLINTTDRCLLNNYMIWNLVRKTSSFLDQRFQDADEKFMEVMYGTKKTCLPRWKFCVSDTENNLGFALGPMFVKATFAEDSKSIATEIILEIKKAFEESLSTLKWMDEETRKSAKEKADAIYNMIGYPNFIMDPKELDKVFNDYTAVPDLYFENAMRFFNFSWRVTADQLRKAPNRDQYSGPRL

SEQ ID NO: 10278 - protein, 551 aa, Artificial Sequence
  Synthetic polypeptide
MPLQGLGLQRNPFLQGKRGPGLTSSPPLLPPSLQVNFHSPRSGQRCWAARTQVEKRLVVLVVLLAAGLVACLAALGIQYQTRSPSVCLSEACVSVTSSILSSMDPTVDPCHDFFSYACGGWIKANPVPDGHSRWGTFSNLWEHNQAIIKHLLENSTASVSEAERKAQVYYRACMNETRIEELRAKPLMELIERLGGWNITGPWAKDNFQDTLQVVTAHYRTSPFFSVYVSADSKNSNSNVIQVDQSGLGLPSRDYYLNKTENEKVLTGYLNYMVQLGKLLGGGDEEAIRPQMQQILDFETALANITIPQEKRRDEELIYHKVTAAELQTLAPAINWLPFLNTIFYPVEINESEPIVVYDKEYLEQISTLINTTDRCLLNNYMIWNLVRKTSSFLDQRFQDADEKFMEVMYGTKKTCLPRWKFCVSDTENNLGFALGPMFVKATFAEDSKSIATEIILEIKKAFEESLSTLKWMDEETRKSAKEKADAIYNMIGYPNFIMDPKELDKVFNDYTAVPDLYFENAMRFFNFSWRVTADQLRKAPNRDQYSGPRL

SEQ ID NO: 10279 - protein, 563 aa, Artificial Sequence
  Synthetic polypeptide
MRGVWPPPVSALLSALGMSTYKRATLDEEDLVDSLSEGDAYPNGLQVNFHSPRSGQRCWAARTQVEKRLVVLVVLLAAGLVACLAALGIQYQTRSPSVCLSEACVSVTSSILSSMDPTVDPCHDFFSYACGGWIKANPVPDGHSRWGTFSNLWEHNQAIIKHLLENSTASVSEAERKAQVYYRACMNETRIEELRAKPLMELIERLGGWNITGPWAKDNFQDTLQVVTAHYRTSPFFSVYVSADSKNSNSNVIQVDQSGLGLPSRDYYLNKTENEKVLTGYLNYMVQLGKLLGGGDEEAIRPQMQQILDFETALANITIPQEKRRDEELIYHKVTAAELQTLAPAINWLPFLNTIFYPVEINESEPIVVYDKEYLEQISTLINTTDRCLLNNYMIWNLVRKTSSFLDQRFQDADEKFMEVMYGTKKTCLPRWKFCVSDTENNLGFALGPMFVKATFAEDSKSIATEIILEIKKAFEESLSTLKWMDEETRKSAKEKADAIYNMIGYPNFIMDPKELDKVFNDYTAVPDLYFENAMRFFNFSWRVTADQLRKAPNRDQYSGPRL

SEQ ID NO: 10280 - protein, 1058 aa, Artificial Sequence
  Synthetic polypeptide
MNCPVLSLGSGFLFQVIEMLIFAYFASISLTESRGLFPRLENVGAFKKVSIVPTQAVCGLPDRSTFCHSSAAAESIQFCTQRFCIQDCPYRSSHPTYTALFSAGLSSCITPDKNDLHPNAHSNSASFIFGNHKSCFSSPPSPKLMASFTLAVWLKPEQQGVMCVIEKTVDGQIVFKLTISEKETMFYYRTVNGLQPPIKVMTLGRILVKKWIHLSVQVHQTKISFFINGVEKDHTPFNARTLSGSITDFASGTVQIGQSLNGLEQFVGRMQDFRLYQVALTNREILEVFSGDLLRLHAQSHCRCPGSHPRVHPLAQRYCIPNDAGDTADNRVSRLNPEAHPLSFVNDNDVGTSWVSNVFTNITQLNQGVTISVDLENGQYQVFYIIIQFFSPQPTEIRIQRKKENSLDWEDWQYFARNCGAFGMKNNGDLEKPDSVNCLQLSNFTPYSRGNVTFSILTPGPNYRPGYNNFYNTPSLQEFVKATQIRFHFHGQYYTTETAVNLRHRYYAVDEITISGRCQCHGHADNCDTTSQPYRCLCSQESFTEGLHCDRCLPLYNDKPFRQGDQVYAFNCKPCQCNSHSKSCHYNISVDPFPFEHFRGGGGVCDDCEHNTTGRNCELCKDYFFRQVGADPSAIDVCKPCDCDTVGTRNGSILCDQIGGQCNCKRHVSGRQCNQCQNGFYNLQELDPDGCSPCNCNTSGTVDGDITCHQNSGQCKCKANVIGLRCDHCNFGFKFLRSFNDVGCEPCQCNLHGSVNKFCNPHSGQCECKKEAKGLQCDTCRENFYGLDVTNCKACDCDTAGSLPGTVCNAKTGQCICKPNVEGRQCNKCLEGNFYLRQNNSFLCLPCNCDKTGTINGSLLCNKSTGQCPCKLGVTGLRCNQCEPHRYNLTIDNFQHCQMCECDSLGTLPGTICDPISGQCLCVPNRQGRRCNQCQPGFYISPGNATGCLPCSCHTTGAVNHICNSLTGQCVCQDASIAGQRCDQCKDHYFGFDPQTGRCQPCNCHLSGALNETCHLVTGQCFCKQFVTGSKCDACVPSASHLDVNNLLGCSKKPIRKA

SEQ ID NO: 10281 - protein, 735 aa, Artificial Sequence
  Synthetic polypeptide
MAGIAAKLAKDREAAEGLGSHDRAIKYLNQDYEALRNECLEAGTLFQDPSFPAIPSALGFKELGPYSSKTRGIEWKRPTEICADPQFIIGGATRTDICQGALGDCWLLAAIASLTLNEEILARVVPLNQSFQENYAGIFHFQFWQYGEWVEVVVDDRLPTKDGELLFVHSAEGSEFWSALLEKAYAKINGCYEALSGGATTEGFEDFTGGIAEWYELKKPPPNLFKIIQKALQKGSLLGCSIDITSAADSEAITFQKLVKGHAYSVTGAEEVESNGSLQKLIRIRNPWGEVEWTGRWNDNCPSWNTIDPEERERLTRRHEDGEFWMSFSDFLRHYSRLEICNLTPDTLTSDTYKKWKLTKMDGNWRRGSTAGGCRNYPNTFWMNPQYLIKLEEEDEDEEDGESGCTFLVGLIQKHRRRQRKMGEDMHTIGFGIYEVPEELSGQTNIHLSKNFFLTNRARERSDTFINLREVLNRFKLPPGEYILVPSTFEPNKDGDFCIRVFSEKKADYQAVDDEIEANLEEFDISEDDIDDGFRRLFAQLAGEDAEISAFELQTILRRVLAKRQDIKSDGFSIETCKIMVDMLDSDGSGKLGLKEFYILWTKIQKYQKIYREIDVDRSGTMNSYEMRKALEEAGFKMPCQLHQVIVARFADDQLIIDFDNFVRCLVRLETLFKIFKQLDPENTGTIELDLISLLGRLKRKDCLNPGGGGCGELRLHHCTPSSLGNKSKTASKKK

SEQ ID NO: 10282 - protein, 657 aa, Artificial Sequence
  Synthetic polypeptide
MEICADPQFIIGGATRTDICQGALGDCWLLAAIASLTLNEEILARVVPLNQSFQENYAGIFHFQFWQYGEWVEVVVDDRLPTKDGELLFVHSAEGSEFWSALLEKAYAKINGCYEALSGGATTEGFEDFTGGIAEWYELKKPPPNLFKIIQKALQKGSLLGCSIDITSAADSEAITFQKLVKGHAYSVTGAEEVESNGSLQKLIRIRNPWGEVEWTGRWNDNCPSWNTIDPEERERLTRRHEDGEFWMSFSDFLRHYSRLEICNLTPDTLTSDTYKKWKLTKMDGNWRRGSTAGGCRNYPNTFWMNPQYLIKLEEEDEDEEDGESGCTFLVGLIQKHRRRQRKMGEDMHTIGFGIYEVPEELSGQTNIHLSKNFFLTNRARERSDTFINLREVLNRFKLPPGEYILVPSTFEPNKDGDFCIRVFSEKKADYQAVDDEIEANLEEFDISEDDIDDGFRRLFAQLAGEDAEISAFELQTILRRVLAKRQDIKSDGFSIETCKIMVDMLDSDGSGKLGLKEFYILWTKIQKYQKIYREIDVDRSGTMNSYEMRKALEEAGFKMPCQLHQVIVARFADDQLIIDFDNFVRCLVRLETLFKIFKQLDPENTGTIELDLISLLGRLKRKDCLNPGGGGCGELRLHHCTPSSLGNKSKTASKKK

SEQ ID NO: 10283 - protein, 92 aa, Artificial Sequence
  Synthetic polypeptide
MAFTFAAFCYMLSLVLCAALIFFAIWHIIAFDELRTDFKSPIDQCNPVHARERLRNIERICFLLRKSLCYTWSFTLSLPSWMALHSPPSKCF

SEQ ID NO: 10284 - protein, 770 aa, Artificial Sequence
  Synthetic polypeptide
MMDSPFLELWQSKAVSIREQLGLGDRPNDSYCYNSAKNSTVLQGVTFGGIPTVLLIDVSCFLFLILVFSIIRRRFWDYGRIALVSEADSESRFQRLSSTSSSGQQDFENELGCCPWLTAIFRLHDDQILEWCGEDAIHYLSFQRHIIFLLVVVSFLSLCVILPVNLSGDLLDKDPYSFGRTTIANLQTDNDLLWLHTIFAVIYLFLTVGFMRHHTQSIKYKEENLVRRTLFITGLPRDARKETVESHFRDAYPTCEVVDVQLCYNVAKLIYLCKEKKKTEKSLTYYTNLQVKTGQRTLINPKPCGQFCCCEVLGCEWEDAISYYTRMKDRLLERITEEERHVQDQPLGMAFVTFQEKSMATYILKDFNACKCQSLQCKGEPQPSSHSRELYTSKWTVTFAADPEDICWKNLSIQGLRWWLQWLGINFTLFLGLFFLTTPSIILSTMDKFNVTKPIHALNNPIISQFFPTLLLWSFSALLPSIVYYSTLLESHWTKSGENQIMMTKVYIFLIFMVLILPSLGLTSLDFFFRWLFDKTSSEASIRLECVFLPDQGAFFVNYVIASAFIGNGMELLRLPGLILYTFRMIMAKTAADRRNVKQNQAFQYEFGAMYAWMLCVFTVIVAYSITCPIIAPFGLIYILLKHMVDRHNLYFVYLPAKLEKGIHFAAVNQALAAPILCLFWLYFFSFLRLGMKAPATLFTFLVLLLTILVCLAHTCFGCFKHLSPLNYKTEEPASDKGSEAEAHMPPPFTDLNRHNQNHLSQKSERGTWE

SEQ ID NO: 10285 - protein, 752 aa, Artificial Sequence
  Synthetic polypeptide
MMDSPFLELWQSKAVSIREQLGLGDRPNDSYCYNSAKNSTVLQGVTFGGIPTVLLIDVSCFLFLILVFSIIRRRFWDYGRIALVSEADSESRFQRLSSTSSSGQQDFENELGCCPWLTAIFRLHDDQILEWCGEDAIHYLSFQRHIIFLLVVVSFLSLCVILPVNLSGDLLDKDPYSFGRTTIANLQTDNDLLWLHTIFAVIYLFLTVGFMRHHTQSIKYKEENLVRRTLFITGLPRDARKETVESHFRDAYPTCEVVDVQLCYNVAKLIYLCKEKKKTEKSLTYYTNLQVKTGQRTLINPKPCGQFCCCEVLGCEWEDAISYYTRMKDRLLERITEEERHVQDQPLGMAFVTFQEKSMATYILKDFNACKCQSLQCKGEPQPSSHSRELYTSKWTVTFAADPEDICWKNLSIQGLRWWLQWLGINFTLFLGLFFLTTPSIILSTMDKFNVTKPIHALNNPIISQFFPTLLLWSFSALLPSIVYYSTLLESHWTKSGENQIMMTKVYIFLIFMVLILPSLGLTSLDFFFRWLFDKTSSEASIRLECVFLPDQGAFFVNYVIASAFIGNGMELLRLPGLILYTFRMIMAKTAADRRNVKQNQAFQYEFGAMYAWMLCVFTVIVAYSITCPIIAPFGLIYILLKHMVDRHNLYFVYLPAKLEKGIHFAAVNQALAAPILCLFWLYFFSFLRLGMKAPATLFTFLVLLLTILVCLAHTCFGCFKHLSPLNYKTEEPASDKGSEAEAHMPPPFTEI

SEQ ID NO: 10286 - protein, 6188 aa, Artificial Sequence
  Synthetic polypeptide
MDQPQFSGAPRFLTRPKAFVVSVGKDATLSCQIVGNPTPQVSWEKDQQPVAAGARFRLAQDGDLYRLTILDLALGDSGQYVCRARNAIGEAFAAVGLQVDAEAACAEQAPHFLLRPTSIRVREGSEATFRCRVGGSPRPAVSWSKDGRRLGEPDGPRVRVEELGEASALRIRAARPRDGGTYEVRAENPLGAASAAAALVVDSDAADTASRPGTSTAALLAHLQRRREAMRAEGAPASPPSTGTRTCTVTEGKHARLSCYVTGEPKPETVWKKDGQLVTEGRRHVVYEDAQENFVLKILFCKQSDRGLYTCTASNLVGQTYSSVLVVVREPAVPFKKRLQDLEVREKESATFLCEVPQPSTEAAWFKEETRLWASAKYGIEEEGTERRLTVRNVSADDDAVYICETPEGSRTVAELAVQGNLLRKLPRKTAVRVGDTAMFCVELAVPVGPVHWLRNQEEVVAGGRVAISAEGTRHTLTISQCCLEDVGQVAFMAGDCQTSTQFCVSAPRKPPLQPPVDPVVKARMESSVILSWSPPPHGERPVTIDGYLVEKKKLGTYTWIRCHEAEWVATPELTVADVAEEGNFQFRVSALNSFGQSPYLEFPGTVHLAPKLAVRTPLKAVQAVEGGEVTFSVDLTVASAGEWFLDGQALKASSVYEIHCDRTRHTLTIREVPASLHGAQLKFVANGIESSIRMEVRAAPGLTANKPPAAAAREVLARLHEEAQLLAELSDQAAAVTWLKDGRTLSPGPKYEVQASAGRRVLLVRDVARDDAGLYECVSRGGRIAYQLSVQGLARFLHKDMAGSCVDAVAGGPAQFECETSEAHVHVHWYKDGMELGHSGERFLQEDVGTRHRLVAATVTRQDEGTYSCRVGEDSVDFRLRVSEPKAVFAKEQPACREVQAEVGASATLSCEVAQDQMEVTWYKDGKKLSSSSKVHVEAVGCMRRLVVQQVGQADSGEYSCEARGQRVSFRLDVAEPKVVFAKEQLARRKLQAEAGASATLSCEVAQAQTEVTWYKDGKKLSSSSKVCMEATGCTRRLVVQQAGQADAGEYSCEAGGQRLSFHLDVKEPKVVFAKDQVAHSEVQAEAGASATLSCEVAQAQTEVMWYKDGKKLSSSLKVHVEAKGCRRRLVVQQAGKTDAGDYSCEARGQRVSFRLHITEPKMMFAKEQSVHNEVQAEAGASAMLSCEVAQAQTEVTWYKDGKKLSSSSKVGMEVKGCTRRLVLPQAGKADAGEYSCEAGGQRVSFHLHITEPKGVFAKEQSVHNEVQAEAGTTAMLSCEVAQPQTEVTWYKDGKKLSSSSKVRMEVKGCTRRLVVQQVGKADAGEYSCEAGGQRVSFQLHITEPKAVFAKEQLVHNEVRTEAGASATLSCEVAQAQTEVTWYKDGKKLSSSSKVRIEAAGCMRQLVVQQAGQADAGEYTCEAGGQRLSFHLDVSEPKAVFAKEQLAHRKVQAEAGAIATLSCEVAQAQTEVTWYKDGKKLSSSSKVRMEAVGCTRRLVVQQACQADTGEYSCEAGGQRLSFSLDVAEPKVVFAKEQPVHREVQAQAGASTTLSCEVAQAQTEVMWYKDGKKLSFSSKVRMEAVGCTRRLVVQQAGQAVAGEYSCEAGSQRLSFHLHVAEPKAVFAKEQPAHREVQAEAGASATLSCEVAQAQTEVTWYKDGKKLSSSLKVHVEAAGCTRRLVVQQAGQADTGEYSCEAGGQQLSFRLQVAEPKAVFAKEQPASREVQAEAGTSATLSCEVAQAQTEVTWYKDGKKLSSSSKVRMEAVGCTRRLVVQEAGQADAGEYSCKAGDQRLSFHLHVAEPKVVFAKEQPAHREVQAEAGASATLSCEVAQAQTEVTWYKDGKKLSSSSKVRVEAVGCTRRLVVQQAGQAEAGEYSCEAGGQQLSFRLQVAEPKAVFAKEQVVFAKDQPVHREVQAEAGTSTMLSCEVAQAQTEVMWYKDGKKLSSSSKMRVEAVGCTRRLVVQEAGQADAGEYSCEAGGQRLSFHLHVAEPKVVFAKEQPACREVQAEAGASATLSCEVAQGQMEVTWYKDGKKLSSSSKVHMEASGYTRRLVVQQAGQADAGEYSCEAGGQRLSFRLHVAELEPQISERPCRREPLVVKEHEDIILTATLATPSAATVTWLKDGVEIRRSKRHETASQGDTHTLTVHGAQVLDSAIYSCRVGAEGQDFPVQVEEVAAKFCRLLEPVCGELGGTVTLACELSPACAEVVWRCGNTQLRVGKRFQMVAEGPVRSLTVLGLRAEDAGEYVCESRDDHTSAQLTVSVPRVVKFMSGLSTVVAEEGGEATFQCVVSPSDVAVVWFRDGALLQPSEKFAISQSGASHSLTISDLVLEDAGQITVEAEGASSSAALRVREAPVLFKKKLEPQTVEERSSVTLEVELTRPWPELRWTRNATALAPGKNVEIHAEGARHRLVLHNVGFADRGFFGCETPDDKTQAKLTVEMRQVRLVRGLQAVEAREQGTATMEVQLSHADVDGSWTRDGLRFQQGPTCHLAVRGPMHTLTLSGLRPEDSGLMVFKAEGVHTSARLVVTELPVSFSRPLQDVVTTEKEKVTLECELSRPNVDVRWLKDGVELRAGKTMAIAAQGACRSLTIYRCEFADQGVYVCDAHDAQSSASVKVQGRNIQIVRPLEDVEVMEKDGATFSCEVSHDEVPGQWFWEGSKLRPTDNVRIRQEGRTYTLIYRRVLAEDAGEIQFVAENAESRAQLRVKELPVTLVRPLRDKIAMEKHRGVLECQVSRASAQVRWFKGSQELQPGPKYELVSDGLYRKLIISDVHAEDEDTYTCDAGDVKTSAQFFVEEQSITIVRGLQDVTVMEPAPAWFECETSIPSVRPPKWLLGKTVLQAGGNVGLEQEGTVHRLMLRRTCSTMTGPVHFTVGKSRSSARLVVSDIPVVLTRPLEPKTGRELQSVVLSCDFRPAPKAVQWYKDDTPLSPSEKFKMSLEGQMAELRILRLMPADAGVYRCQAGSAHSSTEVTVEAREVTVTGPLQDAEATEEGWASFSCELSHEDEEVEWSLNGMPLYNDSFHEISHKGRRHTLVLKSIQRADAGIVRASSLKVSTSARLEVRVKPVVFLKALDDLSAEERGTLALQCEVSDPEAHVVWRKDGVQLGPSDKYDFLHTAGTRGLVVHDVSPEDAGLYTCHVGSEETRARVRVHDLHVGITKRLKTMEVLEGESCSFECVLSHESASDPAMWTVGGKTVGSSSRFQATRQGRKYILVVREAAPSDAGEVVFSVRGLTSKASLIVRERPAAIIKPLEDQWVAPGEDVELRCELSRAGTPVHWLKDRKAIRKSQKYDVVCEGTMAMLVIRGASLKDAGEYTCEVEASKSTASLHVEEKANCFTEELTNLQVEEKGTAVFTCKTEHPAATVTWRKGLLELRASGKHQPSQEGLTLRLTISALEKADSDTYTCDIGQAQSRAQLLVQGRRVHIIEDLEDVDVQEGSSATFRCRISPANYEPVHWFLDKTPLHANELNEIDAQPGGYHVLTLRQLALKDSGTIYFEAGDQRASAALRVTEKPSVFSRELTDATITEGEDLTLVCETSTCDIPVCWTKDGKTLRGSARCQLSHEGHRAQLLITGATLQDSGRYKCEAGGACSSSIVRVHARPVRFQEALKDLEVLEGGAATLRCVLSSVAAPVKWCYGNNVLRPGDKYSLRQEGAMLELVVRNLRPQDSGRYSCSFGDQTTSATLTVTALPAQFIGKLRNKEATEGATATLRCELSKAAPVEWRKGSETLRDGDRYCLRQDGAMCELQIRGLAMVDAAEYSCVCGEERTSASLTIRPMPAHFIGRLRHQESIEGATATLRCELSKAAPVEWRKGRESLRDGDRHSLRQDGAVCELQICGLAVADAGEYSCVCGEERTSATLTVKALPAKFTEGLRNEEAVEGATAMLWCELSKVAPVEWRKGPENLRDGDRYILRQEGTRCELQICGLAMADAGEYLCVCGQERTSATLTIRALPARFIEDVKNQEAREGATAVLQCELNSAAPVEWRKGSETLRDGDRYSLRQDGTKCELQIRGLAMADTGEYSCVCGQERTSAMLTVRALPIKFTEGLRNEEATEGATAVLRCELSKMAPVEWWKGHETLRDGDRHSLRQDGARCELQIRGLVAEDAGEYLCMCGKERTSAMLTVRAMPSKFIEGLRNEEATEGDTATLWCELSKAAPVEWRKGHETLRDGDRHSLRQDGSRCELQIRGLAVVDAGEYSCVCGQERTSATLTVRALPARFIEDVKNQEAREGATAVLQCELSKAAPVEWRKGSETLRGGDRYSLRQDGTRCELQIHGLSVADTGEYSCVCGQERTSATLTVRALPARFTQDLKTKEASEGATATLQCELSKVAPVEWKKGPETLRDGGRYSLKQDGTRCELQIHDLSVADAGEYSCMCGQERTSATLTVRALPARFTEGLRNEEAMEGATATLQCELSKAAPVEWRKGLEALRDGDKYSLRQDGAVCELQIHGLAMADNGVYSCVCGQERTSATLTVRALPARFIEDMRNQKATEGATVTLQCKLRKAAPVEWRKGPNTLKDGDRYSLKQDGTSCELQIRGLVIADAGEYSCICEQERTSATLTVRALPARFIEDVRNHEATEGATAVLQCELSKAAPVEWRKGSETLRDGDRYSLRQDGTRCELQIRGLAVEDTGEYLCVCGQERTSATLTVRALPARFIDNMTNQEAREGATATLHCELSKVAPVEWRKGPETLRDGDRHSLRQDGTRCELQIRGLSVADAGEYSCVCGQERTSATLTIRALPAKFTKGLRNEEATEGATAMLQCELSKVAPVEWRKGPETLRDGDRYNLRQDGTRCELQIHGLSVADTGEYSCVCGQEKTSATLTVKAPQPVFREPLQSLQAEEGSTATLQCELSEPTATVVWSKGGLQLQANGRREPRLQGCTAELVLQDLQREDTGEYTCTCGSQATSATLTVTAAPVRFLRELQHQEVDEGGTAHLCCELSRAGASVEWRKGSLQLFPCAKYQMVQDGAAAELLVRGVEQEDAGDYTCDTGHTQSMASLSVRVPRPKFKTRLQSLEQETGDIARLCCQLSDAESGAVVQWLKEGVELHAGPKYEMRSQGATRELLIHQLEAKDTGEYACVTGGQKTAASLRVTEPEVTIVRGLVDAEVTADEDVEFSCEVSRAGATGVQWCLQGLPLQSNEVTEVAVRDGRIHTLRLKGVTPEDAGTVSFHLGNHASSAQLTVRAPEVTILEPLQDVQLSEGQDASFQCRLSRASGQEARWALGGVPLQANEMNDITVEQGTLHLLTLHKVTLEDAGTVSFHVGTCSSEAQLKVTAKNTVVRGLENVEALEGGEALFECQLSQPEVAAHTWLLDDEPVHTSENAEVVFFENGLRHLLLLKNLRPQDSCRVTFLAGDMVTSAFLTVRGWRLEILEPLKNAAVRAGAQACFTCTLSEAVPVGEASWYINGAAVQPDDSDWTVTADGSHHALLLRSAQPHHAGEVTFACRDAVASARLTVLGLPDPPEDAEVVARSSHTVTLSWAAPMSDGGGGLCGYRVEVKEGATGQWRLCHELVPGPECVVDGLAPGETYRFRVAAVGPVGAGEPVHLPQTVRLAEPPKPVPPQPSAPESRQVAAGEDVSLELEVVAEAGEVIWHKGMERIQPGGRFEVVSQGRQQMLVIKGFTAEDQGEYHCGLAQGSICPAAATFQVALSPASVDEAPQPSLPPEAAQEGDLHLLWEALARKRRMSREPTLDSISELPEEDGRSQRLPQEAEEVAPDLSEGYSTADELARTGDADLSHTSSDDESRAGTPSLVTYLKKAGRPGTSPLASKVGAPAAPSVKPQQQQEPLAAVRPPLGDLSTKDLGDPSMDKAAVKIQAAFKGYKVRKEMKQQEGPMFSHTFGDTEAQVGDALRLECVVASKADVRARWLKDGVELTDGRHHHIDQLGDGTCSLLITGLDRADAGCYTCQVSNKFGQVTHSACVVVSGSESEAESSSGGELDDAFRRAARRLHRLFRTKSPAEVSDEELFLSADEGPAEPEEPADWQTYREDEHFICIRFEALTEARQAVTRFQEMFATLGIGVEIKLVEQGPRRVEMCISKETPAPVVPPEPLPSLLTSDAAPVFLTELQNQEVQDGYPVSFDCVVTGQPMPSVRWFKDGKLLEEDDHYMINEDQQGGHQLIITAVVPADMGVYRCLAENSMGVSSTKAELRVDFPDTELLNPLEFPG

SEQ ID NO: 10287 - protein, 5231 aa, Artificial Sequence
  Synthetic polypeptide
MDQPQFSGAPRFLTRPKAFVVSVGKDATLSCQIVGNPTPQVSWEKDQQPVAAGARFRLAQDGDLYRLTILDLALGDSGQYVCRARNAIGEAFAAVGLQVDAEAACAEQAPHFLLRPTSIRVREGSEATFRCRVGGSPRPAVSWSKDGRRLGEPDGPRVRVEELGEASALRIRAARPRDGGTYEVRAENPLGAASAAAALVVDSDAADTASRPGTSTAALLAHLQRRREAMRAEGAPASPPSTGTRTCTVTEGKHARLSCYVTGEPKPETVWKKDGQLVTEGRRHVVYEDAQENFVLKILFCKQSDRGLYTCTASNLVGQTYSSVLVVVREPAVPFKKRLQDLEVREKESATFLCEVPQPSTEAAWFKEETRLWASAKYGIEEEGTERRLTVRNVSADDDAVYICETPEGSRTVAELAVQGNLLRKLPRKTAVRVGDTAMFCVELAVPVGPVHWLRNQEEVVAGGRVAISAEGTRHTLTISQCCLEDVGQVAFMAGDCQTSTQFCVSAPRKPPLQPPVDPVVKARMESSVILSWSPPPHGERPVTIDGYLVEKKKLGTYTWIRCHEAEWVATPELTVADVAEEGNFQFRVSALNSFGQSPYLEFPGTVHLAPKLAVRTPLKAVQAVEGGEVTFSVDLTVASAGEWFLDGQALKASSVYEIHCDRTRHTLTIREVPASLHGAQLKFVANGIESSIRMEVRAAPGLTANKPPAAAAREVLARLHEEAQLLAELSDQAAAVTWLKDGRTLSPGPKYEVQASAGRRVLLVRDVARDDAGLYECVSRGGRIAYQLSVQGLARFLHKDMAGSCVDAVAGGPAQFECETSEAHVHVHWYKDGMELGHSGERFLQEDVGTRHRLVAATVTRQDEGTYSCRVGEDSVDFRLRVSEPKVVFAKEQLARRKLQAEAGASATLSCEVAQAQTEVTWYKDGKKLSSSSKVCMEATGCTRRLVVQQAGQADAGEYSCEAGGQRLSFHLDVKEPKVVFAKDQVAHSEVQAEAGASATLSCEVAQAQTEVMWYKDGKKLSSSLKVHVEAKGCRRRLVVQQAGKTDAGDYSCEARGQRVSFRLHITEPKMMFAKEQSVHNEVQAEAGASAMLSCEVAQAQTEVTWYKDGKKLSSSSKVGMEVKGCTRRLVLPQAGKADAGEYSCEAGGQRVSFHLHITEPKGVFAKEQSVHNEVQAEAGTTAMLSCEVAQPQTEVTWYKDGKKLSSSSKVRMEVKGCTRRLVVQQVGKADAGEYSCEAGGQRVSFQLHITEPKAVFAKEQLVHNEVRTEAGASATLSCEVAQAQTEVTWYKDGKKLSSSSKVRIEAAGCMRQLVVQQAGQADAGEYTCEAGGQRLSFHLDVSEPKAVFAKEQLAHRKVQAEAGAIATLSCEVAQAQTEVTWYKDGKKLSSSSKVRMEAVGCTRRLVVQQACQADTGEYSCEAGGQRLSFSLDVAEPKVVFAKEQPVHREVQAQAGASTTLSCEVAQAQTEVMWYKDGKKLSFSSKVRMEAVGCTRRLVVQQAGQAVAGEYSCEAGSQRLSFHLHVAEPKAVFAKEQPASREVQAEAGTSATLSCEVAQAQTEVTWYKDGKKLSSSSKVRMEAVGCTRRLVVQEAGQADAGEYSCKAGDQRLSFHLHVAEPKVVFAKEQPAHREVQAEAGASATLSCEVAQAQTEVTWYKDGKKLSSSSKVRVEAVGCTRRLVVQQAGQAEAGEYSCEAGGQQLSFRLQVAELEPQISERPCRREPLVVKEHEDIILTATLATPSAATVTWLKDGVEIRRSKRHETASQGDTHTLTVHGAQVLDSAIYSCRVGAEGQDFPVQVEEVAAKFCRLLEPVCGELGGTVTLACELSPACAEVVWRCGNTQLRVGKRFQMVAEGPVRSLTVLGLRAEDAGEYVCESRDDHTSAQLTVSVPRVVKFMSGLSTVVAEEGGEATFQCVVSPSDVAVVWFRDGALLQPSEKFAISQSGASHSLTISDLVLEDAGQITVEAEGASSSAALRVREAPVLFKKKLEPQTVEERSSVTLEVELTRPWPELRWTRNATALAPGKNVEIHAEGARHRLVLHNVGFADRGFFGCETPDDKTQAKLTVEMRQVRLVRGLQAVEAREQGTATMEVQLSHADVDGSWTRDGLRFQQGPTCHLAVRGPMHTLTLSGLRPEDSGLMVFKAEGVHTSARLVVTELPVSFSRPLQDVVTTEKEKVTLECELSRPNVDVRWLKDGVELRAGKTMAIAAQGACRSLTIYRCEFADQGVYVCDAHDAQSSASVKVQGRTYTLIYRRVLAEDAGEIQFVAENAESRAQLRVKELPVTLVRPLRDKIAMEKHRGVLECQVSRASAQVRWFKGSQELQPGPKYELVSDGLYRKLIISDVHAEDEDTYTCDAGDVKTSAQFFVEEQSITIVRGLQDVTVMEPAPAWFECETSIPSVRPPKWLLGKTVLQAGGNVGLEQEGTVHRLMLRRTCSTMTGPVHFTVGKSRSSARLVVSDIPVVLTRPLEPKTGRELQSVVLSCDFRPAPKAVQWYKDDTPLSPSEKFKMSLEGQMAELRILRLMPADAGVYRCQAGSAHSSTEVTVEAREVTVTGPLQDAEATEEGWASFSCELSHEDEEVEWSLNGMPLYNDSFHEISHKGRRHTLVLKSIQRADAGIVRASSLKVSTSARLEVRVKPVVFLKALDDLSAEERGTLALQCEVSDPEAHVVWRKDGVQLGPSDKYDFLHTAGTRGLVVHDVSPEDAGLYTCHVGSEETRARVRVHDLHVGITKRLKTMEVLEGESCSFECVLSHESASDPAMWTVGGKTVGSSSRFQATRQGRKYILVVREAAPSDAGEVVFSVRGLTSKASLIVRERPAAIIKPLEDQWVAPGEDVELRCELSRAGTPVHWLKDRKAIRKSQKYDVVCEGTMAMLVIRGASLKDAGEYTCEVEASKSTASLHVEEKANCFTEELTNLQVEEKGTAVFTCKTEHPAATVTWRKGLLELRASGKHQPSQEGLTLRLTISALEKADSDTYTCDIGQAQSRAQLLVQGRRVHIIEDLEDVDVQEGSSATFRCRISPANYEPVHWFLDKTPLHANELNEIDAQPGGYHVLTLRQLALKDSGTIYFEAGDQRASAALRVTEKPSVFSRELTDATITEGEDLTLVCETSTCDIPVCWTKDGKTLRGSARCQLSHEGHRAQLLITGATLQDSGRYKCEAGGACSSSIVRVHARPVRFQEALKDLEVLEGGAATLRCVLSSVAAPVKWCYGNNVLRPGDKYSLRQEGAMLELVVRNLRPQDSGRYSCSFGDQTTSATLTVTALPAQFIGKLRNKEATEGATATLRCELSKAAPVEWRKGSETLRDGDRYCLRQDGAMCELQIRGLAMVDAAEYSCVCGEERTSASLTIRPMPAHFIGRLRHQESIEGATATLRCELSKAAPVEWRKGRESLRDGDRHSLRQDGAVCELQICGLAVADAGEYSCVCGEERTSATLTVKALPAKFTEGLRNEEAVEGATAMLWCELSKVAPVEWRKGPENLRDGDRYILRQEGTRCELQICGLAMADAGEYLCVCGQERTSATLTIRALPARFIEDVKNQEAREGATAVLQCELNSAAPVEWRKGSETLRDGDRYSLRQDGTKCELQIRGLAMADTGEYSCVCGQERTSAMLTVRALPIKFTEGLRNEEATEGATAVLRCELSKMAPVEWWKGHETLRDGDRHSLRQDGARCELQIRGLVAEDAGEYLCMCGKERTSAMLTVRAMPSKFIEGLRNEEATEGDTATLWCELSKAAPVEWRKGHETLRDGDRHSLRQDGSRCELQIRGLAVVDAGEYSCVCGQERTSATLTVRALPARFIEDVKNQEAREGATAVLQCELSKAAPVEWRKGSETLRGGDRYSLRQDGTRCELQIHGLSVADTGEYSCVCGQERTSATLTVRAPQPVFREPLQSLQAEEGSTATLQCELSEPTATVVWSKGGLQLQANGRREPRLQGCTAELVLQDLQREDTGEYTCTCGSQATSATLTVTAAPVRFLRELQHQEVDEGGTAHLCCELSRAGASVEWRKGSLQLFPCAKYQMVQDGAAAELLVRGVEQEDAGDYTCDTGHTQSMASLSVRVPRPKFKTRLQSLEQETGDIARLCCQLSDAESGAVVQWLKEGVELHAGPKYEMRSQGATRELLIHQLEAKDTGEYACVTGGQKTAASLRVTEPEVTIVRGLVDAEVTADEDVEFSCEVSRAGATGVQWCLQGLPLQSNEVTEVAVRDGRIHTLRLKGVTPEDAGTVSFHLGNHASSAQLTVRAPEVTILEPLQDVQLSEGQDASFQCRLSRASGQEARWALGGVPLQANEMNDITVEQGTLHLLTLHKVTLEDAGTVSFHVGTCSSEAQLKVTAKNTVVRGLENVEALEGGEALFECQLSQPEVAAHTWLLDDEPVHTSENAEVVFFENGLRHLLLLKNLRPQDSCRVTFLAGDMVTSAFLTVRGWRLEILEPLKNAAVRAGAQACFTCTLSEAVPVGEASWYINGAAVQPDDSDWTVTADGSHHALLLRSAQPHHAGEVTFACRDAVASARLTVLGLPDPPEDAEVVARSSHTVTLSWAAPMSDGGGGLCGYRVEVKEGATGQWRLCHELVPGPECVVDGLAPGETYRFRVAAVGPVGAGEPVHLPQTVRLAEPPKPVPPQPSAPESRQVAAGEDVSLELEVVAEAGEVIWHKGMERIQPGGRFEVVSQGRQQMLVIKGFTAEDQGEYHCGLAQGSICPAAATFQVALSPASVDEAPQPSLPPEAAQEGDLHLLWEALARKRRMSREPTLDSISELPEEDGRSQRLPQEAEEVAPDLSEGYSTADELARTGDADLSHTSSDDESRAGTPSLVTYLKKAGRPGTSPLASKVGAPAAPSVKPQQQQEPLAAVRPPLGDLSTKDLGDPSMDKAAVKIQAAFKGYKVRKEMKQQEGPMFSHTFGDTEAQVGDALRLECVVASKADVRARWLKDGVELTDGRHHHIDQLGDGTCSLLITGLDRADAGCYTCQVSNKFGQVTHSACVVVSGSESEAESSSGGELDDAFRRAARRLHRLFRTKSPAEVSDEELFLSADEGPAEPEEPADWQTYREDEHFICIRFEALTEARQAVTRFQEMFATLGIGVEIKLVEQGPRRVEMCISKETPAPVVPPEPLPSLLTSDAAPVFLTELQNQEVQDGYPVSFDCVVTGQPMPSVRWFKDGKLLEEDDHYMINEDQQGGHQLIITAVVPADMGVYRCLAENSMGVSSTKAELRVDFPDTELLNPLEFPG

SEQ ID NO: 10288 - protein, 2865 aa, Artificial Sequence
  Synthetic polypeptide
MLVIRGASLKDAGEYTCEVEASKSTASLHVEEKANCFTEELTNLQVEEKGTAVFTCKTEHPAATVTWRKGLLELRASGKHQPSQEGLTLRLTISALEKADSDTYTCDIGQAQSRAQLLVQGRRVHIIEDLEDVDVQEGSSATFRCRISPANYEPVHWFLDKTPLHANELNEIDAQPGGYHVLTLRQLALKDSGTIYFEAGDQRASAALRVTEKPSVFSRELTDATITEGEDLTLVCETSTCDIPVCWTKDGKTLRGSARCQLSHEGHRAQLLITGATLQDSGRYKCEAGGACSSSIVRVHARPVRFQEALKDLEVLEGGAATLRCVLSSVAAPVKWCYGNNVLRPGDKYSLRQEGAMLELVVRNLRPQDSGRYSCSFGDQTTSATLTVTALPAQFIGKLRNKEATEGATATLRCELSKAAPVEWRKGSETLRDGDRYCLRQDGAMCELQIRGLAMVDAAEYSCVCGEERTSASLTIRPMPAHFIGRLRHQESIEGATATLRCELSKAAPVEWRKGRESLRDGDRHSLRQDGAVCELQICGLAVADAGEYSCVCGEERTSATLTVKALPAKFTEGLRNEEAVEGATAMLWCELSKVAPVEWRKGPENLRDGDRYILRQEGTRCELQICGLAMADAGEYLCVCGQERTSATLTIRALPARFIEDVKNQEAREGATAVLQCELNSAAPVEWRKGSETLRDGDRYSLRQDGTKCELQIRGLAMADTGEYSCVCGQERTSAMLTVRALPIKFTEGLRNEEATEGATAVLRCELSKMAPVEWWKGHETLRDGDRHSLRQDGARCELQIRGLVAEDAGEYLCMCGKERTSAMLTVRAMPSKFIEGLRNEEATEGDTATLWCELSKAAPVEWRKGHETLRDGDRHSLRQDGSRCELQIRGLAVVDAGEYSCVCGQERTSATLTVRALPARFIEDVKNQEAREGATAVLQCELSKAAPVEWRKGSETLRGGDRYSLRQDGTRCELQIHGLSVADTGEYSCVCGQERTSATLTVRALPARFTQDLKTKEASEGATATLQCELSKVAPVEWKKGPETLRDGGRYSLKQDGTRCELQIHDLSVADAGEYSCMCGQERTSATLTVRALPARFTEGLRNEEAMEGATATLQCELSKAAPVEWRKGLEALRDGDKYSLRQDGAVCELQIHGLAMADNGVYSCVCGQERTSATLTVRALPARFIEDMRNQKATEGATVTLQCKLRKAAPVEWRKGPNTLKDGDRYSLKQDGTSCELQIRGLVIADAGEYSCICEQERTSATLTVRALPARFIEDVRNHEATEGATAVLQCELSKAAPVEWRKGSETLRDGDRYSLRQDGTRCELQIRGLAVEDTGEYLCVCGQERTSATLTVRALPARFIDNMTNQEAREGATATLHCELSKVAPVEWRKGPETLRDGDRHSLRQDGTRCELQIRGLSVADAGEYSCVCGQERTSATLTIREATEGATAMLQCELSKVAPVEWRKGPETLRDGDRYNLRQDGTRCELQIHGLSVADTGEYSCVCGQEKTSATLTVKAPQPVFREPLQSLQAEEGSTATLQCELSEPTATVVWSKGGLQLQANGRREPRLQGCTAELVLQDLQREDTGEYTCTCGSQATSATLTVTAAPVRFLRELQHQEVDEGGTAHLCCELSRAGASVEWRKGSLQLFPCAKYQMVQDGAAAELLVRGVEQEDAGDYTCDTGHTQSMASLSVRVPRPKFKTRLQSLEQETGDIARLCCQLSDAESGAVVQWLKEGVELHAGPKYEMRSQGATRELLIHQLEAKDTGEYACVTGGQKTAASLRVTEPEVTIVRGLVDAEVTADEDVEFSCEVSRAGATGVQWCLQGLPLQSNEVTEVAVRDGRIHTLRLKGVTPEDAGTVSFHLGNHASSAQLTVRAPEVTILEPLQDVQLSEGQDASFQCRLSRASGQEARWALGGVPLQANEMNDITVEQGTLHLLTLHKVTLEDAGTVSFHVGTCSSEAQLKVTAKNTVVRGLENVEALEGGEALFECQLSQPEVAAHTWLLDDEPVHTSENAEVVFFENGLRHLLLLKNLRPQDSCRVTFLAGDMVTSAFLTVRGWRLEILEPLKNAAVRAGAQACFTCTLSEAVPVGEASWYINGAAVQPDDSDWTVTADGSHHALLLRSAQPHHAGEVTFACRDAVASARLTVLGLPDPPEDAEVVARSSHTVTLSWAAPMSDGGGGLCGYRVEVKEGATGQWRLCHELVPGPECVVDGLAPGETYRFRVAAVGPVGAGEPVHLPQTVRLAEPPKPVPPQPSAPESRQVAAGEDVSLELEVVAEAGEVIWHKGMERIQPGGRFEVVSQGRQQMLVIKGFTAEDQGEYHCGLAQGSICPAAATFQVALSPASVDEAPQPSLPPEAAQEGDLHLLWEALARKRRMSREPTLDSISELPEEDGRSQRLPQEAEEVAPDLSEGYSTADELARTGDADLSHTSSDDESRAGTPSLVTYLKKAGRPGTSPLASKVGAPAAPSVKPQQQQEPLAAVRPPLGDLSTKDLGDPSMDKAAVKIQAAFKGYKVRKEMKQQEGPMFSHTFGDTEAQVGDALRLECVVASKADVRARWLKDGVELTDGRHHHIDQLGDGTCSLLITGLDRADAGCYTCQVSNKFGQVTHSACVVVSGSESEAESSSGGELDDAFRRAARRLHRLFRTKSPAEVSDEELFLSADEGPAEPEEPADWQTYREDEHFICIRFEALTEARQAVTRFQEMFATLGIGVEIKLVEQGPRRVEMCISKETPAPVVPPEPLPSLLTSDAAPVFLTELQNQEVQDGYPVSFDCVVTGQPMPSVRWFKDGKLLEEDDHYMINEDQQGGHQLIITAVVPADMGVYRCLAENSMGVSSTKAELRVDFPDTELLNPLEFPG

SEQ ID NO: 10289 - protein, 2350 aa, Artificial Sequence
  Synthetic polypeptide
MLVIRGASLKDAGEYTCEVEASKSTASLHVEEKANCFTEELTNLQVEEKGTAVFTCKTEHPAATVTWRKGLLELRASGKHQPSQEGLTLRLTISALEKADSDTYTCDIGQAQSRAQLLVQGRRVHIIEDLEDVDVQEGSSATFRCRISPANYEPVHWFLDKTPLHANELNEIDAQPGGYHVLTLRQLALKDSGTIYFEAGDQRASAALRVTEKPSVFSRELTDATITEGEDLTLVCETSTCDIPVCWTKDGKTLRGSARCQLSHEGHRAQLLITGATLQDSGRYKCEAGGACSSSIVRVHARPVRFQEALKDLEVLEGGAATLRCVLSSVAAPVKWCYGNNVLRPGDKYSLRQEGAMLELVVRNLRPQDSGRYSCSFGDQTTSATLTVTALPAQFIGKLRNKEATEGATATLRCELSKAAPVEWRKGSETLRDGDRYCLRQDGAMCELQIRGLAMVDAAEYSCVCGEERTSASLTIRPMPAHFIGRLRHQESIEGATATLRCELSKAAPVEWRKGRESLRDGDRHSLRQDGAVCELQICGLAVADAGEYSCVCGEERTSATLTVKALPAKFTEGLRNEEAVEGATAMLWCELSKVAPVEWRKGPENLRDGDRYILRQEGTRCELQICGLAMADAGEYLCVCGQERTSATLTIRALPARFIEDVKNQEAREGATAVLQCELNSAAPVEWRKGSETLRDGDRYSLRQDGTKCELQIRGLAMADTGEYSCVCGQERTSAMLTVRALPIKFTEGLRNEEATEGATAVLRCELSKMAPVEWWKGHETLRDGDRHSLRQDGARCELQIRGLVAEDAGEYLCMCGKERTSAMLTVRAMPSKFIEGLRNEEATEGDTATLWCELSKAAPVEWRKGHETLRDGDRHSLRQDGSRCELQIRGLAVVDAGEYSCVCGQERTSATLTVRALPARFIEDVKNQEAREGATAVLQCELSKAAPVEWRKGSETLRGGDRYSLRQDGTRCELQIHGLSVADTGEYSCVCGQERTSATLTVRAPQPVFREPLQSLQAEEGSTATLQCELSEPTATVVWSKGGLQLQANGRREPRLQGCTAELVLQDLQREDTGEYTCTCGSQATSATLTVTAAPVRFLRELQHQEVDEGGTAHLCCELSRAGASVEWRKGSLQLFPCAKYQMVQDGAAAELLVRGVEQEDAGDYTCDTGHTQSMASLSVRVPRPKFKTRLQSLEQETGDIARLCCQLSDAESGAVVQWLKEGVELHAGPKYEMRSQGATRELLIHQLEAKDTGEYACVTGGQKTAASLRVTEPEVTIVRGLVDAEVTADEDVEFSCEVSRAGATGVQWCLQGLPLQSNEVTEVAVRDGRIHTLRLKGVTPEDAGTVSFHLGNHASSAQLTVRAPEVTILEPLQDVQLSEGQDASFQCRLSRASGQEARWALGGVPLQANEMNDITVEQGTLHLLTLHKVTLEDAGTVSFHVGTCSSEAQLKVTAKNTVVRGLENVEALEGGEALFECQLSQPEVAAHTWLLDDEPVHTSENAEVVFFENGLRHLLLLKNLRPQDSCRVTFLAGDMVTSAFLTVRGWRLEILEPLKNAAVRAGAQACFTCTLSEAVPVGEASWYINGAAVQPDDSDWTVTADGSHHALLLRSAQPHHAGEVTFACRDAVASARLTVLGLPDPPEDAEVVARSSHTVTLSWAAPMSDGGGGLCGYRVEVKEGATGQWRLCHELVPGPECVVDGLAPGETYRFRVAAVGPVGAGEPVHLPQTVRLAEPPKPVPPQPSAPESRQVAAGEDVSLELEVVAEAGEVIWHKGMERIQPGGRFEVVSQGRQQMLVIKGFTAEDQGEYHCGLAQGSICPAAATFQVALSPASVDEAPQPSLPPEAAQEGDLHLLWEALARKRRMSREPTLDSISELPEEDGRSQRLPQEAEEVAPDLSEGYSTADELARTGDADLSHTSSDDESRAGTPSLVTYLKKAGRPGTSPLASKVGAPAAPSVKPQQQQEPLAAVRPPLGDLSTKDLGDPSMDKAAVKIQAAFKGYKVRKEMKQQEGPMFSHTFGDTEAQVGDALRLECVVASKADVRARWLKDGVELTDGRHHHIDQLGDGTCSLLITGLDRADAGCYTCQVSNKFGQVTHSACVVVSGSESEAESSSGGELDDAFRRAARRLHRLFRTKSPAEVSDEELFLSADEGPAEPEEPADWQTYREDEHFICIRFEALTEARQAVTRFQEMFATLGIGVEIKLVEQGPRRVEMCISKETPAPVVPPEPLPSLLTSDAAPVFLTELQNQEVQDGYPVSFDCVVTGQPMPSVRWFKDGKLLEEDDHYMINEDQQGGHQLIITAVVPADMGVYRCLAENSMGVSSTKAELRVDFPDTELLNPLEFPG

SEQ ID NO: 10290 - protein, 47 aa, Artificial Sequence
  Synthetic polypeptide
MAAHGYFFPISDHVLTLKDDGTFYRFQTPYFWPSNCWEPENTDYGII

SEQ ID NO: 10291 - protein, 131 aa, Artificial Sequence
  Synthetic polypeptide
MAQGNNYGQTSNGVADESPNMLVYRKMEDVIARMQDEKNGIPIRTVKSFLSKIPSVFSGSDIVQWLIKNLTIEDPVEALHLGTLMAAHGYFFPISDHVLTLKDDGTFYRFQTPYFWPSNCWEPENTDYGII

SEQ ID NO: 10292 - protein, 105 aa, Artificial Sequence
  Synthetic polypeptide
MEDVIARMQDEKNGIPIRTVKSFLSKIPSVFSGSDIVQWLIKNLTIEDPVEALHLGTLMAAHGYFFPISDHVLTLKDDGTFYRFQTPYFWPSNCWEPENTDYGII

SEQ ID NO: 10293 - protein, 28 aa, Artificial Sequence
  Synthetic polypeptide
MAQGNNYGQTSNGVADESPNMLVYRKMT

SEQ ID NO: 10294 - protein, 130 aa, Artificial Sequence; identical to SEQ ID NO: 1079
  Synthetic polypeptide

SEQ ID NO: 10295 - protein, 1132 aa, Artificial Sequence
  Synthetic polypeptide
MEEPGPPGGLSQDQVERCMGAMQEGMQMVKLRGGSKGLVRFYYLDEHRSCIRWRPSRKNEKAKISIDSIQEVSEGRQSEVFQRYPDGSFDPNCCFSIYHGSHRESLDLVSTSSEVARTWVTGLRYLMAGISDEDSLARRQRTRDQWLKQTFDEADKNGDGSLSIGEVLQLLHKLNVNLPRQRVKQMFREADTDDHQGTLGFEEFCAFYKMMSTRRDLYLLMLTYSNHKDHLDAASLQRFLQVEQKMAGVTLESCQDIIEQFEPCPENKSKGLLGIDGFTNYTRSPAGDIFNPEHHHVHQDMTQPLSHYFITSSHNTYLVGDQLMSQSRVDMYAWVLQAGCRCVEVDCWDGPDGEPIVHHGYTLTSKILFKDVIETINKYAFIKNEYPVILSIENHCSVIQQKKMAQYLTDILGDKLDLSSVSSEDATTLPSPQMLKGKILVKGKKLPANISEDAEEGEVSDEDSADEIDDDCKLLNGDASTNRKRVENTAKRKLDSLIKESKIRDCEDPNNFSVSTLSPSGKLGRKSKAEEDVESGEDAGASRRNGRLVVGSFSRRKKKGSKLKKAASVEEGDEGQDSPGGQSRGATRQKKTMKLSRALSDLVKYTKSVATHDIEMEAASSWQVSSFSETKAHQILQQKPAQYLRFNQQQLSRIYPSSYRVDSSNYNPQPFWNAGCQMVALNYQSEGRMLQLNRAKFSANGGCGYVLKPGCMCQGVFNPNSEDPLPGQLKKQLVLRIISGQQLPKPRDSMLGDRGEIIDPFVEVEIIGLPVDCSREQTRVVDDNGFNPTWEETLVFMVHMPEIALVRFLVWDHDPIGRDFIGQRTLAFSSMMPGYRHVYLEGMEEASIFVHVAVSDISGKVKQALGLKGLFLRGPKPGSLDSHAAGRPPARPSVSQRILRRTASAPTKSQKPGRRGFPELVLGTRDTGSKGVADDVVPPGPGPAPEAPAQEGPGSGSPRGKAPAAVAEKSPVRVRPPRVLDGPGPAGMAATCMKCVVGSCAGVNTGGLQRERPPSPGPASRQAAIRQQPRARADSLGAPCCGLDPHAIPGRSREAPKGPGAWRQGPGGSGSMSSDSSSPDSPGIPERSPRWPEGACRQPGALQGEMSALFAQKLEEIRSKSPMFSADTRPLS

SEQ ID NO: 10296 - protein, 447 aa, Artificial Sequence
  Synthetic polypeptide
MGAMQEGMQMVKLRGGSKGLVRFYYLDEHRSCIRWRPSRKNEKAKISIDSIQEVSEGRQSEVFQRYPDGSFIIDPFVEVEIIGLPVDCSREQTRVVDDNGFNPTWEETLVFMVHMPEIALVRFLVWDHDPIGRDFIGQRTLAFSSMMPGYRHVYLEGMEEASIFVHVAVSDISGKVKQALGLKGLFLRGPKPGSLDSHAAGRPPARPSVSQRILRRTASAPTKSQKPGRRGFPELVLGTRDTGSKGVADDVVPPGPGPAPEAPAQEGPGSGSPRGKAPAAVAEKSPVRVRPPRVLDGPGPAGMAATCMKCVVGSCAGVNTGGLQRERPPSPGPASRQAAIRQQPRARADSLGAPCCGLDPHAIPGRSREAPKGPGAWRQGPGGSGSMSSDSSSPDSPGIPERSPRWPEGACRQPGALQGEMSALFAQKLEEIRSKSPMFSADTRPLS

SEQ ID NO: 10297 - protein, 198 aa, Artificial Sequence
  Synthetic polypeptide
MEPPGDWGPPPWRSTPKTDVLRLVLYLTFLGAPCYAPALPSCKEDEYPVGSECCPKCSPGYRVKEACGELTGTVCEPCPPGTYIAHLNGLSKCLQCQMCDPAMGLRASRNCSRTENAVCGCSPGHFCIVQDGDHCAACRAYATSSPGQRVQKGGTESQDTLCQNCPPGTFSPNGTLEECQHQTNLSLFLFSSFLLSTS

SEQ ID NO: 10298 - protein, 244 aa, Artificial Sequence
  Synthetic polypeptide
MEPPGDWGPPPWRSTPKTDVLRLVLYLTFLGAPCYAPALPSCKEDEYPVGSECCPKCSPGYRVKEACGELTGTVCEPCPPGTYIAHLNGLSKCLQCQMCDPAMGLRASRNCSRTENAVCGCSPGHFCIVQDGDHCAACRAYATSSPGQRVQKGGTESQDTLCQNCPPGTFSPNGTLEECQHQTKCSWLVTKAGAGTSSSHWVWWFLSGSLVIVIVCSTVGLIICVKRRKPRGDVVKVIVSVQGR

SEQ ID NO: 10299 - protein, 115 aa, Artificial Sequence; identical to SEQ ID NO: 1104
  Synthetic polypeptide

SEQ ID NO: 10300 - protein, 366 aa, Artificial Sequence
  Synthetic polypeptide
MSSKYPRSVRRCLPLWALTLEAALILLFYFFTHYDASLEDQKGLVASYQVGQDLTVMAAIGLGFLTSSFRRHSWSSVAFNLFMLALGVQWAILLDGFLSQFPSGKVVITLFSIRLATMSALSVLISVDAVLGKVNLAQLVVMVLVEVTALGNLRMVISNIFNTDYHMNMMHIYVFAAYFGLSVAWCLPKPLPEGTEDKDQTATIPSLSAMLGALFLWMFWPSFNSALLRSPIERKNAVFNTYYAVAVSVVTAISGSSLAHPQGKISKTYVHSAVLAGGVAVGTSCHLIPSPWLAMVLGLVAGLISVGGAKYLPGCCNRVLGIPHSSIMGYNFSLLGLLGEIIYIVLLVLDTVGAGNGMLTARGNLP

SEQ ID NO: 10301 - protein, 434 aa, Artificial Sequence
  Synthetic polypeptide
MSSKYPRSVRRCLPLWALTLEAALILLFYFFTHYDASLEDQKGLVASYQVGQDLTVMAAIGLGFLTSSFRRHSWSSVAFNLFMLALGVQWAILLDGFLSQFPSGKVVITLFSIRLATMSALSVLISVDAVLGKVNLAQLVVMVLVEVTALGNLRMVISNIFNTDYHMNMMHIYVFAAYFGLSVAWCLPKPLPEGTEDKDQTATIPSLSAMLGALFLWMFWPSFNSALLRSPIERKNAVFNTYYAVAVSVVTAISGSSLAHPQGKISKTYVHSAVLAGGVAVGTSCHLIPSPWLAMVLGLVAGLISVGGAKYLPGCCNRVLGIPHSSIMGYNFSLLGLLGEIIYIVLLVLDTVGAGNGMSLGWNLAVKMAEAGDEELMRLDVSQRNHGGAAVPTGSWMPSTETTIAPNYRDHISVGLQPEGISHRMNCTLSLTHI

SEQ ID NO: 10302 - protein, 190 aa, Artificial Sequence
  Synthetic polypeptide
MAYLSAELFHLSGIMALIASGVVMRPYVEANISHKSHTTIKYFLKMWSSVSETLIFIFLGVSTVAGSHHWNWTFVISTLLFCLIARVLGVLGLTWFINKFRIVKLTPKDQFIIAYGGLRGAIAFSLGYLLDKKHFPMCDLFLTAIITVIFFTVFVQRQWKDLPLSVADIGELIDARTLPSTCVGHMAGVQ

SEQ ID NO: 10303 - protein, 529 aa, Artificial Sequence
  Synthetic polypeptide
MVLRSGICGLSPHRIFPSLLVVVALVGLLPVLRSHGLQLSPTASTIRSSEPPRERSIGDVTTAPPEVTPESRPVNHSVTDHGMKPRKAFPVLGIDYTHVRTPFEISLWILLACLMKIGFHVIPTISSIVPESCLLIVVGLLVGGLIKGVGETPPFLQSDVFFLFLLPPIILDAGYFLPLRQFTENLGTILIFAVVGTLWNAFFLGGLMYAVCLVGGEQINNIGLLDNLLFGSIISAVDPVAVLAVFEEIHINELLHILVFGESLLNDAVTVVLYHLFEEFANYEHVGIVDIFLGFLSFFVVALGGVLVGVVYGVIAAFTSRFTSHIRVIEPLFVFLYSYMAYLSAELFHLSGIMALIASGVVMRPYVEANISHKSHTTIKYFLKMWSSVSETLIFIFLGVSTVAGSHHWNWTFVISTLLFCLIARVLGVLGLTWFINKFRIVKLTPKDQFIIAYGGLRGAIAFSLGYLLDKKHFPMCDLFLTAIITVIFFTVFVQRQWKDLPLSVADIGELIDARTLPSTCVGHMAGVQ

SEQ ID NO: 10304 - protein, 150 aa, Artificial Sequence
  Synthetic polypeptide
MVLRSGICGLSPHRIFPSLLVVVALVGLLPVLRSHGLQLSPTASTIRSSEPPRERSIGDVTTAPPEVTPESRPVNHSVTDHGMKPRKAFPVLGIDYTHVRTPFEISLWILLACLMKIAWSTAHRLPRAGALLQALDQTSSLQRGLPDCPV

SEQ ID NO: 10305 - protein, 164 aa, Artificial Sequence
  Synthetic polypeptide
MVLRSGICGLSPHRIFPSLLVVVALVGLLPVLRSHGLQLSPTASTIRSSEPPRERSIGDVTTAPPEVTPESRPVNHSVTDHGMKPRKAFPVLGIDYTHVRTPFEISLWILLACLMKIGLFLHTAVAFARSPAWSTAHRLPRAGALLQALDQTSSLQRGLPDCPV

SEQ ID NO: 10306 - protein, 164 aa, Artificial Sequence
  Synthetic polypeptide
MPWSSRGALLRDLVLGVLGTAAFLLDLGTDLWAAVQYALGGRYLWAALVLALLGLASVALQLFSWLWLRADPAGLHGSQPPRRCLALLHLLQLGYLYRCVQELRQGLLVWQQEEPSEFDLAYADFLALDISMLRLFETFLETAPQLTLVLAIMLQSGRAEYYQC

SEQ ID NO: 10307 - protein, 42 aa, Artificial Sequence
  Synthetic polypeptide
MAGYLSESDFVMVEEGFSTRDLLKELTLGASQATTKLPSNIC

SEQ ID NO: 10308 - protein, 389 aa, Artificial Sequence
  Synthetic polypeptide
MPRSRGRELGRCGCPAGRARGETGISALVPGAGSRWGRPPPPTPPPLLLLLGCGLLSVSAAAGQNCTFQLHGPNGTVESPGFPYGYPNYANCTWTITAEEQHRIQLVFQSFALEEDFDVLSVFDGPPQPENLRTRLTGFQLPATIVSAATTLSLRLISDYAVSAQGFHATYEVLPSHTCGNPGRLPNGIQQGSTFNLGDKVRYSCNLGFFLEGHAVLTCHAGSENSATWDFPLPSCRADDACGGTLRGQSGIISSPHFPSEYHNNADCTWTILAELGDTIALVFIDFQLEDGYDFLEVTGTEGSSLWFTGASLPAPVISSKNWLRLHFTSDGNHRQRGFSAQYQVKKQIELKSRGVKLMPSKDNSQKTSVCFHLTPRACLSLSSLLPCV

SEQ ID NO: 10309 - protein, 349 aa, Artificial Sequence
  Synthetic polypeptide
MRLISIAPGPRWQVQSHHPRSAGQNCTFQLHGPNGTVESPGFPYGYPNYANCTWTITAEEQHRIQLVFQSFALEEDFDVLSVFDGPPQPENLRTRLTGFQLPATIVSAATTLSLRLISDYAVSAQGFHATYEVLPSHTCGNPGRLPNGIQQGSTFNLGDKVRYSCNLGFFLEGHAVLTCHAGSENSATWDFPLPSCRADDACGGTLRGQSGIISSPHFPSEYHNNADCTWTILAELGDTIALVFIDFQLEDGYDFLEVTGTEGSSLWFTGASLPAPVISSKNWLRLHFTSDGNHRQRGFSAQYQVKKQIELKSRGVKLMPSKDNSQKTSVCFHLTPRACLSLSSLLPCV

SEQ ID NO: 10310 - protein, 382 aa, Artificial Sequence
  Synthetic polypeptide
MRGYHGDRGSHPRPARFADQQHMDVGPAARAPYLLGSREAFSTEPRFCAPRAGLGHISPEGPLSLSEGPSVGPEGGPAGAGVGGGSSTFPRMYPGQGPFDTCEDCVGHPQGKGAPRLPPTLLDQFEKQLPVQQDGFHTLPYQRGPAGAGPGPAPGTGTAPEPRSESPSRIRHLVHSVQKLFAKSHSLEAPGKRDYNGPKAEGRGGSGGDSYPGPGSGGPHTSHHHHHHHHHHHHQSRHGKRSKSKDRKGDGRHQAKSTGWWSSDDNLDSDSGFLAGGRPPGEPGGPFCLEGPDGSYRDLSFKGRSGGSEGRCLACTGMSMSLDGQSVKRSAWHTMMVSQGRDGYPGAGPGKGLLGPETKAKARTYHYLQASSSLAWITASAS

SEQ ID NO: 10311 - protein, 75 aa, Artificial Sequence
  Synthetic polypeptide
MEKRLGVKPNPASWILSGYYWQTSAKWLRSLYLFYTCFCFSVLWLSTEVPRTHIGERISCSTNGPGKTGYSYTEE

SEQ ID NO: 10312 - protein, 22 aa, Artificial Sequence
  Synthetic polypeptide
MARLGNCSLTWAALIILLLPGS

SEQ ID NO: 10313 - protein, 28 aa, Artificial Sequence
  Synthetic polypeptide
MARLGNCSLTWAALIILLLPGRPSHPHQ

SEQ ID NO: 10314 - protein, 43 aa, Artificial Sequence
  Synthetic polypeptide
MTAPWRRLRSLVWEYWAGLLVCAFWIPDSRGMPHVIRIGSSSR

SEQ ID NO: 10315 - protein, 68 aa, Artificial Sequence
  Synthetic polypeptide
MAGYVPGQQPANRSQEKEFVQAYEDVLERYKDERDRVQKKTFTKWVNKHLMKNARPSLLCLTITHFTF

SEQ ID NO: 10316 - protein, 73 aa, Artificial Sequence
  Synthetic polypeptide
MPLLDSSYLPPTIFILTHVLGVAGVLYWKRHARGRADERDRVQKKTFTKWVNKHLMKNARPSLLCLTITHFTF

SEQ ID NO: 10317 - protein, 110 aa, Artificial Sequence
  Synthetic polypeptide
MSSSDEETLSERSCRSERSCRSERSYRSERSGSLSPCPPGDTLPWNLPLHEQKKRKSQDSVLDPAERAVVRVADERDRVQKKTFTKWVNKHLMKNARPSLLCLTITHFTF

SEQ ID NO: 10318 - protein, 1346 aa, Artificial Sequence
  Synthetic polypeptide
MAGYVPGQQPANRSQEKEFVQAYEDVLERYKDERDRVQKKTFTKWVNKHLMKVRKHINDLYEDLRDGHNLISLLEVLSGIKLPREKGRMRFHRLQNVQIALDFLKQRQVKLVNIRNDDITDGNPKLTLGLIWTIILHFQISDIYISGESGDMSAKEKLLLWTQKVTAGYTGIKCTNFSSCWSDGKMFNALIHRYRPDLVDMERVQIQSNRENLEQAFEVAERLGVTRLLDAEDVDVPSPDEKSVITYVSSIYDAFPKVPEGGEGISATEVDSRWQEYQSRVDSLIPWIKQHTILMSDKTFPQNPVELKALYNQYIHFKETEILAKEREKGRIEELYKLLEVWIEFGRIKLPQGYHPNDVEEEWGKLIIEMLEREKSLRPAVERLELLLQIANKIQNGALNCEEKLTLAKNTLQADAAHLESGQPVQCESDVIMYIQECEGLIRQLQVDLQILRDENYYQLEELAFRVMRLQDELVTLRLECTNLYRKGHFTSLELVPPSTLTTTHLKAEPLTKATHSSSTSWFRKPMTRAELVAISSSEDEGNLRFVYELLSWVEEMQMKLERAEWGNDLPSVELQLETQQHIHTSVEELGSSVKEARLYEGKMSQNFHTSYAETLGKLETQYCKLKETSSFRMRHLQSLHKFVSRATAELIWLNEKEEEELAYDWSDNNSNISAKRNYFSELTMELEEKQDVFRSLQDTAELLSLENHPAKQTVEAYSAAVQSQLQWMKQLCLCVEQHVKENTAYFQFFSDARELESFLRNLQDSIKRKYSCDHNTSLSRLEDLLQDSMDEKEQLIQSKSSVASLVGRSKTIVQLKPRSPDHVLKNTISVKAVCDYRQIEITICKNDECVLEDNSQRTKWKVISPTGNEAMVPSVCFLIPPPNKDAIEMASRVEQSYQKVMALWHQLHVNTKSLISWNYLRKDLDLVQTWNLEKLRSSAPGECHQIMKNLQAHYEDFLQDSRDSVLFSVADRLRLEEEVEACKARFQHLMKSMENEDKEETVAKMYISELKNIRLRLEEYEQRVVKRIQSLASSRTDRDAWQDNALRIAEQEHTQEDLQQLRSDLDAVSMKCDSFLHQSPSSSSVPTLRSELNLLVEKMDHVYGLSTVYLNKLKTVDVIVRSIQDAELLVKGYEIKLSQEEVVLADLSALEAHWSTLRHWLSDVKDKNSVFSVLDEEIAKAKVVAEQMSRLTPERNLDLERYQEKGSQLQERWHRVIAQLEIRQSELESIQEVLGDYRACHGTLIKWIEETTAQQEMMKPGQAEDSRVLSEQLSQQTALFAEIERNQTKLDQCQKFSQQYSTIVKEAKARGLLDPRSLRPAWATYQDPICKKKNFKLAGCSGVHL

SEQ ID NO: 10319 - protein, 1537 aa, Artificial Sequence
  Synthetic polypeptide
MGNSLGCFKEPKESIAIPEKAPISPKKRVRFKRRWRGKKIPTPEASHQEETSEGTGVIEETETLTKLTESLQKEDGVGGVEHTPPDILLPGDSAPNSRVVDRGMIVQVKERFQGEVQTAHLLLENESSVAGGVWDSLEEGMTVIAHLLDNPAERNCEKSVSQLVEFPRTASCSSRAVLLPLQGETAVEKGNIQRGFRSCALPRTDYPTDKGNQEQFSEGWSVEEGTKSVSGAPQTASWIIECSVSSLLLDQPGGQRRTEPSHVGQVPPQDSRLPTSQSDLSISGVTVSILPSSSGYGSDGPHIHGIQPKDTEPEKSSTSFSEEDGTLSLEISDIYISGESGDMSAKEKLLLWTQKVTAGYTGIKCTNFSSCWSDGKMFNALIHRYRPDLVDMERVQIQSNRENLEQAFEVAERLGVTRLLDAEDVDVPSPDEKSVITYVSSIYDAFPKVPEGGEGISATEVDSRWQEYQSRVDSLIPWIKQHTILMSDKTFPQNPVELKALYNQYIHFKETEILAKEREKGRIEELYKLLEVWIEFGRIKLPQGYHPNDVEEEWGKLIIEMLEREKSLRPAVERLELLLQIANKIQNGALNCEEKLTLAKNTLQADAAHLESGQPVQCESDVIMYIQECEGLIRQLQVDLQILRDENYYQLEELAFRVMRLQDELVTLRLECTNLYRKGHFTSLELVPPSTLTTTHLKAEPLTKATHSSSTSWFRKPMTRAELVAISSSEDEGNLRFVYELLSWVEEMQMKLERAEWGNDLPSVELQLETQQHIHTSVEELGSSVKEARLYEGKMSQNFHTSYAETLGKLETQYCKLKETSSFRMRHLQSLHKFVSRATAELIWLNEKEEEELAYDWSDNNSNISAKRNYFSELTMELEEKQDVFRSLQDTAELLSLENHPAKQTVEAYSAAVQSQLQWMKQLCLCVEQHVKENTAYFQFFSDARELESFLRNLQDSIKRKYSCDHNTSLSRLEDLLQDSMDEKEQLIQSKSSVASLVGRSKTIVQLKPRSPDHVLKNTISVKAVCDYRQIEITICKNDECVLEDNSQRTKWKVISPTGNEAMVPSVCFLIPPPNKDAIEMASRVEQSYQKVMALWHQLHVNTKSLISWNYLRKDLDLVQTWNLEKLRSSAPGECHQIMKNLQAHYEDFLQDSRDSVLFSVADRLRLEEEVEACKARFQHLMKSMENEDKEETVAKMYISELKNIRLRLEEYEQRVVKRIQSLASSRTDRDAWQDNALRIAEQEHTQEDLQQLRSDLDAVSMKCDSFLHQSPSSSSVPTLRSELNLLVEKMDHVYGLSTVYLNKLKTVDVIVRSIQDAELLVKGYEIKLSQEEVVLADLSALEAHWSTLRHWLSDVKDKNSVFSVLDEEIAKAKVVAEQMSRLTPERNLDLERYQEKGSQLQERWHRVIAQLEIRQSELESIQEVLGDYRACHGTLIKWIEETTAQQEMMKPGQAEDSRVLSEQLSQQTALFAEIERNQTKLDQCQKFSQQYSTIVKEAKARGLLDPRSLRPAWATYQDPICKKKNFKLAGCSGVHL

SEQ ID NO: 10320 - protein, 1383 aa, Artificial Sequence
  Synthetic polypeptide
MPLLDSSYLPPTIFILTHVLGVAGVLYWKRHARGRADERDRVQKKTFTKWVNKHLMKVRKHINDLYEDLRDGHNLISLLEVLSGIKLEPAGLKTLRLVSMPSWCHTNNEEQAEEDDDDVPREKGRMRFHRLQNVQIALDFLKQRQVKLVNIRNDDITDGNPKLTLGLIWTIILHFQISDIYISGESGDMSAKEKLLLWTQKVTAGYTGIKCTNFSSCWSDGKMFNALIHRYRPDLVDMERVQIQSNRENLEQAFEVAERLGVTRLLDAEDVDVPSPDEKSVITYVSSIYDAFPKVPEGGEGISATEVDSRWQEYQSRVDSLIPWIKQHTILMSDKTFPQNPVELKALYNQYIHFKETEILAKEREKGRIEELYKLLEVWIEFGRIKLPQGYHPNDVEEEWGKLIIEMLEREKSLRPAVERLELLLQIANKIQNGALNCEEKLTLAKNTLQADAAHLESGQPVQCESDVIMYIQECEGLIRQLQVDLQILRDENYYQLEELAFRVMRLQDELVTLRLECTNLYRKGHFTSLELVPPSTLTTTHLKAEPLTKATHSSSTSWFRKPMTRAELVAISSSEDEGNLRFVYELLSWVEEMQMKLERAEWGNDLPSVELQLETQQHIHTSVEELGSSVKEARLYEGKMSQNFHTSYAETLGKLETQYCKLKETSSFRMRHLQSLHKFVSRATAELIWLNEKEEEELAYDWSDNNSNISAKRNYFSELTMELEEKQDVFRSLQDTAELLSLENHPAKQTVEAYSAAVQSQLQWMKQLCLCVEQHVKENTAYFQFFSDARELESFLRNLQDSIKRKYSCDHNTSLSRLEDLLQDSMDEKEQLIQSKSSVASLVGRSKTIVQLKPRSPDHVLKNTISVKAVCDYRQIEITICKNDECVLEDNSQRTKWKVISPTGNEAMVPSVCFLIPPPNKDAIEMASRVEQSYQKVMALWHQLHVNTKSLISWNYLRKDLDLVQTWNLEKLRSSAPGECHQIMKNLQAHYEDFLQDSRDSVLFSVADRLRLEEEVEACKARFQHLMKSMENEDKEETVAKMYISELKNIRLRLEEYEQRVVKRIQSLASSRTDRDAWQDNALRIAEQEHTQEDLQQLRSDLDAVSMKCDSFLHQSPSSSSVPTLRSELNLLVEKMDHVYGLSTVYLNKLKTVDVIVRSIQDAELLVKGYEIKLSQEEVVLADLSALEAHWSTLRHWLSDVKDKNSVFSVLDEEIAKAKVVAEQMSRLTPERNLDLERYQEKGSQLQERWHRVIAQLEIRQSELESIQEVLGDYRACHGTLIKWIEETTAQQEMMKPGQAEDSRVLSEQLSQQTALFAEIERNQTKLDQCQKFSQQYSTIVKEAKARGLLDPRSLRPAWATYQDPICKKKNFKLAGCSGVHL

SEQ ID NO: 10321 - protein, 1420 aa, Artificial Sequence
  Synthetic polypeptide
MSSSDEETLSERSCRSERSCRSERSYRSERSGSLSPCPPGDTLPWNLPLHEQKKRKSQDSVLDPAERAVVRVADERDRVQKKTFTKWVNKHLMKVRKHINDLYEDLRDGHNLISLLEVLSGIKLEPAGLKTLRLVSMPSWCHTNNEEQAEEDDDDVPREKGRMRFHRLQNVQIALDFLKQRQVKLVNIRNDDITDGNPKLTLGLIWTIILHFQISDIYISGESGDMSAKEKLLLWTQKVTAGYTGIKCTNFSSCWSDGKMFNALIHRYRPDLVDMERVQIQSNRENLEQAFEVAERLGVTRLLDAEDVDVPSPDEKSVITYVSSIYDAFPKVPEGGEGISATEVDSRWQEYQSRVDSLIPWIKQHTILMSDKTFPQNPVELKALYNQYIHFKETEILAKEREKGRIEELYKLLEVWIEFGRIKLPQGYHPNDVEEEWGKLIIEMLEREKSLRPAVERLELLLQIANKIQNGALNCEEKLTLAKNTLQADAAHLESGQPVQCESDVIMYIQECEGLIRQLQVDLQILRDENYYQLEELAFRVMRLQDELVTLRLECTNLYRKGHFTSLELVPPSTLTTTHLKAEPLTKATHSSSTSWFRKPMTRAELVAISSSEDEGNLRFVYELLSWVEEMQMKLERAEWGNDLPSVELQLETQQHIHTSVEELGSSVKEARLYEGKMSQNFHTSYAETLGKLETQYCKLKETSSFRMRHLQSLHKFVSRATAELIWLNEKEEEELAYDWSDNNSNISAKRNYFSELTMELEEKQDVFRSLQDTAELLSLENHPAKQTVEAYSAAVQSQLQWMKQLCLCVEQHVKENTAYFQFFSDARELESFLRNLQDSIKRKYSCDHNTSLSRLEDLLQDSMDEKEQLIQSKSSVASLVGRSKTIVQLKPRSPDHVLKNTISVKAVCDYRQIEITICKNDECVLEDNSQRTKWKVISPTGNEAMVPSVCFLIPPPNKDAIEMASRVEQSYQKVMALWHQLHVNTKSLISWNYLRKDLDLVQTWNLEKLRSSAPGECHQIMKNLQAHYEDFLQDSRDSVLFSVADRLRLEEEVEACKARFQHLMKSMENEDKEETVAKMYISELKNIRLRLEEYEQRVVKRIQSLASSRTDRDAWQDNALRIAEQEHTQEDLQQLRSDLDAVSMKCDSFLHQSPSSSSVPTLRSELNLLVEKMDHVYGLSTVYLNKLKTVDVIVRSIQDAELLVKGYEIKLSQEEVVLADLSALEAHWSTLRHWLSDVKDKNSVFSVLDEEIAKAKVVAEQMSRLTPERNLDLERYQEKGSQLQERWHRVIAQLEIRQSELESIQEVLGDYRACHGTLIKWIEETTAQQEMMKPGQAEDSRVLSEQLSQQTALFAEIERNQTKLDQCQKFSQQYSTIVKEAKARGLLDPRSLRPAWATYQDPICKKKNFKLAGCSGVHL

SEQ ID NO: 10322 - protein, 1388 aa, Artificial Sequence
  Synthetic polypeptide
MSSSDEETLSERSCRSERSCRSERSYRSERSGSLSPCPPGDTLPWNLPLHEQKKRKSQDSVLDPAERAVVRVADERDRVQKKTFTKWVNKHLMKVRKHINDLYEDLRDGHNLISLLEVLSGIKLPREKGRMRFHRLQNVQIALDFLKQRQVKLVNIRNDDITDGNPKLTLGLIWTIILHFQISDIYISGESGDMSAKEKLLLWTQKVTAGYTGIKCTNFSSCWSDGKMFNALIHRYRPDLVDMERVQIQSNRENLEQAFEVAERLGVTRLLDAEDVDVPSPDEKSVITYVSSIYDAFPKVPEGGEGISATEVDSRWQEYQSRVDSLIPWIKQHTILMSDKTFPQNPVELKALYNQYIHFKETEILAKEREKGRIEELYKLLEVWIEFGRIKLPQGYHPNDVEEEWGKLIIEMLEREKSLRPAVERLELLLQIANKIQNGALNCEEKLTLAKNTLQADAAHLESGQPVQCESDVIMYIQECEGLIRQLQVDLQILRDENYYQLEELAFRVMRLQDELVTLRLECTNLYRKGHFTSLELVPPSTLTTTHLKAEPLTKATHSSSTSWFRKPMTRAELVAISSSEDEGNLRFVYELLSWVEEMQMKLERAEWGNDLPSVELQLETQQHIHTSVEELGSSVKEARLYEGKMSQNFHTSYAETLGKLETQYCKLKETSSFRMRHLQSLHKFVSRATAELIWLNEKEEEELAYDWSDNNSNISAKRNYFSELTMELEEKQDVFRSLQDTAELLSLENHPAKQTVEAYSAAVQSQLQWMKQLCLCVEQHVKENTAYFQFFSDARELESFLRNLQDSIKRKYSCDHNTSLSRLEDLLQDSMDEKEQLIQSKSSVASLVGRSKTIVQLKPRSPDHVLKNTISVKAVCDYRQIEITICKNDECVLEDNSQRTKWKVISPTGNEAMVPSVCFLIPPPNKDAIEMASRVEQSYQKVMALWHQLHVNTKSLISWNYLRKDLDLVQTWNLEKLRSSAPGECHQIMKNLQAHYEDFLQDSRDSVLFSVADRLRLEEEVEACKARFQHLMKSMENEDKEETVAKMYISELKNIRLRLEEYEQRVVKRIQSLASSRTDRDAWQDNALRIAEQEHTQEDLQQLRSDLDAVSMKCDSFLHQSPSSSSVPTLRSELNLLVEKMDHVYGLSTVYLNKLKTVDVIVRSIQDAELLVKGYEIKLSQEEVVLADLSALEAHWSTLRHWLSDVKDKNSVFSVLDEEIAKAKVVAEQMSRLTPERNLDLERYQEKGSQLQERWHRVIAQLEIRQSELESIQEVLGDYRACHGTLIKWIEETTAQQEMMKPGQAEDSRVLSEQLSQQTALFAEIERNQTKLDQCQKFSQQYSTIVKEAKARGLLDPRSLRPAWATYQDPICKKKNFKLAGCSGVHL

SEQ ID NO: 10323 - protein, 522 aa, Artificial Sequence
  Synthetic polypeptide
  misc_feature (1)..(1): Xaa can be any naturally occurring amino acid
XKNTISVKAVCDYRQIEITICKNDECVLEDNSQRTKWKVISPTGNEAMVPSVCFLIPPPNKDAIEMASRVEQSYQKVMALWHQLHVNTKSLISWNYLRKDLDLVQTWNLEKLRSSAPGECHQIMKNLQAHYEDFLQDSRDSVLFSVADRLRLEEEVEACKARFQHLMKSMENEDKEETVAKMYISELKNIRLRLEEYEQRVVKRIQSLASSRTDRDAWQDNALRIAEQEHTQEDLQQLRSDLDAVSMKCDSFLHQSPSSSSVPTLRSELNLLVEKMDHVYGLSTVYLNKLKTVDVIVRSIQDAELLVKGYEIKLSQEEVVLADLSALEAHWSTLRHWLSDVKDKNSVFSVLDEEIAKAKVVAEQMSRLTPERNLDLERYQEKGSQLQERWHRVIAQLEIRQSELESIQEVLGDYRACHGTLIKWIEETTAQQEMMKPGQAEDSRVLSEQLSQQTALFAEIERNQTKLDQCQKFSQQYSTIVKEAKARGLLDPRSLRPAWATYQDPICKKKNFKLAGCSGVHL

SEQ ID NO: 10324 - protein, 4097 aa, Artificial Sequence
  Synthetic polypeptide
MPLLDSSYLPPTIFILTHVLGVAGVLYWKRHARGRADERDRVQKKTFTKWVNKHLMKVRKHINDLYEDLRDGHNLISLLEVLSGIKLEPAGLKTLRLVSMPSWCHTNNEEQAEEDDDDVPREKGRMRFHRLQNVQIALDFLKQRQVKLVNIRNDDITDGNPKLTLGLIWTIILHFQISDIYISGESGDMSAKEKLLLWTQKVTAGYTGIKCTNFSSCWSDGKMFNALIHRYRPDLVDMERVQIQSNRENLEQAFEVAERLGVTRLLDAEDVDVPSPDEKSVITYVSSIYDAFPKVPEGGEGISATEVDSRWQEYQSRVDSLIPWIKQHTILMSDKTFPQNPVELKALYNQYIHFKETEILAKEREKGRIEELYKLLEVWIEFGRIKLPQGYHPNDVEEEWGKLIIEMLEREKSLRPAVERLELLLQIANKIQNGALNCEEKLTLAKNTLQADAAHLESGQPVQCESDVIMYIQECEGLIRQLQVDLQILRDENYYQLEELAFRVMRLQDELVTLRLECTNLYRKGHFTSLELVPPSTLTTTHLKAEPLTKATHSSSTSWFRKPMTRAELVAISSSEDEGNLRFVYELLSWVEEMQMKLERAEWGNDLPSVELQLETQQHIHTSVEELGSSVKEARLYEGKMSQNFHTSYAETLGKLETQYCKLKETSSFRMRHLQSLHKFVSRATAELIWLNEKEEEELAYDWSDNNSNISAKRNYFSELTMELEEKQDVFRSLQDTAELLSLENHPAKQTVEAYSAAVQSQLQWMKQLCLCVEQHVKENTAYFQFFSDARELESFLRNLQDSIKRKYSCDHNTSLSRLEDLLQDSMDEKEQLIQSKSSVASLVGRSKTIVQLKPRSPDHVLKNTISVKAVCDYRQIEITICKNDECVLEDNSQRTKWKVISPTGNEAMVPSVCFLIPPPNKDAIEMASRVEQSYQKVMALWHQLHVNTKSLISWNYLRKDLDLVQTWNLEKLRSSAPGECHQIMKNLQAHYEDFLQDSRDSVLFSVADRLRLEEEVEACKARFQHLMKSMENEDKEETVAKMYISELKNIRLRLEEYEQRVVKRIQSLASSRTDRDAWQDNALRIAEQEHTQEDLQQLRSDLDAVSMKCDSFLHQSPSSSSVPTLRSELNLLVEKMDHVYGLSTVYLNKLKTVDVIVRSIQDAELLVKGYEIKLSQEEVVLADLSALEAHWSTLRHWLSDVKDKNSVFSVLDEEIAKAKVVAEQMSRLTPERNLDLERYQEKGSQLQERWHRVIAQLEIRQSELESIQEVLGDYRACHGTLIKWIEETTAQQEMMKPGQAEDSRVLSEQLSQQTALFAEIERNQTKLDQCQKFSQQYSTIVKDYELQLMTYKAFVESQQKSPGKRRRMLSSSDAITQEFMDLRTRYTALVTLTTQHVKYISDALRRLEEEEKVVEEEKQEHVEKVKELLGWVSTLARNTQGKATSSETKESTDIEKAILEQQVLSEELTTKKEQVSEAIKTSQIFLAKHGHKLSEKEKKQISEQLNALNKAYHDLCDGSANQLQQLQSQLAHQTEQKECRAVAGVIDLGTVEIFPIFKAMQKGLLDQDTGLVLLESQVIMSGLIAPETGENLSLEEGIARNLINPQMYQQLRELQDALALISRLTESRGPLSVVEAIEKRIISETVGLKILEAHLATGGFSLSPSENCINLEEAFHQGLISAWLHSVLESYLRTSKNLIDPNTAEKIGLLDLMQRCIVHQESGFKLLPVKQLAGGMVSLKSGRKVSIFRAVQEGLIDRQVTVRLLEAQLFAGGIVDPRTGHRLTVEEAVRHNLIDQDMACAILIRQLQTGGIIDTVTGQRLTIDEAVSNDLVAAKIALVILESLWSFMGLLWPESGEILPITDALEQGIVSTELAHKILSNRQHIKALFLPATTEILSWKKAIESGILDRDLANNLKSICIPDVMPHMQLADSAEQNINPGAAVLPCSKSHPKATASQSENLLFQLMTHSYINVQNGQRLLLLDKELMETLTSRDEYQTSPPKVVEIGHQRQKTPEGLQESANVKISGTFSSGWTVRLPEFQFSSQNKEYPDREDCTTEKGKKTTVETEDSSVENPEQDLFVEQKERNPNIDALKVINKVKLEVQRQLIGTQREDQTAVSVRENASRGHLLTIPPAEAEGVPLVVDKDVFSVETPKKEHQPLRNTSFTCQNEQAHTLETEYIHDETGGSHIKPQSKKLQVQVKKTLGIKLELKSETDGNVHPLDKKEMLKKTFLAKDDHKESQEAQNIAGGSMMMSEKTDEEDSGREIFLSCSHPLELLEEATLNVLSAQLLDGGIFHEQTGQKLLLNEAISRGIVPSHTAVKLMEKLNMFQGFFDSQTCESLTTEEVINEGLMDEKLLHNVLMADKAISGVLDPRTQTLCSVKDAVTVGLLDKETATRILERQVVTGGIIDLKRGKKVSVTLASTLGLVDVADQPELINLEKASKGRDAEKTVRERLISLQMETTGLIDPDSKAPLTVVQSIDRGLLEREEAVRLLTKQVVDGGIIHHISGMRLSVDNAFRHGLIGEDLAEKLKRVENLNIHQIFNPETKENISLPKAIKLDLITSDLKREIQEVQAFTGNFVDLISGQRLTLAEAKKEGLLTNEAVLSPGMMHGIVDPENCRIVPYSELVKKCKIDIESGQRYLEVIPFSDIKDGVSDKVLTLSQAIQLGKVDFASTLKVLEAQANTGGIIDTATGKRLTLASALEEKLVDENMVRIIASHQVLNGGIVDIFSDQRVTLVEAIEKRLISPELANMIQIDSSEFSDHRAQIEKQEGIEVCALQNEFLGKDMLIACNQTAEMSCNKVEESERLFQVENQSAQEKVKVRVSDGEQAKKSREISLKEFGCKDQRKPRMSSDAKEFISIINPHNLKGKSLGQVSLTHPYSECDFKLKEVARNNMGNDTNEEQEKAVTKIEIISHMKQSTSCLDSEEIRENQGEVILEVQETYCETSGKLPSEQVLQQPMNARVKSKREKREVIVEESIRTCKPAFLSEEKLYQETAIRDEHDSHIKSQPREMTSSEKGKEADTEMGFSITFKIEESSSQVVPQGISVKHLDALTLFSSKQANEGKVNNLSLCLTLKPEENLSREIACGAQSEPFPCMTPRPEGLHYQESDGKAQVTGPSQISKTDKSFQGTTRQETNYQDSWVTSKTKETKHQISSSNECKEKSYQEVSFDPARGLKLEEITVSRPDSKEVRYLEFSDRKDLHHQGSKSDDKLCGTLKSEIATQELTGEKFLEMANPNVAGLEAGSIEDIVTQRGSRVLGSFLPEKLFKGVSQKENTGQQNAIISPTVLETSEEKTVSLTVCSAVKTEKTPQEKLRESPGSEQTPFMTAPEGKGNGGVNPEPFRATQNVFTRQLCLEHDEKLVSYLSLLRNIEMRTKQIQPLELNLAELQDLLCQAKVLERELKDLTTLVSQELECVNQIIISQPQEVPAQLLKALEKDAKNLQKSLSSVSDTWNSRLLHFQNAVEIEKTKVLNQHTQLEGRLQDLRAWVGNKNLILNSKGSNSEIDVDSLNLCLQQYEDLKQPMAERKAQLDALAFDIQFFISEHAQDLSPQQNRQMLRLLNELQRSFQDILEQTAAQVDALQGHLQQMEQEALVKTLQKQQNTCHQQLEDLCSWVGQAERALAGHQGRTTQQDLSALQKNQSDLKDLQDDIQNRATSFATVVKDIEGFMEENQTKLSPRELTALREKLHQAKEQYEALQEETRVAQKELEEAVTSALQQETEKSKAAKELAENKKKIDALLDWVTSVGSSGGQLLTNLPGMEQLSGASLEKGALDTTDGYMGVNQAPEKLDKQCEMMKARHQELLSQQQNFILATQSAQAFLDQHGHNLTPEEQQMLQQKLGELKEQYSTSLAQSEAELKQVQTLQDELQKFLQDHKEFESWLERSEKELENMHKGGSSPETLPSLLKRQGSFSEDVISHKGDLRFVTISGQKVLDMENSFKEGKEPSEIGNLVKDKLKDATERYTALHSKCTRLGSHLNMLLGQYHQFQNSADSLQAWMQACEANVEKLLSDTVASDPGVLQEQLATTKQLQEELAEHQVPVEKLQKVARDIMEIEGEPAPDHRHVQETTGLGMVAHACNPGTLGG

SEQ ID NO: 10325 - protein, 2537 aa, Artificial Sequence
  Synthetic polypeptide
MQKGLLDQDTGLVLLESQVIMSGLIAPETGENLSLEEGIARNLINPQMYQQLRELQDALALISRLTESRGPLSVVEAIEKRIISETVGLKILEAHLATGGFSLSPSENCINLEEAFHQGLISAWLHSVLESYLRTSKNLIDPNTAEKIGLLDLMQRCIVHQESGFKLLPVKQLAGGMVSLKSGRKVSIFRAVQEGLIDRQVTVRLLEAQLFAGGIVDPRTGHRLTVEEAVRHNLIDQDMACAILIRQLQTGGIIDTVTGQRLTIDEAVSNDLVAAKIALVILESLWSFMGLLWPESGEILPITDALEQGIVSTELAHKILSNRQHIKALFLPATTEILSWKKAIESGILDRDLANNLKSICIPDVMPHMQLADSAEQNINPGAAVLPCSKSHPKATASQSENLLFQLMTHSYINVQNGQRLLLLDKELMETLTSRDEYQTSPPKVVEIGHQRQKTPEGLQESANVKISGTFSSGWTVRLPEFQFSSQNKEYPDREDCTTEKGKKTTVETEDSSVENPEQDLFVEQKERNPNIDALKVINKVKLEVQRQLIGTQREDQTAVSVRENASRGHLLTIPPAEAEGVPLVVDKDVFSVETPKKEHQPLRNTSFTCQNEQAHTLETEYIHDETGGSHIKPQSKKLQVQVKKTLGIKLELKSETDGNVHPLDKKEMLKKTFLAKDDHKESQEAQNIAGGSMMMSEKTDEEDSGREIFLSCSHPLELLEEATLNVLSAQLLDGGIFHEQTGQKLLLNEAISRGIVPSHTAVKLMEKLNMFQGFFDSQTCESLTTEEVINEGLMDEKLLHNVLMADKAISGVLDPRTQTLCSVKDAVTVGLLDKETATRILERQVVTGGIIDLKRGKKVSVTLASTLGLVDVADQPELINLEKASKGRDAEKTVRERLISLQMETTGLIDPDSKAPLTVVQSIDRGLLEREEAVRLLTKQVVDGGIIHHISGMRLSVDNAFRHGLIGEDLAEKLKRVENLNIHQIFNPETKENISLPKAIKLDLITSDLKREIQEVQAFTGNFVDLISGQRLTLAEAKKEGLLTNEAVLSPGMMHGIVDPENCRIVPYSELVKKCKIDIESGQRYLEVIPFSDIKDGVSDKVLTLSQAIQLGKVDFASTLKVLEAQANTGGIIDTATGKRLTLASALEEKLVDENMVRIIASHQVLNGGIVDIFSDQRVTLVEAIEKRLISPELANMIQIDSSEFSDHRAQIEKQEGIEVCALQNEFLGKDMLIACNQTAEMSCNKVEESERLFQVENQSAQEKVKVRVSDGEQAKKSREISLKEFGCKDQRKPRMSSDAKEFISIINPHNLKGKSLGQVSLTHPYSECDFKLKEVARNNMGNDTNEEQEKAVTKIEIISHMKQSTSCLDSEEIRENQGEVILEVQETYCETSGKLPSEQVLQQPMNARVKSKREKREVIVEESIRTCKPAFLSEEKLYQETAIRDEHDSHIKSQPREMTSSEKGKEADTEMGFSITFKIEESSSQVVPQGISVKHLDALTLFSSKQANEGKVNNLSLCLTLKPEENLSREIACGAQSEPFPCMTPRPEGLHYQESDGKAQVTGPSQISKTDKSFQGTTRQETNYQDSWVTSKTKETKHQISSSNECKEKSYQEVSFDPARGLKLEEITVSRPDSKEVRYLEFSDRKDLHHQGSKSDDKLCGTLKSEIATQELTGEKFLEMANPNVAGLEAGSIEDIVTQRGSRVLGSFLPEKLFKGVSQKENTGQQNAIISPTVLETSEEKTVSLTVCSAVKTEKTPQEKLRESPGSEQTPFMTAPEGKGNGGVNPEPFRATQNVFTRQLCLEHDEKLVSYLSLLRNIEMRTKQIQPLELNLAELQDLLCQAKVLERELKDLTTLVSQELECVNQIIISQPQEVPAQLLKALEKDAKNLQKSLSSVSDTWNSRLLHFQNAVEIEKTKVLNQHTQLEGRLQDLRAWVGNKNLILNSKGSNSEIDVDSLNLCLQQYEDLKQPMAERKAQLDALAFDIQFFISEHAQDLSPQQNRQMLRLLNELQRSFQDILEQTAAQVDALQGHLQQMEQEALVKTLQKQQNTCHQQLEDLCSWVGQAERALAGHQGRTTQQDLSALQKNQSDLKDLQDDIQNRATSFATVVKDIEGFMEENQTKLSPRELTALREKLHQAKEQYEALQEETRVAQKELEEAVTSALQQETEKSKAAKELAENKKKIDALLDWVTSVGSSGGQLLTNLPGMEQLSGASLEKGALDTTDGYMGVNQAPEKLDKQCEMMKARHQELLSQQQNFILATQSAQAFLDQHGHNLTPEEQQMLQQKLGELKEQYSTSLAQSEAELKQVQTLQDELQKFLQDHKEFESWLERSEKELENMHKGGSSPETLPSLLKRQGSFSEDVISHKGDLRFVTISGQKVLDMENSFKEGKEPSEIGNLVKDKLKDATERYTALHSKCTRLGSHLNMLLGQYHQFQNSADSLQAWMQACEANVEKLLSDTVASDPGVLQEQLATTKQLQEELAEHQVPVEKLQKVARDIMEIEGEPAPDHRHVQETTGLGMVAHACNPGTLGG

SEQ ID NO: 10326 - protein, 4134 aa, Artificial Sequence
  Synthetic polypeptide
MSSSDEETLSERSCRSERSCRSERSYRSERSGSLSPCPPGDTLPWNLPLHEQKKRKSQDSVLDPAERAVVRVADERDRVQKKTFTKWVNKHLMKVRKHINDLYEDLRDGHNLISLLEVLSGIKLEPAGLKTLRLVSMPSWCHTNNEEQAEEDDDDVPREKGRMRFHRLQNVQIALDFLKQRQVKLVNIRNDDITDGNPKLTLGLIWTIILHFQISDIYISGESGDMSAKEKLLLWTQKVTAGYTGIKCTNFSSCWSDGKMFNALIHRYRPDLVDMERVQIQSNRENLEQAFEVAERLGVTRLLDAEDVDVPSPDEKSVITYVSSIYDAFPKVPEGGEGISATEVDSRWQEYQSRVDSLIPWIKQHTILMSDKTFPQNPVELKALYNQYIHFKETEILAKEREKGRIEELYKLLEVWIEFGRIKLPQGYHPNDVEEEWGKLIIEMLEREKSLRPAVERLELLLQIANKIQNGALNCEEKLTLAKNTLQADAAHLESGQPVQCESDVIMYIQECEGLIRQLQVDLQILRDENYYQLEELAFRVMRLQDELVTLRLECTNLYRKGHFTSLELVPPSTLTTTHLKAEPLTKATHSSSTSWFRKPMTRAELVAISSSEDEGNLRFVYELLSWVEEMQMKLERAEWGNDLPSVELQLETQQHIHTSVEELGSSVKEARLYEGKMSQNFHTSYAETLGKLETQYCKLKETSSFRMRHLQSLHKFVSRATAELIWLNEKEEEELAYDWSDNNSNISAKRNYFSELTMELEEKQDVFRSLQDTAELLSLENHPAKQTVEAYSAAVQSQLQWMKQLCLCVEQHVKENTAYFQFFSDARELESFLRNLQDSIKRKYSCDHNTSLSRLEDLLQDSMDEKEQLIQSKSSVASLVGRSKTIVQLKPRSPDHVLKNTISVKAVCDYRQIEITICKNDECVLEDNSQRTKWKVISPTGNEAMVPSVCFLIPPPNKDAIEMASRVEQSYQKVMALWHQLHVNTKSLISWNYLRKDLDLVQTWNLEKLRSSAPGECHQIMKNLQAHYEDFLQDSRDSVLFSVADRLRLEEEVEACKARFQHLMKSMENEDKEETVAKMYISELKNIRLRLEEYEQRVVKRIQSLASSRTDRDAWQDNALRIAEQEHTQEDLQQLRSDLDAVSMKCDSFLHQSPSSSSVPTLRSELNLLVEKMDHVYGLSTVYLNKLKTVDVIVRSIQDAELLVKGYEIKLSQEEVVLADLSALEAHWSTLRHWLSDVKDKNSVFSVLDEEIAKAKVVAEQMSRLTPERNLDLERYQEKGSQLQERWHRVIAQLEIRQSELESIQEVLGDYRACHGTLIKWIEETTAQQEMMKPGQAEDSRVLSEQLSQQTALFAEIERNQTKLDQCQKFSQQYSTIVKDYELQLMTYKAFVESQQKSPGKRRRMLSSSDAITQEFMDLRTRYTALVTLTTQHVKYISDALRRLEEEEKVVEEEKQEHVEKVKELLGWVSTLARNTQGKATSSETKESTDIEKAILEQQVLSEELTTKKEQVSEAIKTSQIFLAKHGHKLSEKEKKQISEQLNALNKAYHDLCDGSANQLQQLQSQLAHQTEQKECRAVAGVIDLGTVEIFPIFKAMQKGLLDQDTGLVLLESQVIMSGLIAPETGENLSLEEGIARNLINPQMYQQLRELQDALALISRLTESRGPLSVVEAIEKRIISETVGLKILEAHLATGGFSLSPSENCINLEEAFHQGLISAWLHSVLESYLRTSKNLIDPNTAEKIGLLDLMQRCIVHQESGFKLLPVKQLAGGMVSLKSGRKVSIFRAVQEGLIDRQVTVRLLEAQLFAGGIVDPRTGHRLTVEEAVRHNLIDQDMACAILIRQLQTGGIIDTVTGQRLTIDEAVSNDLVAAKIALVILESLWSFMGLLWPESGEILPITDALEQGIVSTELAHKILSNRQHIKALFLPATTEILSWKKAIESGILDRDLANNLKSICIPDVMPHMQLADSAEQNINPGAAVLPCSKSHPKATASQSENLLFQLMTHSYINVQNGQRLLLLDKELMETLTSRDEYQTSPPKVVEIGHQRQKTPEGLQESANVKISGTFSSGWTVRLPEFQFSSQNKEYPDREDCTTEKGKKTTVETEDSSVENPEQDLFVEQKERNPNIDALKVINKVKLEVQRQLIGTQREDQTAVSVRENASRGHLLTIPPAEAEGVPLVVDKDVFSVETPKKEHQPLRNTSFTCQNEQAHTLETEYIHDETGGSHIKPQSKKLQVQVKKTLGIKLELKSETDGNVHPLDKKEMLKKTFLAKDDHKESQEAQNIAGGSMMMSEKTDEEDSGREIFLSCSHPLELLEEATLNVLSAQLLDGGIFHEQTGQKLLLNEAISRGIVPSHTAVKLMEKLNMFQGFFDSQTCESLTTEEVINEGLMDEKLLHNVLMADKAISGVLDPRTQTLCSVKDAVTVGLLDKETATRILERQVVTGGIIDLKRGKKVSVTLASTLGLVDVADQPELINLEKASKGRDAEKTVRERLISLQMETTGLIDPDSKAPLTVVQSIDRGLLEREEAVRLLTKQVVDGGIIHHISGMRLSVDNAFRHGLIGEDLAEKLKRVENLNIHQIFNPETKENISLPKAIKLDLITSDLKREIQEVQAFTGNFVDLISGQRLTLAEAKKEGLLTNEAVLSPGMMHGIVDPENCRIVPYSELVKKCKIDIESGQRYLEVIPFSDIKDGVSDKVLTLSQAIQLGKVDFASTLKVLEAQANTGGIIDTATGKRLTLASALEEKLVDENMVRIIASHQVLNGGIVDIFSDQRVTLVEAIEKRLISPELANMIQIDSSEFSDHRAQIEKQEGIEVCALQNEFLGKDMLIACNQTAEMSCNKVEESERLFQVENQSAQEKVKVRVSDGEQAKKSREISLKEFGCKDQRKPRMSSDAKEFISIINPHNLKGKSLGQVSLTHPYSECDFKLKEVARNNMGNDTNEEQEKAVTKIEIISHMKQSTSCLDSEEIRENQGEVILEVQETYCETSGKLPSEQVLQQPMNARVKSKREKREVIVEESIRTCKPAFLSEEKLYQETAIRDEHDSHIKSQPREMTSSEKGKEADTEMGFSITFKIEESSSQVVPQGISVKHLDALTLFSSKQANEGKVNNLSLCLTLKPEENLSREIACGAQSEPFPCMTPRPEGLHYQESDGKAQVTGPSQISKTDKSFQGTTRQETNYQDSWVTSKTKETKHQISSSNECKEKSYQEVSFDPARGLKLEEITVSRPDSKEVRYLEFSDRKDLHHQGSKSDDKLCGTLKSEIATQELTGEKFLEMANPNVAGLEAGSIEDIVTQRGSRVLGSFLPEKLFKGVSQKENTGQQNAIISPTVLETSEEKTVSLTVCSAVKTEKTPQEKLRESPGSEQTPFMTAPEGKGNGGVNPEPFRATQNVFTRQLCLEHDEKLVSYLSLLRNIEMRTKQIQPLELNLAELQDLLCQAKVLERELKDLTTLVSQELECVNQIIISQPQEVPAQLLKALEKDAKNLQKSLSSVSDTWNSRLLHFQNAVEIEKTKVLNQHTQLEGRLQDLRAWVGNKNLILNSKGSNSEIDVDSLNLCLQQYEDLKQPMAERKAQLDALAFDIQFFISEHAQDLSPQQNRQMLRLLNELQRSFQDILEQTAAQVDALQGHLQQMEQEALVKTLQKQQNTCHQQLEDLCSWVGQAERALAGHQGRTTQQDLSALQKNQSDLKDLQDDIQNRATSFATVVKDIEGFMEENQTKLSPRELTALREKLHQAKEQYEALQEETRVAQKELEEAVTSALQQETEKSKAAKELAENKKKIDALLDWVTSVGSSGGQLLTNLPGMEQLSGASLEKGALDTTDGYMGVNQAPEKLDKQCEMMKARHQELLSQQQNFILATQSAQAFLDQHGHNLTPEEQQMLQQKLGELKEQYSTSLAQSEAELKQVQTLQDELQKFLQDHKEFESWLERSEKELENMHKGGSSPETLPSLLKRQGSFSEDVISHKGDLRFVTISGQKVLDMENSFKEGKEPSEIGNLVKDKLKDATERYTALHSKCTRLGSHLNMLLGQYHQFQNSADSLQAWMQACEANVEKLLSDTVASDPGVLQEQLATTKQLQEELAEHQVPVEKLQKVARDIMEIEGEPAPDHRHVQETTGLGMVAHACNPGTLGG

SEQ ID NO: 10327 - protein, 4102 aa, Artificial Sequence
  Synthetic polypeptide
MSSSDEETLSERSCRSERSCRSERSYRSERSGSLSPCPPGDTLPWNLPLHEQKKRKSQDSVLDPAERAVVRVADERDRVQKKTFTKWVNKHLMKVRKHINDLYEDLRDGHNLISLLEVLSGIKLPREKGRMRFHRLQNVQIALDFLKQRQVKLVNIRNDDITDGNPKLTLGLIWTIILHFQISDIYISGESGDMSAKEKLLLWTQKVTAGYTGIKCTNFSSCWSDGKMFNALIHRYRPDLVDMERVQIQSNRENLEQAFEVAERLGVTRLLDAEDVDVPSPDEKSVITYVSSIYDAFPKVPEGGEGISATEVDSRWQEYQSRVDSLIPWIKQHTILMSDKTFPQNPVELKALYNQYIHFKETEILAKEREKGRIEELYKLLEVWIEFGRIKLPQGYHPNDVEEEWGKLIIEMLEREKSLRPAVERLELLLQIANKIQNGALNCEEKLTLAKNTLQADAAHLESGQPVQCESDVIMYIQECEGLIRQLQVDLQILRDENYYQLEELAFRVMRLQDELVTLRLECTNLYRKGHFTSLELVPPSTLTTTHLKAEPLTKATHSSSTSWFRKPMTRAELVAISSSEDEGNLRFVYELLSWVEEMQMKLERAEWGNDLPSVELQLETQQHIHTSVEELGSSVKEARLYEGKMSQNFHTSYAETLGKLETQYCKLKETSSFRMRHLQSLHKFVSRATAELIWLNEKEEEELAYDWSDNNSNISAKRNYFSELTMELEEKQDVFRSLQDTAELLSLENHPAKQTVEAYSAAVQSQLQWMKQLCLCVEQHVKENTAYFQFFSDARELESFLRNLQDSIKRKYSCDHNTSLSRLEDLLQDSMDEKEQLIQSKSSVASLVGRSKTIVQLKPRSPDHVLKNTISVKAVCDYRQIEITICKNDECVLEDNSQRTKWKVISPTGNEAMVPSVCFLIPPPNKDAIEMASRVEQSYQKVMALWHQLHVNTKSLISWNYLRKDLDLVQTWNLEKLRSSAPGECHQIMKNLQAHYEDFLQDSRDSVLFSVADRLRLEEEVEACKARFQHLMKSMENEDKEETVAKMYISELKNIRLRLEEYEQRVVKRIQSLASSRTDRDAWQDNALRIAEQEHTQEDLQQLRSDLDAVSMKCDSFLHQSPSSSSVPTLRSELNLLVEKMDHVYGLSTVYLNKLKTVDVIVRSIQDAELLVKGYEIKLSQEEVVLADLSALEAHWSTLRHWLSDVKDKNSVFSVLDEEIAKAKVVAEQMSRLTPERNLDLERYQEKGSQLQERWHRVIAQLEIRQSELESIQEVLGDYRACHGTLIKWIEETTAQQEMMKPGQAEDSRVLSEQLSQQTALFAEIERNQTKLDQCQKFSQQYSTIVKDYELQLMTYKAFVESQQKSPGKRRRMLSSSDAITQEFMDLRTRYTALVTLTTQHVKYISDALRRLEEEEKVVEEEKQEHVEKVKELLGWVSTLARNTQGKATSSETKESTDIEKAILEQQVLSEELTTKKEQVSEAIKTSQIFLAKHGHKLSEKEKKQISEQLNALNKAYHDLCDGSANQLQQLQSQLAHQTEQKECRAVAGVIDLGTVEIFPIFKAMQKGLLDQDTGLVLLESQVIMSGLIAPETGENLSLEEGIARNLINPQMYQQLRELQDALALISRLTESRGPLSVVEAIEKRIISETVGLKILEAHLATGGFSLSPSENCINLEEAFHQGLISAWLHSVLESYLRTSKNLIDPNTAEKIGLLDLMQRCIVHQESGFKLLPVKQLAGGMVSLKSGRKVSIFRAVQEGLIDRQVTVRLLEAQLFAGGIVDPRTGHRLTVEEAVRHNLIDQDMACAILIRQLQTGGIIDTVTGQRLTIDEAVSNDLVAAKIALVILESLWSFMGLLWPESGEILPITDALEQGIVSTELAHKILSNRQHIKALFLPATTEILSWKKAIESGILDRDLANNLKSICIPDVMPHMQLADSAEQNINPGAAVLPCSKSHPKATASQSENLLFQLMTHSYINVQNGQRLLLLDKELMETLTSRDEYQTSPPKVVEIGHQRQKTPEGLQESANVKISGTFSSGWTVRLPEFQFSSQNKEYPDREDCTTEKGKKTTVETEDSSVENPEQDLFVEQKERNPNIDALKVINKVKLEVQRQLIGTQREDQTAVSVRENASRGHLLTIPPAEAEGVPLVVDKDVFSVETPKKEHQPLRNTSFTCQNEQAHTLETEYIHDETGGSHIKPQSKKLQVQVKKTLGIKLELKSETDGNVHPLDKKEMLKKTFLAKDDHKESQEAQNIAGGSMMMSEKTDEEDSGREIFLSCSHPLELLEEATLNVLSAQLLDGGIFHEQTGQKLLLNEAISRGIVPSHTAVKLMEKLNMFQGFFDSQTCESLTTEEVINEGLMDEKLLHNVLMADKAISGVLDPRTQTLCSVKDAVTVGLLDKETATRILERQVVTGGIIDLKRGKKVSVTLASTLGLVDVADQPELINLEKASKGRDAEKTVRERLISLQMETTGLIDPDSKAPLTVVQSIDRGLLEREEAVRLLTKQVVDGGIIHHISGMRLSVDNAFRHGLIGEDLAEKLKRVENLNIHQIFNPETKENISLPKAIKLDLITSDLKREIQEVQAFTGNFVDLISGQRLTLAEAKKEGLLTNEAVLSPGMMHGIVDPENCRIVPYSELVKKCKIDIESGQRYLEVIPFSDIKDGVSDKVLTLSQAIQLGKVDFASTLKVLEAQANTGGIIDTATGKRLTLASALEEKLVDENMVRIIASHQVLNGGIVDIFSDQRVTLVEAIEKRLISPELANMIQIDSSEFSDHRAQIEKQEGIEVCALQNEFLGKDMLIACNQTAEMSCNKVEESERLFQVENQSAQEKVKVRVSDGEQAKKSREISLKEFGCKDQRKPRMSSDAKEFISIINPHNLKGKSLGQVSLTHPYSECDFKLKEVARNNMGNDTNEEQEKAVTKIEIISHMKQSTSCLDSEEIRENQGEVILEVQETYCETSGKLPSEQVLQQPMNARVKSKREKREVIVEESIRTCKPAFLSEEKLYQETAIRDEHDSHIKSQPREMTSSEKGKEADTEMGFSITFKIEESSSQVVPQGISVKHLDALTLFSSKQANEGKVNNLSLCLTLKPEENLSREIACGAQSEPFPCMTPRPEGLHYQESDGKAQVTGPSQISKTDKSFQGTTRQETNYQDSWVTSKTKETKHQISSSNECKEKSYQEVSFDPARGLKLEEITVSRPDSKEVRYLEFSDRKDLHHQGSKSDDKLCGTLKSEIATQELTGEKFLEMANPNVAGLEAGSIEDIVTQRGSRVLGSFLPEKLFKGVSQKENTGQQNAIISPTVLETSEEKTVSLTVCSAVKTEKTPQEKLRESPGSEQTPFMTAPEGKGNGGVNPEPFRATQNVFTRQLCLEHDEKLVSYLSLLRNIEMRTKQIQPLELNLAELQDLLCQAKVLERELKDLTTLVSQELECVNQIIISQPQEVPAQLLKALEKDAKNLQKSLSSVSDTWNSRLLHFQNAVEIEKTKVLNQHTQLEGRLQDLRAWVGNKNLILNSKGSNSEIDVDSLNLCLQQYEDLKQPMAERKAQLDALAFDIQFFISEHAQDLSPQQNRQMLRLLNELQRSFQDILEQTAAQVDALQGHLQQMEQEALVKTLQKQQNTCHQQLEDLCSWVGQAERALAGHQGRTTQQDLSALQKNQSDLKDLQDDIQNRATSFATVVKDIEGFMEENQTKLSPRELTALREKLHQAKEQYEALQEETRVAQKELEEAVTSALQQETEKSKAAKELAENKKKIDALLDWVTSVGSSGGQLLTNLPGMEQLSGASLEKGALDTTDGYMGVNQAPEKLDKQCEMMKARHQELLSQQQNFILATQSAQAFLDQHGHNLTPEEQQMLQQKLGELKEQYSTSLAQSEAELKQVQTLQDELQKFLQDHKEFESWLERSEKELENMHKGGSSPETLPSLLKRQGSFSEDVISHKGDLRFVTISGQKVLDMENSFKEGKEPSEIGNLVKDKLKDATERYTALHSKCTRLGSHLNMLLGQYHQFQNSADSLQAWMQACEANVEKLLSDTVASDPGVLQEQLATTKQLQEELAEHQVPVEKLQKVARDIMEIEGEPAPDHRHVQETTGLGMVAHACNPGTLGG

SEQ ID NO: 10328 - protein, 2035 aa, Artificial Sequence
  Synthetic polypeptide
MSSSDEETLSERSCRSERSCRSERSYRSERSGSLSPCPPGDTLPWNLPLHEQKKRKSQDSVLDPAERAVVRVADERDRVQKKTFTKWVNKHLMKVRKHINDLYEDLRDGHNLISLLEVLSGIKLPREKGRMRFHRLQNVQIALDFLKQRQVKLVNIRNDDITDGNPKLTLGLIWTIILHFQISDIYISGESGDMSAKEKLLLWTQKVTAGYTGIKCTNFSSCWSDGKMFNALIHRYRPDLVDMERVQIQSNRENLEQAFEVAERLGVTRLLDAEDVDVPSPDEKSVITYVSSIYDAFPKVPEGGEGISATEVDSRWQEYQSRVDSLIPWIKQHTILMSDKTFPQNPVELKALYNQYIHFKETEILAKEREKGRIEELYKLLEVWIEFGRIKLPQGYHPNDVEEEWGKLIIEMLEREKSLRPAVERLELLLQIANKIQNGALNCEEKLTLAKNTLQADAAHLESGQPVQCESDVIMYIQECEGLIRQLQVDLQILRDENYYQLEELAFRVMRLQDELVTLRLECTNLYRKGHFTSLELVPPSTLTTTHLKAEPLTKATHSSSTSWFRKPMTRAELVAISSSEDEGNLRFVYELLSWVEEMQMKLERAEWGNDLPSVELQLETQQHIHTSVEELGSSVKEARLYEGKMSQNFHTSYAETLGKLETQYCKLKETSSFRMRHLQSLHKFVSRATAELIWLNEKEEEELAYDWSDNNSNISAKRNYFSELTMELEEKQDVFRSLQDTAELLSLENHPAKQTVEAYSAAVQSQLQWMKQLCLCVEQHVKENTAYFQFFSDARELESFLRNLQDSIKRKYSCDHNTSLSRLEDLLQDSMDEKEQLIQSKSSVASLVGRSKTIVQLKPRSPDHVLKNTISVKAVCDYRQIEITICKNDECVLEDNSQRTKWKVISPTGNEAMVPSVCFLIPPPNKDAIEMASRVEQSYQKVMALWHQLHVNTKSLISWNYLRKDLDLVQTWNLEKLRSSAPGECHQIMKNLQAHYEDFLQDSRDSVLFSVADRLRLEEEVEACKARFQHLMKSMENEDKEETVAKMYISELKNIRLRLEEYEQRVVKRIQSLASSRTDRDAWQDNALRIAEQEHTQEDLQQLRSDLDAVSMKCDSFLHQSPSSSSVPTLRSELNLLVEKMDHVYGLSTVYLNKLKTVDVIVRSIQDAELLVKGYEIKLSQEEVVLADLSALEAHWSTLRHWLSDVKDKNSVFSVLDEEIAKAKVVAEQMSRLTPERNLDLERYQEKGSQLQERWHRVIAQLEIRQSELESIQEVLGDYRACHGTLIKWIEETTAQQEMMKPGQAEDSRVLSEQLSQQTALFAEIERNQTKLDQCQKFSQQYSTIVKDYELQLMTYKAFVESQQKSPGKRRRMLSSSDAITQEFMDLRTRYTALVTLTTQHVKYISDALRRLEEEEKVVEEEKQEHVEKVKELLGWVSTLARNTQGKATSSETKESTDIEKAILEQQVLSEELTTKKEQVSEAIKTSQIFLAKHGHKLSEKEKKQISEQLNALNKAYHDLCDGSANQLQQLQSQLAHQTEQKTLQKQQNTCHQQLEDLCSWVGQAERALAGHQGRTTQQDLSALQKNQSDLKDLQDDIQNRATSFATVVKDIEGFMEENQTKLSPRELTALREKLHQAKEQYEALQEETRVAQKELEEAVTSALQQETEKSKAAKELAENKKKIDALLDWVTSVGSSGGQLLTNLPGMEQLSGASLEKGALDTTDGYMGVNQAPEKLDKQCEMMKARHQELLSQQQNFILATQSAQAFLDQHGHNLTPEEQQMLQQKLGELKEQYSTSLAQSEAELKQVQTLQDELQKFLQDHKEFESWLERSEKELENMHKGGSSPETLPSLLKRQGSFSEDVISHKGDLRFVTISGQKVLDMENSFKEGKEPSEIGNLVKDKLKDATERYTALHSKCTRLGSHLNMLLGQYHQFQNSADSLQAWMQACEANVEKLLSDTVASDPGVLQEQLATTKQLQEELAEHQVPVEKLQKVARDIMEIEGEPAPDHRHVQETTGLGMVAHACNPGTLGG

SEQ ID NO: 10329 - protein, 1169 aa, Artificial Sequence
  Synthetic polypeptide
  misc_feature (1)..(1): Xaa can be any naturally occurring amino acid
XKNTISVKAVCDYRQIEITICKNDECVLEDNSQRTKWKVISPTGNEAMVPSVCFLIPPPNKDAIEMASRVEQSYQKVMALWHQLHVNTKSLISWNYLRKDLDLVQTWNLEKLRSSAPGECHQIMKNLQAHYEDFLQDSRDSVLFSVADRLRLEEEVEACKARFQHLMKSMENEDKEETVAKMYISELKNIRLRLEEYEQRVVKRIQSLASSRTDRDAWQDNALRIAEQEHTQEDLQQLRSDLDAVSMKCDSFLHQSPSSSSVPTLRSELNLLVEKMDHVYGLSTVYLNKLKTVDVIVRSIQDAELLVKGYEIKLSQEEVVLADLSALEAHWSTLRHWLSDVKDKNSVFSVLDEEIAKAKVVAEQMSRLTPERNLDLERYQEKGSQLQERWHRVIAQLEIRQSELESIQEVLGDYRACHGTLIKWIEETTAQQEMMKPGQAEDSRVLSEQLSQQTALFAEIERNQTKLDQCQKFSQQYSTIVKDYELQLMTYKAFVESQQKSPGKRRRMLSSSDAITQEFMDLRTRYTALVTLTTQHVKYISDALRRLEEEEKVVEEEKQEHVEKVKELLGWVSTLARNTQGKATSSETKESTDIEKAILEQQVLSEELTTKKEQVSEAIKTSQIFLAKHGHKLSEKEKKQISEQLNALNKAYHDLCDGSANQLQQLQSQLAHQTEQKTLQKQQNTCHQQLEDLCSWVGQAERALAGHQGRTTQQDLSALQKNQSDLKDLQDDIQNRATSFATVVKDIEGFMEENQTKLSPRELTALREKLHQAKEQYEALQEETRVAQKELEEAVTSALQQETEKSKAAKELAENKKKIDALLDWVTSVGSSGGQLLTNLPGMEQLSGASLEKGALDTTDGYMGVNQAPEKLDKQCEMMKARHQELLSQQQNFILATQSAQAFLDQHGHNLTPEEQQMLQQKLGELKEQYSTSLAQSEAELKQVQTLQDELQKFLQDHKEFESWLERSEKELENMHKGGSSPETLPSLLKRQGSFSEDVISHKGDLRFVTISGQKVLDMENSFKEGKEPSEIGNLVKDKLKDATERYTALHSKCTRLGSHLNMLLGQYHQFQNSADSLQAWMQACEANVEKLLSDTVASDPGVLQEQLATTKQLQEELAEHQVPVEKLQKVARDIMEIEGEPAPDHRHVQETTGLGMVAHACNPGTLGG

SEQ ID NO: 10330 - protein, 356 aa, Artificial Sequence
  Synthetic polypeptide
MAEAPPRRLGLGPPPGDAPRAELVALTAVQSEQGEAGGGGSPRRLGLLGSPLPPGAPLPGPGSGSGSACGQRSSAAHKRYRRLQNWVYNVLERPRGWAFVYHVFIFLLVFSCLVLSVLSTIQEHQELANECLLILEFVMIVVFGLEYIVRVWSAGCCCRYRGWQGRFRFARKPFCVIDFIVFVASVAVIAAGTQGNIFATSALRSMRFLQILRMVRMDRRGGTWKLLGSVVYAHSKELITAWYIGFLVLIFASFLVYLAEKDANSDFSSYADSLWWGTITLTTIGYGDKTPHTWLGRVLAAGFALLGISFFALPAGILGSGFALKVQEQHRQKHFEKRRMPAANLIQSFLPRPYFL

SEQ ID NO: 10331 - protein, 252 aa, Artificial Sequence
  Synthetic polypeptide
  misc_feature (1)..(1): Xaa can be any naturally occurring amino acid
XFLLVFSCLVLSVLSTIQEHQELANECLLILEFVMIVVFGLEYIVRVWSAGCCCRYRGWQGRFRFARKPFCVIDFIVFVASVAVIAAGTQGNIFATSALRSMRFLQILRMVRMDRRGGTWKLLGSVVYAHSKELITAWYIGFLVLIFASFLVYLAEKDANSDFSSYADSLWWGTITLTTIGYGDKTPHTWLGRVLAAGFALLGISFFALPAGILGSGFALKVQEQHRQKHFEKRRMPAANLIQSFLPRPYFL

SEQ ID NO: 10332 - protein, 411 aa, Artificial Sequence
  Synthetic polypeptide
MAEAPPRRLGLGPPPGDAPRAELVALTAVQSEQGEAGGGGSPRRLGLLGSPLPPGAPLPGPGSGSGSACGQRSSAAHKRYRRLQNWVYNVLERPRGWAFVYHVFIFLLVFSCLVLSVLSTIQEHQELANECLLILEFVMIVVFGLEYIVRVWSAGCCCRYRGWQGRFRFARKPFCVIDFIVFVASVAVIAAGTQGNIFATSALRSMRFLQILRMVRMDRRGGTWKLLGSVVYAHSKELITAWYIGFLVLIFASFLVYLAEKDANSDFSSYADSLWWGTITLTTIGYGDKTPHTWLGRVLAAGFALLGISFFALPAGILGSGFALKVQEQHRQKHFEKRRMPAANLIQAAWRLYSTDMSRAYLTATWYYYDSILPSFRYLDLSPSPQDQNLWRRDTAFCICNMVPRGSLCKV

SEQ ID NO: 10333 - protein, 307 aa, Artificial Sequence
  Synthetic polypeptide
  misc_feature (1)..(1): Xaa can be any naturally occurring amino acid
XFLLVFSCLVLSVLSTIQEHQELANECLLILEFVMIVVFGLEYIVRVWSAGCCCRYRGWQGRFRFARKPFCVIDFIVFVASVAVIAAGTQGNIFATSALRSMRFLQILRMVRMDRRGGTWKLLGSVVYAHSKELITAWYIGFLVLIFASFLVYLAEKDANSDFSSYADSLWWGTITLTTIGYGDKTPHTWLGRVLAAGFALLGISFFALPAGILGSGFALKVQEQHRQKHFEKRRMPAANLIQAAWRLYSTDMSRAYLTATWYYYDSILPSFRYLDLSPSPQDQNLWRRDTAFCICNMVPRGSLCKV

SEQ ID NO: 10334 - protein, 40 aa, Artificial Sequence
  Synthetic polypeptide
MVWRVPPFLLPILFLASHVETESRMMVAMGCREEEMGSFV

SEQ ID NO: 10335 - protein, 125 aa, Artificial Sequence
  Synthetic polypeptide
MAASCVLLHTGQKMPLIGLGTWKSEPGQVKAAVKYALSVGYRHIDCAAIYGNEPEIGEALKEDVGPGKAVPREELFVTSKLWNTKHHPEDVEPALRKTLADLQLEYLDLYLMHWPYAFERGGLRQ

SEQ ID NO: 10336 - protein, 116 aa, Artificial Sequence
  Synthetic polypeptide
MFSPTSAPALFLTKVPFSADCALATSPLAIFLNPRAHSSPGTPCSSRPLPWSCRTSNRKSLIVTSSTSPTLPRPHSPLHGHTVPATWEAEVGASPDHLSPWRLRSYHCTPAWAATE

SEQ ID NO: 10337 - protein, 231 aa, Artificial Sequence
  Synthetic polypeptide
MKRSRCRDRPQPPPPDRREDGVQRAAELSQSLPPRRRAPPGRQRLEERTGPAGPEGKEQDVVTGVSPLLFRKLSNPDIFSSTGKVKLQRQLSQDDCKLWRGNLASSLSGKQLLPLSSSVHSSVGQVTWQSSGEASNLVRMRNQSLGQSAPSLTAGLKELSLPRRGSFCRTSNRKSLIVTSSTSPTLPRPHSPLHGHTVPATWEAEVGASPDHLSPWRLRSYHCTPAWAATE

SEQ ID NO: 10338 - protein, 286 aa, Artificial Sequence
  Synthetic polypeptide
MFSPTSAPALFLTKVPFSADCALATSPLAIFLNPRAHSSPGTPCSSRPLPWSCRTSNRKSLIVTSSTSPTLPRPHSPLHGHTGNSPLDSPRNFSPNAPAHFSFVPARRTDGRRWSLASLPSSGYGTNTPSSTVSSSCSSQEKLHQLPFQPTADELHFLTKHFSTESVPDEEGRQSPAMRPRSRSLSPGRSPVSFDSEIIMMNHVYKERFPKATAQMEERLAEFISSNTPDSVLPLADGALSFIHHQVIEMARDCLDKSRSGLITSQYFYELQDNLEKLLQDEHPVS

SEQ ID NO: 10339 - protein, 401 aa, Artificial Sequence
  Synthetic polypeptide
MKRSRCRDRPQPPPPDRREDGVQRAAELSQSLPPRRRAPPGRQRLEERTGPAGPEGKEQDVVTGVSPLLFRKLSNPDIFSSTGKVKLQRQLSQDDCKLWRGNLASSLSGKQLLPLSSSVHSSVGQVTWQSSGEASNLVRMRNQSLGQSAPSLTAGLKELSLPRRGSFCRTSNRKSLIVTSSTSPTLPRPHSPLHGHTGNSPLDSPRNFSPNAPAHFSFVPARRTDGRRWSLASLPSSGYGTNTPSSTVSSSCSSQEKLHQLPFQPTADELHFLTKHFSTESVPDEEGRQSPAMRPRSRSLSPGRSPVSFDSEIIMMNHVYKERFPKATAQMEERLAEFISSNTPDSVLPLADGALSFIHHQVIEMARDCLDKSRSGLITSQYFYELQDNLEKLLQDEHPVS

SEQ ID NO: 10340 - protein, 893 aa, Artificial Sequence
  Synthetic polypeptide
MGLPEPGPLRLLALLLLLLLLLLLQLQHLAAAAADPLLGGQGPAKDCEKDQFQCRNERCIPSVWRCDEDDDCLDHSDEDDCPKKTCADSDFTCDNGHCIHERWKCDGEEECPDGSDESEATCTKQVCPAEKLSCGPTSHKCVPASWRCDGEKDCEGGADEAGCATLCAPHEFQCGNRSCLAAVFVCDGDDDCGDGSDERGCADPACGPREFRCGGDGGGACIPERWVCDRQFDCEDRSDEAAELCGRPGPGATSAPAACATASQFACRSGECVHLGWRCDGDRDCKDKSDEADCPLGTCRGDEFQCGDGTCVLAIKHCNQEQDCPDGSDEAGCLQGLNECLHNNGGCSHICTDLKIGFECTCPAGFQLLDQKTCGDIDECKDPDACSQICVNYKGYFKCECYPGYEMDLLTKNCKAAAGKSPSLIFTNRHEVRRIDLVKRNYSRLIPMLKNVVALDVEVATNRIYWCDLSYRKIYSAYMDKASDPKEQEVLIDEQLHSPEGLAVDWVHKHIYWTDSGNKTISVATVDGGRRRTLFSRNLSEPRAIAVDPLRGFMYWSDWGDQAKIEKSGLNGVDRQTLVSDNIEWPNGITLDLLSQRLYWVDSKLHQLSSIDFSGGNRKTLISSTDFLSHPFGIAVFEDKVFWTDLENEAIFSANRLNGLEISILAENLNNPHDIVIFHELKQPRAPDACELSVQPNGGCEYLCLPAPQISSHSPKYTCACPDTMWLGPDMKRCYRAPQSTSTTTLASTMTRTVPATTRAPGTTVHRSTYQNHSTETPSLTAAVPSSVSVPRAPSISPSTLSPATSNHSQHYANEDSKMGSTVTAAVIGIIVPIVVIALLCMSGYLIWRNWKRKNTKSMNFDNPVYRKTTEEEDEDELHIGRTAQIGHVYPAM

SEQ ID NO: 10341 - protein, 689 aa, Artificial Sequence
  Synthetic polypeptide
MGLPEPGPLRLLALLLLLLLLLLLQLQHLAAAAADPLLGGQGPAKDCEKDQFQCRNERCIPSVWRCDEDDDCLDHSDEDDCPKKTCADSDFTCDNGHCIHERWKCDGEEECPDGSDESEATCTKQVCPAEKLSCGPTSHKCVPASWRCDGEKDCEGGADEAGCATSLGTCRGDEFQCGDGTCVLAIKHCNQEQDCPDGSDEAGCLQGLNECLHNNGGCSHICTDLKIGFECTCPAGFQLLDQKTCGDIDECKDPDACSQICVNYKGYFKCECYPGYEMDLLTKNCKAAAGKSPSLIFTNRHEVRRIDLVKRNYSRLIPMLKNVVALDVEVATNRIYWCDLSYRKIYSAYMDKASDPKEQEVLIDEQLHSPEGLAVDWVHKHIYWTDSGNKTISVATVDGGRRRTLFSRNLSEPRAIAVDPLRGFMYWSDWGDQAKIEKSGLNGVDRQTLVSDNIEWPNGITLDLLSQRLYWVDSKLHQLSSIDFSGGNRKTLISSTDFLSHPFGIAVFEDKVFWTDLENEAIFSANRLNGLEISILAENLNNPHDIVIFHELKQPRAPDACELSVQPNGGCEYLCLPAPQISSHSPKYTCACPDTMWLGPDMKRCYRDANEDSKMGSTVTAAVIGIIVPIVVIALLCMSGYLIWRNWKRKNTKSMNFDNPVYRKTTEEEDEDELHIGRTAQIGHVYPAM

SEQ ID NO: 10342 - protein, 723 aa, Artificial Sequence
  Synthetic polypeptide
MGLPEPGPLRLLALLLLLLLLLLLQLQHLAAAAADPLLGGQGPAKDCEKDQFQCRNERCIPSVWRCDEDDDCLDHSDEDDCPKKTCADSDFTCDNGHCIHERWKCDGEEECPDGSDESEATCTKQVCPAEKLSCGPTSHKCVPASWRCDGEKDCEGGADEAGCATWLNECLHNNGGCSHICTDLKIGFECTCPAGFQLLDQKTCGDIDECKDPDACSQICVNYKGYFKCECYPGYEMDLLTKNCKAAAGKSPSLIFTNRHEVRRIDLVKRNYSRLIPMLKNVVALDVEVATNRIYWCDLSYRKIYSAYMDKASDPKEQEVLIDEQLHSPEGLAVDWVHKHIYWTDSGNKTISVATVDGGRRRTLFSRNLSEPRAIAVDPLRGFMYWSDWGDQAKIEKSGLNGVDRQTLVSDNIEWPNGITLDLLSQRLYWVDSKLHQLSSIDFSGGNRKTLISSTDFLSHPFGIAVFEDKVFWTDLENEAIFSANRLNGLEISILAENLNNPHDIVIFHELKQPRAPDACELSVQPNGGCEYLCLPAPQISSHSPKYTCACPDTMWLGPDMKRCYRAPQSTSTTTLASTMTRTVPATTRAPGTTVHRSTYQNHSTETPSLTAAVPSSVSVPRAPSISPSTLSPATSNHSQHYANEDSKMGSTVTAAVIGIIVPIVVIALLCMSGYLIWRNWKRKNTKSMNFDNPVYRKTTEEEDEDELHIGRTAQIGHVYPAM

SEQ ID NO: 10343 - protein, 446 aa, Artificial Sequence
  Synthetic polypeptide
MLKNVVALDVEVATNRIYWCDLSYRKIYSAYMDKASDPKEQEVLIDEQLHSPEGLAVDWVHKHIYWTDSGNKTISVATVDGGRRRTLFSRNLSEPRAIAVDPLRGFMYWSDWGDQAKIEKSGLNGVDRQTLVSDNIEWPNGITLDLLSQRLYWVDSKLHQLSSIDFSGGNRKTLISSTDFLSHPFGIAVFEDKVFWTDLENEAIFSANRLNGLEISILAENLNNPHDIVIFHELKQPRAPDACELSVQPNGGCEYLCLPAPQISSHSPKYTCACPDTMWLGPDMKRCYRAPQSTSTTTLASTMTRTVPATTRAPGTTVHRSTYQNHSTETPSLTAAVPSSVSVPRAPSISPSTLSPATSNHSQHYANEDSKMGSTVTAAVIGIIVPIVVIALLCMSGYLIWRNWKRKNTKSMNFDNPVYRKTTEEEDEDELHIGRTAQIGHVYPAM

SEQ ID NO: 10344 - protein, 110 aa, Artificial Sequence
  Synthetic polypeptide
  misc_feature (1)..(1): Xaa can be any naturally occurring amino acid
XPSSVSVPRAPSISPSTLSPATSNHSQHYANEDSKMGSTVTAAVIGIIVPIVVIALLCMSGYLIWRNWKRKNTKSMNFDNPVYRKTTEEEDEDELHIGRTAQIGHVYPAM

SEQ ID NO: 10345 - protein, 165 aa, Artificial Sequence
  Synthetic polypeptide
MGLPEPGPLRLLALLLLLLLLLLLQLQHLAAAAADPLLGGQGPAKDCEKDQFQCRNERCIPSVWRCDEDDDCLDHSDEDDCPKKTCADSDFTCDNGHCIHERWKCDGEEECPDGSDESEATCTKQVCPAEKLSCGPTSHKCVPASWRCDGEKDCEGGADEAGCAT

SEQ ID NO: 10346 - protein, 84 aa, Artificial Sequence
  Synthetic polypeptide
MGLPEPGPLRLLALLLLLLLLLLLQLQHLAAAAADPLLGGQGPAKDCEKDQFQCRNERCIPSVWRCDEDDDCLDHSDEDDCRFF

SEQ ID NO: 10347 - protein, 102 aa, Artificial Sequence
  Synthetic polypeptide
MGLPEPGPLRLLALLLLLLLLLLLQLQHLAAAAADPLLGGQGPAKDCEKDQFQCRNERCIPSVWRCDEDDDCLDHSDEDDCLSSPDHLGSHNSCPSNIIGLF

SEQ ID NO: 10348 - protein, 134 aa, Artificial Sequence
  Synthetic polypeptide
MAEQLMTLAYDNGINLFDTAEVYAAGKAEVVLGNIIKKKGWRRSSLVITTKIFWGGKAETERGLSRKHIIEGLKASLERLQLEYVDVVFANRPDPNTPMEETVRAMTHVINQGMAMYWGTSRWSSMEIMNTSAR

SEQ ID NO: 10349 - protein, 249 aa, Artificial Sequence
  Synthetic polypeptide
MLSMTYSESLRSVSSRCHSEWALHPVRQTDTLELQRLREVRAAAQARNMESFLRMHGLSLDGCTAQRTGMKYRNLGKSGLRVSCLGLGTWVTFGGQITDEMAEQLMTLAYDNGINLFDTAEVYAAGKAEVVLGNIIKKKGWRRSSLVITTKIFWGGKAETERGLSRKHIIEGLKASLERLQLEYVDVVFANRPDPNTPMEGDPFSSSKSRTFIIEETVRAMTHVINQGMAMYWGTSRWSSMEIMNTSAR

SEQ ID NO: 10350 - protein, 187 aa, Artificial Sequence
  Synthetic polypeptide
MYPESTTGSPARLSLRQTGSPGMIYRNLGKSGLRVSCLGLGTWVTFGGQITDEMAEQLMTLAYDNGINLFDTAEVYAAGKAEVVLGNIIKKKGWRRSSLVITTKIFWGGKAETERGLSRKHIIEGLKASLERLQLEYVDVVFANRPDPNTPMEETVRAMTHVINQGMAMYWGTSRWSSMEIMNTSAR

SEQ ID NO: 10351 - protein, 201 aa, Artificial Sequence
  Synthetic polypeptide
MYPESTTGSPARLSLRQTGSPGMIYSTRYGSPKRQLQFYRNLGKSGLRVSCLGLGTWVTFGGQITDEMAEQLMTLAYDNGINLFDTAEVYAAGKAEVVLGNIIKKKGWRRSSLVITTKIFWGGKAETERGLSRKHIIEGLKASLERLQLEYVDVVFANRPDPNTPMEETVRAMTHVINQGMAMYWGTSRWSSMEIMNTSAR

SEQ ID NO: 10352 - protein, 266 aa, Artificial Sequence
  Synthetic polypeptide
MNQVTIQWDAVIALYILFSWCHGGITNINCSGHIWVEPATIFKMGMNISIYCQAAIKNCQPRKLHFYKNGIKERFQITRINKTTARLWYKNFLEPHASMYCTAECPKHFQETLICGKDISSGYPPDIPDEVTCVIYEYSGNMTCTWNAGKLTYIDTKYVVHVKSLETEEEQQYLTSSYINISTDSLQGGKKYLVWVQAANALGMEESKQLQIHLDDIVIPSAAVISRAETINATVPKTIIYWDSQTTIEKVSCEMRYKATTNQTWN

SEQ ID NO: 10353 - protein, 173 aa, Artificial Sequence
  Synthetic polypeptide
MILRPYQPCGTVKEFDTNFTYVQQSEFYLEPNIKYVFQVRCQETGKRYWQPWSSLFFHKTPETVPQVTSKAFQHDTWNSGLTVASISTGHLTSDNRGDIGLLLGMIVFAVMLSILSLIGIFNRSFRTGIKRRILLLIPKWLYEDIPNMKNSNVVKMLQPGVVVCSCDPSYLGS

SEQ ID NO: 10354 - protein, 428 aa, Artificial Sequence
  Synthetic polypeptide
MNQVTIQWDAVIALYILFSWCHGGITNINCSGHIWVEPATIFKMGMNISIYCQAAIKNCQPRKLHFYKNGIKERFQITRINKTTARLWYKNFLEPHASMYCTAECPKHFQETLICGKDISSGYPPDIPDEVTCVIYEYSGNMTCTWNAGKLTYIDTKYVVHVKSLETEEEQQYLTSSYINISTDSLQGGKKYLVWVQAANALGMEESKQLQIHLDDIVIPSAAVISRAETINATVPKTIIYWDSQTTIEKVSCEMRYKATTNQTWNVKEFDTNFTYVQQSEFYLEPNIKYVFQVRCQETGKRYWQPWSSLFFHKTPETVPQVTSKAFQHDTWNSGLTVASISTGHLTSDNRGDIGLLLGMIVFAVMLSILSLIGIFNRSFRTGIKRRILLLIPKWLYEDIPNMKNSNVVKMLQPGVVVCSCDPSYLGS

SEQ ID NO: 10355 - protein, 190 aa, Artificial Sequence
  Synthetic polypeptide
  misc_feature (1)..(1): Xaa can be any naturally occurring amino acid
XHFLLPPLSKKSLLPPTMILRPYQPCGTVKEFDTNFTYVQQSEFYLEPNIKYVFQVRCQETGKRYWQPWSSLFFHKTPETVPQVTSKAFQHDTWNSGLTVASISTGHLTSDNRGDIGLLLGMIVFAVMLSILSLIGIFNRSFRTGIKRRILLLIPKWLYEDIPNMKNSNVVKMLQPGVVVCSCDPSYLGS

SEQ ID NO: 10356 - protein, 173 aa, Artificial Sequence
  Synthetic polypeptide
MILRPYQPCGTVKEFDTNFTYVQQSEFYLEPNIKYVFQVRCQETGKRYWQPWSSLFFHKTPETVPQVTSKAFQHDTWNSGLTVASISTGHLTSDNRGDIGLLLGMIVFAVMLSILSLIGIFNRSFRTGIKRRILLLIPKWLYEDIPNMKNSNVVKMLQPGVVVCAYSPSYSGG

SEQ ID NO: 10357 - protein, 428 aa, Artificial Sequence
  Synthetic polypeptide
MNQVTIQWDAVIALYILFSWCHGGITNINCSGHIWVEPATIFKMGMNISIYCQAAIKNCQPRKLHFYKNGIKERFQITRINKTTARLWYKNFLEPHASMYCTAECPKHFQETLICGKDISSGYPPDIPDEVTCVIYEYSGNMTCTWNAGKLTYIDTKYVVHVKSLETEEEQQYLTSSYINISTDSLQGGKKYLVWVQAANALGMEESKQLQIHLDDIVIPSAAVISRAETINATVPKTIIYWDSQTTIEKVSCEMRYKATTNQTWNVKEFDTNFTYVQQSEFYLEPNIKYVFQVRCQETGKRYWQPWSSLFFHKTPETVPQVTSKAFQHDTWNSGLTVASISTGHLTSDNRGDIGLLLGMIVFAVMLSILSLIGIFNRSFRTGIKRRILLLIPKWLYEDIPNMKNSNVVKMLQPGVVVCAYSPSYSGG

SEQ ID NO: 10358 - protein, 190 aa, Artificial Sequence
  Synthetic polypeptide
  misc_feature (1)..(1): Xaa can be any naturally occurring amino acid
XHFLLPPLSKKSLLPPTMILRPYQPCGTVKEFDTNFTYVQQSEFYLEPNIKYVFQVRCQETGKRYWQPWSSLFFHKTPETVPQVTSKAFQHDTWNSGLTVASISTGHLTSDNRGDIGLLLGMIVFAVMLSILSLIGIFNRSFRTGIKRRILLLIPKWLYEDIPNMKNSNVVKMLQPGVVVCAYSPSYSGG

SEQ ID NO: 10359 - protein, 222 aa, Artificial Sequence
  Synthetic polypeptide
MDMMLLVQGACCSNQWLAAVLLSLCCLLPSCLPAGQSVDFPWAAVDNMMVRKGDTAVLRCYLEDGASKGAWLNRSSIIFAGGDKWSVDPRVSISTLNKRDYSLQIQNVDVTDDGPYTCSVQTQHTPRTMQVHLTVQVPPKIYDISNDMTVNEGTNVTLTCLATGKPEPSISWRHISPSAKPFENGQYLDIYGITRDQAGEYECSAENDVSFPDVRKVKVVVN

SEQ ID NO: 10360 - protein, 94 aa, Artificial Sequence
  Synthetic polypeptide
MQVHLTVQVPPKIYDISNDMTVNEGTNVTLTCLATGKPEPSISWRHISPSAKPFENGQYLDIYGITRDQAGEYECSAENDVSFPDVRKVKVVVN

SEQ ID NO: 10361 - protein, 84 aa, Artificial Sequence
  Synthetic polypeptide
GKDPVQCSRDVVICPDASLEDAKKEGPYDVVVLPGGNLGAQNLSESAAVKEILKEQENRKGLIAAICAGPGAVAHACNPSTLGG

SEQ ID NO: 10362 - protein, 123 aa, Artificial Sequence
  Synthetic polypeptide
MASKRALVILAKGAEEMETVIPVDVMRRAGIKVTVAGLAGKDPVQCSRDVVICPDASLEDAKKEGPYDVVVLPGGNLGAQNLSESAAVKEILKEQENRKGLIAAICAGPGAVAHACNPSTLGG

SEQ ID NO: 10363 - protein, 103 aa, Artificial Sequence
  Synthetic polypeptide
MASKRALVILAKGAEEMETVIPVDVMRRAGIKVTVAGLAGKDPVQCSRDVVICPDASLEDAKKESAAVKEILKEQENRKGLIAAICAGPGAVAHACNPSTLGG

SEQ ID NO: 10364 - protein, 17 aa, Artificial Sequence
  Synthetic polypeptide
MGNAATAKKGSEVESGL

SEQ ID NO: 10365 - protein, 254 aa, Artificial Sequence
  Synthetic polypeptide
MNECHYDKHMDFFYNRSNTDTVDDWTGTKLVIVLCVGTFFCLFIFFSNSLVIAAVIKNRKFHFPFYYLLANLAAADFFAGIAYVFLMFNTGPVSKTLTVNRWFLRQGLLDSSLTASLTNLLVIAVERHMSIMRMRVHSNLTKKRVTLLILLVWAIAIFMGAVPTLGWNCLCNISACSSLAPIYSRSYLVFWTVSNLMAFLIMVVVYLRIYVYVKRKTNVLSPHTSGSISRRRTPMKLMKTVMTVLDVMKLRILI

SEQ ID NO: 10366 - protein, 142 aa, Artificial Sequence; identical to SEQ ID NO: 1071
  Synthetic polypeptide

SEQ ID NO: 10367 - protein, 31 aa, Artificial Sequence
  Synthetic polypeptide
MARQPYRFPQARIPERGSGVFRLTVSPWIKE

SEQ ID NO: 10368 - protein, 104 aa, Artificial Sequence
  Synthetic polypeptide
MSILKIHAREIFDSRGNPTVEVDLFTSKGLFRAAVPSGASTGIYEALELRDNDKTRYMGKGVSKAVEHINKTIAPALVSKKSCLPSEDEDLPSLQLAKSEQQSL

SEQ ID NO: 10369 - protein, 83 aa, Artificial Sequence
  Synthetic polypeptide
MSILKIHAREIFDSRGNPTVEVDLFTSKGLFRAAVPSGASTGIYEALELRDNDKTRYMGKGVSKAVEHINKTIAPALVSKTLC

SEQ ID NO: 10370 - protein, 740 aa, Artificial Sequence
  Synthetic polypeptide
MITLTELKCLADAQSSYHILKPWWDVFWYYITLIMLLVAVLAGALQLTQSRVLCCLPCKVEFDNHCAVPWDILKASMNTSSNPGTPLPLPLRIQNDLHRQQYSYIDAVCYEKQLHWFAKFFPYLVLLHTLIFAACSNFWLHYPSTSSRLEHFVAILHKCFDSPWTTRALSETVAEQSVRPLKLSKSKILLSSSGCSADIDSGKQSLPYPQPGLESAGIESPTSSVLDKKEGEQAKAIFEKVKRFRMHVEQKDIIYRVYLKQIIVKVILFVLIITYVPYFLTHITLEIDCSVDVQAFTGYKRYQCVYSLAEIFKVLASFYVILVILYGLTSSYSLWWMLRSSLKQYSFEALREKSNYSDIPDVKNDFAFILHLADQYDPLYSKRFSIFLSEVSENKLKQINLNNEWTVEKLKSKLVKNAQDKIELHLFMLNGLPDNVFELTEMEVLSLELIPEVKLPSAVSQLVNLKELRVYHSSLVVDHPALAFLEENLKILRLKFTEMGKIPRWVFHLKNLKELYLSGCVLPEQLSTMQLEGFQDLKNLRTLYLKSSLSRIPQVVTDLLPSLQKLSLDNEGSKLVVLNNLKKMVNLKSLELISCDLERIPHSIFSLNNLHELDLRENNLKTVEEIISFQHLQNLSCLKLWHNNIAYIPAQIGALSNLEQLSLDHNNIENLPLQLFLCTKLHYLDLSYNHLTFIPEEIQYLSNLQYFAVTNNNDSSEPLTYEYALCFSKERWYAIFIKCV

SEQ ID NO: 10371 - protein, 61 aa, Artificial Sequence
  Synthetic polypeptide
MIPVTEFRQFSEQQPAFRVLKPWWDVFTDYLSVAMLMIGVFGCTLQPGMVAHTCSPSYMAG

SEQ ID NO: 10372 - protein, 153 aa, Artificial Sequence
  Synthetic polypeptide
MLRRPAPALAPAARLLLAGLLCGGGVWAARVNKHKPWLEPTYHGIVTENDNTVLLDPPLIALDKDAPLRFAESFEVTVTKEGEICGFKIHGQNVPFDAVVVDKSTGEGVIRSKEKLDCELQKDYSFTIQAYDCGKGPDGTNVKKSHKCSGSHL

SEQ ID NO: 10373 - protein, 143 aa, Artificial Sequence
  Synthetic polypeptide
MLRRPAPALAPAARLLLAGLLCGGGVWAARVNKHKPWLEPTYHGIVTENDNTVLLDPPLIALDKDAPLRFAGEICGFKIHGQNVPFDAVVVDKSTGEGVIRSKEKLDCELQKDYSFTIQAYDCGKGPDGTNVKKSHKCSGSHL

SEQ ID NO: 10374 - protein, 909 aa, Artificial Sequence
  Synthetic polypeptide
MAQGAMRFCSEGDCAISPPRCPRRWLPEGPVPQSPPASMYGSTGSLLRRVAGPGPRGRELGRVTAPCTPLRGPPSPRVAPSPWAPSSPTGQPPPGAQSSVVIFRFVEKASVRPLNGLPAPGGLSRSWDLGGVSPPRPTPALGPGSNRKLRLEASTSDPLPARGGSALPGSRNLVHGPPAPPQVGADGLYSSLPNGLGGPPERLATLFGGPADTGFLNQGDTWSSPREVSSHAQRIARAKWEFFYGSLDPPSSGAKPPEQAPPSPPGVGSRQGSGVAVGRAAKYSETDLDTVPLRCYRETDIDEVLAEREEADSAIESQPSSEGPPGTAYPPAPRPGPLPGPHPSLGSGNEDEDDDEAGGEEDVDDEVFEASEGARPGSRMPLKSPVPFLPGTSPSADGPDSFSCVFEAILESHRAKGTSYTSLASLEALASPGPTQSPFFTFELPPQPPAPRPDPPAPAPLAPLEPDSGTSSAADGPWTQRGEEEEAEARAKLAPGREPPSPCHSEDSLGLGAAPLGSEPPLSQLVSDSDSELDSTERLALGSTDTLSNGQKADLEAAQRLAKRLYRLDGFRKADVARHLGKNNDFSKLVAGEYLKFFVFTGMTLDQALRVFLKELALMGETQERERVLAHFSQRYFQCNPEALSSEDGAHTLTCALMLLNTDLHGHNIGKRMTCGDFIGNLEGLNDGGDFPRELLKALYSSIKNEKLQWAIDEEELRRSLSELADPNPKVIKRISGGSGSGSSPFLDLTPEPGAAVYKHGALVRKVHADPDCRKTPRGKRGWKSFHGILKGMILYLQKEEYKPGKALSETELKNAISIHHALATRASDYSKRPHVFYLRTADWRVFLFQAPSLEQMQSWITRINVVAAMFSAPPFPAAVSSQKKFSRPLLPSAATRLSQRHCIGQSDH

SEQ ID NO: 10375 - protein, 743 aa, Artificial Sequence
  Synthetic polypeptide
MDVTKKNKRDGTEVTERIVTETVTTRLTSLPPKGGTSNGYAKTASLGGGSRLEKQSLTHGSSGYINSTGSTRGHASTSSYRRAHSPASTLPNSPGSTFERKTHVTRHAYEGSSSGNSSPEYPRKEFASSSTRGRSQTRESEIRVRLQSASPSTRWTELDDVKRLLKGSRSASVSPTRNSSNTLPIPKKGTVETKIVTASSQSVSGTYDATILDANLPSHVWSSTLPAGSSMGTYHNNMTTQSSSLLNTNAYSAGSVFGVPNNMASCSPTLHPGLSTSSSVFGMQNNLAPSLTTLSHGTTTTSTAYGVKKNMPQSPAAVNTGVSTSAACTTSVQSDDLLHKDCKFLILEKDNTPAKKEMELLIMTKDSGKVFTASPASIAATSFSEDTLKKEKQAAYNADSGLKAEANGDLKTVSTKGKTTTADIHSYGSSGGGGSGGGGGVGGAGGGPWGPAPAWCPCGSCCSWWKWLLGLLLTWLLLLGLLFGLIALAEEVRKLKARVDELERIRRSILPYGDSMDRIEKDRLQGMAPAAGADLDKIGLHSDSQEELWMFVRKKLMMEQENGNLRGSPGPKGDMGSPGPKGDRGFPGTPGIPGPLGHPGPQGPKGQKGSVGDPGMEGPMGQRGREGPMGPRGEAGPPGSGEKGERGAAGEPGPHGPPGVPGSVGPKGSSGSPGPQGPPGPVGLQGLRGEVGLPGVKGDKGPMGPPGPKGDQGEKGPRGLTGEPGMRGLPGAVGEPGAKGAMG

SEQ ID NO: 10376 - protein, 245 aa, Artificial Sequence
  Synthetic polypeptide
MPYVDRQNRICGFLDIEENENSGKFLRRYFILDTREDSFVWYMDNPQNLPSGSSRVGAIKLTYISKVSDATKLRPKAEFCFVMNAGMRKYFLQANDQQDLVEWVNVLNKAIKITVPKQSDSQPNSDNLSRHGECGKKQVSYRTDIVGGVPIITPTQKEEVNECGESIDRNNLKRSQSHLPYFTPKPPQDSAVIKAGYCVKQGAVMKNWKRRYFQLDENTIGYFKSELDSGRRRQHHFCEIPAQGM

SEQ ID NO: 10377 - protein, 546 aa, Artificial Sequence
  Synthetic polypeptide
MSHQPLSCLTEKEDSPSESTGNGPPHLAHPNLDTFTPEELLQQMKELLTENHQLKEAMKLNNQAMKGRFEELSAWTEKQKEERQFFEIQSKEAKERLMALSHENEKLKEELGKLKGKSERSSEDPTDDSRLPRAEAEQEKDQLRTQVVRLQAEKADLLGIVSELQLKLNSSGSSEDSFVEIRMAEGEAEGSVKEIKHSPGPTRTVSTGTALSKYRSRSADGAKNYFEHEELTVSQLLLCLREGNQKVERLEVALKEAKERVSDFEKKTSNRSEIETQTEGSTEKENDEEKGPETVGSEVEALNLQVTSLFKELQEAHTKLSKAELMKKRLQEKCQALERKNSAIPSELNEKQELVYTNKKLELQVESMLSEIKMEQAKTEDEKSKLTVLQMTHNKLLQEHNNALKTIEELTRKESEKVDRAVLKELSEKLELAEKALASKQLQMDEMKQTIAKQEEDLETMTILRAQMEVYCSDFHAERAAREKIHEEKEQLALQLAVLLKENDAFEDGGRQSLMEMQSRHGARTSDSDQQAYLVQRGSSSTVQST

SEQ ID NO: 10378 - protein, 540 aa, Artificial Sequence
  Synthetic polypeptide
MSHQPLSCLTEKEDSPSESTGNGPPHLAHPNLDTFTPEELLQQMKELLTENHQLKEAMKLNNQAMKGRFEELSAWTEKQKEERQFFEIQSKEAKERLMALSHENEKLKEELGKLKGKSERSSEDPTDDSRLPRAEAEQEKDQLRTQVVRLQAEKADLLGIVSELQLKLNSSGSSEDSFVEIRMAEGEAEGSVKEIKHSPGPTRTVSTGTSRSADGAKNYFEHEELTVSQLLLCLREGNQKVERLEVALKEAKERVSDFEKKTSNRSEIETQTEGSTEKENDEEKGPETVGSEVEALNLQVTSLFKELQEAHTKLSKAELMKKRLQEKCQALERKNSAIPSELNEKQELVYTNKKLELQVESMLSEIKMEQAKTEDEKSKLTVLQMTHNKLLQEHNNALKTIEELTRKESEKVDRAVLKELSEKLELAEKALASKQLQMDEMKQTIAKQEEDLETMTILRAQMEVYCSDFHAERAAREKIHEEKEQLALQLAVLLKENDAFEDGGRQSLMEMQSRHGARTSDSDQQAYLVQRGSSSTVQST

SEQ ID NO: 10379 - protein, 125 aa, Artificial Sequence
  Synthetic polypeptide
MDTCVIPLRHGGLSLVQTTDYIYPIVDDPYMMGRIACANVLSDLYAMGVTECDNMLMLLGVSNKMTDRERDKVMPLIIQGFKDAAEEAGTSVTGGQTVLNPWIVLGGVATTVCQPNEFIITIHNS

SEQ ID NO: 10380 - protein, 192 aa, Artificial Sequence
  Synthetic polypeptide
MSTRESFNPESYELDKSFRLTRFTELKGTGCKVPQDVLQKLLESLQENHFQEDEQFLGAVMPRLGIGMDTCVIPLRHGGLSLVQTTDYIYPIVDDPYMMGRIACANVLSDLYAMGVTECDNMLMLLGVSNKMTDRERDKVMPLIIQGFKDAAEEAGTSVTGGQTVLNPWIVLGGVATTVCQPNEFIITIHNS

SEQ ID NO: 10381 - protein, 104 aa, Artificial Sequence
  Synthetic polypeptide
MAGKAAAPGTAVLLVTANVGSLFDDPENLQKNWLREFYQVVHTHKPHFMALHCQEFGGKNYEASMSHVDKFVKELLSSDAMKEYNRARVYLDENYKSQEHFTKW

SEQ ID NO: 10382 - protein, 76 aa, Artificial Sequence
  Synthetic polypeptide
  misc_feature (1)..(1): Xaa can be any naturally occurring amino acid
XQKNWLREFYQVVHTHKPHFMALHCQEFGGKNYEASMSHVDKFVKELLSSDAMKEYNRARVYLDENYKSQEHFTKW

SEQ ID NO: 10383 - protein, 353 aa, Artificial Sequence
  Synthetic polypeptide
MAGKAAAPGTAVLLVTANVGSLFDDPENLQKNWLREFYQVVHTHKPHFMALHCQEFGGKNYEASMSHVDKFVKELLSSDAMKEYNRARVYLDENYKSQEHFTALGSFYFLHESLKNIYQFDFKAKKYRKVAGKEIYSDTLESTPMLEKEKFPQDYFPECKWSRKGFIRTRWCIADCAFDLVNIHLFHDASNLVAWETSPSVYSGIRHKALGYVLDRIIDQRFEKVSYFVFGDFNFRLDSKSVVETLCTKATMQTVRAADTNEVVKLIFRESDNDRKVMLQLEKKLFDYFNQEVFRDNNGTAVCSDAQVLTVCYATCGGRWPAVRVCSPGATGLPLYSPGVERTRAVMSHSEIA

SEQ ID NO: 10384 - protein, 885 aa, Artificial Sequence; identical to SEQ ID NO: 106
  Synthetic polypeptide

SEQ ID NO: 10385 - protein, 296 aa, Artificial Sequence; identical to SEQ ID NO: 687
  Synthetic polypeptide

SEQ ID NO: 10386 - protein, 2867 aa, Artificial Sequence
  Synthetic polypeptide
MMNMSLPFLWSLLTLLIFAEVNGEAGELELQRQKRSINLQQPRMATERGNLVFLTGSAQNIEFRTGSLGKIKLNDEDLSECLHQIQKNKEDIIELKGSAIGLPQNISSQIYQLNSKLVDLERKFQGLQQTVDKKVCSSNPCQNGGTCLNLHDSFFCICPPQWKGPLCSADVNECEIYSGTPLSCQNGGTCVNTMGSYSCHCPPETYGPQCASKYDDCEGGSVARCVHGICEDLMREQAGEPKYSCVCDAGWMFSPNSPACTLDRDECSFQPGPCSTLVQCFNTQGSFYCGACPTGWQGNGYICEDINECEINNGGCSVAPPVECVNTPGSSHCQACPPGYQGDGRVCTLTDICSVSNGGCHPDASCSSTLGSLPLCTCLPGYTGNGYGPNGCVQLSNICLSHPCLNGQCIDTVSGYFCKCDSGWTGVNCTENINECLSNPCLNGGTCVDGVDSFSCECTRLWTGALCQVPQQVCGESLSGINGSFSYRSPDVGYVHDVNCFWVIKTEMGKVLRITFTFFRLESMDNCPHEFLQVYDGDSSSAFQLGRFCGSSLPHELLSSDNALYFHLYSEHLRNGRGFTVRWETQQPECGGILTGPYGSIKSPGYPGNYPPGRDCVWIVVTSPDLLVTFTFGTLSLEHHDDCNKDYLEIRDGPLYQDPLLGKFCTTFSVPPLQTTGPFARIHFHSDSQISDQGFHITYLTSPSDLRCGGNYTDPEGELFLPELSGPFTHTRQCVYMMKQPQGEQIQINFTHVELQCQSDSSQNYIEVRDGETLLGKVCGNGTISHIKSITNSVWIRFKIDASVEKASFRAVYQVACGDELTGEGVIRSPFFPNVYPGERTCRWTIHQPQSQVILLNFTVFEIGSSAHCETDYVEIGSSSILGSPENKKYCGTDIPSFITSVYNFLYVTFVKSSSTENHGFMAKFSAEDLACGEILTESTGTIQSPGHPNVYPHGINCTWHILVQPNHLIHLMFETFHLEFHYNCTNDYLEVYDTDSETSLGRYCGKSIPPSLTSSGNSLMLVFVTDSDLAYEGFLINYEAISAATACLQDYTDDLGTFTSPNFPNNYPNNWECIYRITVRTGQLIAVHFTNFSLEEAIGNYYTDFLEIRDGGYEKSPLLGIFYGSNLPPTIISHSNKLWLKFKSDQIDTRSGFSAYWDGSSTGCGGNLTTSSGTFISPNYPMPYYHSSECYWWLKSSHGSAFELEFKDFHLEHHPNCTLDYLAVYDGPSSNSHLLTQLCGDEKPPLIRSSGDSMFIKLRTDEGQQGRGFKAEYRQTCENVVIVNQTYGILESIGYPNPYSENQHCNWTIRATTGNTVNYTFLAFDLEHHINCSTDYLELYDGPRQMGRYCGVDLPPPGSTTSSKLQVLLLTDGVGRREKGFQMQWFVYGCGGELSGATGSFSSPGFPNRYPPNKECIWYIRTDPGSSIQLTIHDFDVEYHSRCNFDVLEIYGGPDFHSPRIAQLCTQRSPENPMQVSSTGNELAIRFKTDLSINGRGFNASWQAVTGGCGGIFQAPSGEIHSPNYPSPYRSNTDCSWVIRVDRNHRVLLNFTDFDLEPQDSCIMAYDGLSSTMSRLARTCGREQLANPIVSSGNSLFLRFQSGPSRQNRGFRAQFRQACGGHILTSSFDTVSSPRFPANYPNNQNCSWIIQAQPPLNHITLSFTHFELERSTTCARDFVEILDGGHEDAPLRGRYCGTDMPHPITSFSSALTLRFVSDSSISAGGFHTTVTASVSACGGTFYMAEGIFNSPGYPDIYPPNVECVWNIVSSPGNRLQLSFISFQLEDSQDCSRDFVEIREGNATGHLVGRYCGNSFPLNYSSIVGHTLWVRFISDGSGSGTGFQATFMKIFGNDNIVGTHGKVASPFWPENYPHNSNYQWTVNVNASHVVHGRILEMDIEEIQNCYYDKLRIYDGPSIHARLIGAYCGTQTESFSSTGNSLTFHFYSDSSISGKGFLLEWFAVDAPDGVLPTIAPGACGGFLRTGDAPVFLFSPGWPDSYSNRVDCTWLIQAPDSTVELNILSLDIESHRTCAYDSLVIRDGDNNLAQQLAVLCGREIPGPIRSTGEYMFIRFTSDSSVTRAGFNASFHKSCGGYLHADRGIITSPKYPETYPSNLNCSWHVLVQSGLTIAVHFEQPFQIPNGDSSCNQGDYLVLRNGPDICSPPLGPPGGNGHFCGSHASSTLFTSDNQMFVQFISDHSNEGQGFKIKYEAKSLACGGNVYIHDADSAGYVTSPNHPHNYPPHADCIWILAAPPETRIQLQFEDRFDIEVTPNCTSNYLELRDGVDSDAPILSKFCGTSLPSSQWSSGEVMYLRFRSDNSPTHVGFKAKYSIAQCGGRVPGQSGVVESIGHPTLPYRDNLFCEWHLQGLSGHYLTISFEDFNLQNSSGCEKDFVEIWDNHTSGNILGRYCGNTIPDSIDTSSNTAVVRFVTDGSVTASGFRLRFESSMEECGGDLQGSIGTFTSPNYPNPNPHGRICEWRITAPEGRRITLMFNNLRLATHPSCNNEHVIVFNGIRSNSPQLEKLCSSVNVSNEIKSSGNTMKVIFFTDGSRPYGGFTASYTSSEDAVCGGSLPNTPEGNFTSPGYDGVRNYSRNLNCEWTLSNPNQGNSSISIHFEDFYLESHQDCQFDVLEFRVGDADGPLMWRLCGPSKPTLPLVIPYSQVWIHFVTNERVEHIGFHAKYSFTDCGGIQIGDSGVITSPNYPNAYDSLTHCSSLLEAPQGHTITLTFSDFDIEPHTTCAWDSVTVRNGGSPESPIIGQYCGNSNPRTIQSGSNQLVVTFNSDHSLQGGGFYATWNTQTLGCGGIFHSDNGTIRSPHWPQNFPENSRCSWTAITHKSKHLEISFDNNFLIPSGDGQCQNSFVKE

SEQ ID NO: 10387 - protein, 1395 aa, Artificial Sequence
  Synthetic polypeptide
MMNMSLPFLWSLLTLLIFAEVNGEAGELELQRQKRSINLQQPRMATERGNLVFLTGSAQNIEFRTGSLGKIKLNDEDLSECLHQIQKNKEDIIELKGSAIGLPQNISSQIYQLNSKLVDLERKFQGLQQTVDKKVCSSNPCQNGGTCLNLHDSFFCICPPQWKGPLCSADVNECEIYSGTPLSCQNGGTCVNTMGSYSCHCPPETYGPQCASKYDDCEGGSVARCVHGICEDLMREQAGEPKYSCVCDAGWMFSPNSPACTLDRDECSFQPGPCSTLVQCFNTQGSFYCGACPTGWQGNGYICEDINECEINNGGCSVAPPVECVNTPGSSHCQACPPGYQGDGRVCTLTDICSVSNGGCHPDASCSSTLGSLPLCTCLPGYTGNGYGPNGCVQLSNICLSHPCLNGQCIDTVSGYFCKCDSGWTGVNCTENINECLSNPCLNGGTCVDGVDSFSCECTRLWTGALCQVPQQVCGESLSGINGSFSYRSPDVGYVHDVNCFWVIKTEMGKVLRITFTFFRLESMDNCPHEFLQVYDGDSSSAFQLGRFCGSSLPHELLSSDNALYFHLYSEHLRNGRGFTVRWETQQPECGGILTGPYGSIKSPGYPGNYPPGRDCVWIVVTSPDLLVTFTFGTLSLEHHDDCNKDYLEIRDGPLYQDPLLGKFCTTFSVPPLQTTGPFARIHFHSDSQISDQGFHITYLTSPSDLRCGGNYTDPEGELFLPELSGPFTHTRQCVYMMKQPQGEQIQINFTHVELQCQSDSSQNYIEVRDGETLLGKVCGNGTISHIKSITNSVWIRFKIDASVEKASFRAVYQVACGDELTGEGVIRSPFFPNVYPGERTCRWTIHQPQSQVILLNFTVFEIGSSAHCETDYVEIGSSSILGSPENKKYCGTDIPSFITSVYNFLYVTFVKSSSTENHGFMAKFSAEDLACGEILTESTGTIQSPGHPNVYPHGINCTWHILVQPNHLIHLMFETFHLEFHYNCTNDYLEVYDTDSETSLGRYCGKSIPPSLTSSGNSLMLVFVTDSDLAYEGFLINYEAISAATACLQDYTDDLGTFTSPNFPNNYPNNWECIYRITVRTGQLIAVHFTNFSLEEAIGNYYTDFLEIRDGGYEKSPLLGIFYGSNLPPTIISHSNKLWLKFKSDQIDTRSGFSAYWDGSSTGCGGNLTTSSGTFISPNYPMPYYHSSECYWWLKSSHGSAFELEFKDFHLEHHPNCTLDYLAVYDGPSSNSHLLTQLCGDEKPPLIRSSGDSMFIKLRTDEGQQGRGFKAEYRQTCENVVIVNQTYGILESIGYPNPYSENQHCNWTIRATTGNTVNYTFLAFDLEHHINCSTDYLELYDGPRQMGRYCGVDLPPPGSTTSSKLQVLLLTDGVGRREKGFQMQWFVYGLHLHS

SEQ ID NO: 10388 - protein, 50 aa, Artificial Sequence
  Synthetic polypeptide
MNQGSGLDLLKISYGKGARRKNRFKGSDGSTSSDTTSNSFVRQEYSLQGT

SEQ ID NO: 10389 - protein, 78 aa, Artificial Sequence
  Synthetic polypeptide
MVQRDMSKSPPTAAAAVAQEIQMELLENVAPAGALGAAAQSYGKGARRKNRFKGSDGSTSSDTTSNSFVRQEYSLQGT

SEQ ID NO: 10390 - protein, 270 aa, Artificial Sequence
  Synthetic polypeptide
MKATWIRLLKRAKGGRLKNSDICGSADSYTSRPSDSDVSLEEDREAVRREAERQAQAQLEKAKTKPVAFAVRTNVSYSAAHEDDVPVPGMAISFEAKDFLHVKEKFNNDWWIGRLVKEGCEIGFIPSPVKLENMRLQHEQRAKQGKFYSSKSGGNSSSSLGDIVPSSRKSTPPSSAIDIDATGLDAEENDIPANHRSPKPSANSVTSPHSKEKRMPFFKKTEHTPPYDVVPSMRPVVLVGPSLKGYEVTDMMQKALFDFLKHRFEGRKIP

SEQ ID NO: 10391 - protein, 264 aa, Artificial Sequence
  Synthetic polypeptide
MLDRRLIAPQTKYIIPGGSADSYTSRPSDSDVSLEEDREAVRREAERQAQAQLEKAKTKPVAFAVRTNVSYSAAHEDDVPVPGMAISFEAKDFLHVKEKFNNDWWIGRLVKEGCEIGFIPSPVKLENMRLQHEQRAKQGKFYSSKSGGNSSSSLGDIVPSSRKSTPPSSAIDIDATGLDAEENDIPANHRSPKPSANSVTSPHSKEKRMPFFKKTEHTPPYDVVPSMRPVVLVGPSLKGYEVTDMMQKALFDFLKHRFEGRKIP

SEQ ID NO: 10392 - protein, 290 aa, Artificial Sequence
  Synthetic polypeptide
MNQGSGLDLLKISYGKGARRKNRFKGSDGSTSSDTTSNSFVRQGSADSYTSRPSDSDVSLEEDREAVRREAERQAQAQLEKAKTKPVAFAVRTNVSYSAAHEDDVPVPGMAISFEAKDFLHVKEKFNNDWWIGRLVKEGCEIGFIPSPVKLENMRLQHEQRAKQGKFYSSKSGGNSSSSLGDIVPSSRKSTPPSSAIDIDATGLDAEENDIPANHRSPKPSANSVTSPHSKEKRMPFFKKTEHTPPYDVVPSMRPVVLVGPSLKGYEVTDMMQKALFDFLKHRFEGRKIP

SEQ ID NO: 10393 - protein, 266 aa, Artificial Sequence
  Synthetic polypeptide
MNQGSGLDLLKISYGKGARRKNRFKGSDGSTSSDTTSNSFVRQGSADSYTSRPSDSDVSLEEDREAVRREAERQAQAQLEKAKTKPVAFAVRTNVSYSAAHEDDVPVPGMAISFEAKDFLHVKEKFNNDWWIGRLVKEGCEIGFIPSPVKLENMRLQHEQRAKQGKFYSSKSGGNSSSSLGDIVPSSRKSTPPSSGAKSADEQDQWKTAGLFWRFTTEHTPPYDVVPSMRPVVLVGPSLKGYEVTDMMQKALFDFLKHRFEGRKIP

SEQ ID NO: 10394 - protein, 263 aa, Artificial Sequence
  Synthetic polypeptide
MQCCGLVHRRRVRVSYGSADSYTSRPSDSDVSLEEDREAVRREAERQAQAQLEKAKTKPVAFAVRTNVSYSAAHEDDVPVPGMAISFEAKDFLHVKEKFNNDWWIGRLVKEGCEIGFIPSPVKLENMRLQHEQRAKQGKFYSSKSGGNSSSSLGDIVPSSRKSTPPSSAIDIDATGLDAEENDIPANHRSPKPSANSVTSPHSKEKRMPFFKKTEHTPPYDVVPSMRPVVLVGPSLKGYEVTDMMQKALFDFLKHRFEGRKIP

SEQ ID NO: 10395 - protein, 225 aa, Artificial Sequence
  Synthetic polypeptide
MQCCGLVHRRRVRVSYGSADSYTSRPSDSDVSLEEDREAVRREAERQAQAQLEKAKTKPVAFAVRTNVSYSAAHEDDVPVPGMAISFEAKDFLHVKEKFNNDWWIGRLVKEGCEIGFIPSPVKLENMRLQHEQRAKQGKFYSSKSGGNSSSSLGDIVPSSRKSTPPSSAKQKQKSTEHTPPYDVVPSMRPVVLVGPSLKGYEVTDMMQKALFDFLKHRFEGRKIP

SEQ ID NO: 10396 - protein, 318 aa, Artificial Sequence
  Synthetic polypeptide
MVQRDMSKSPPTAAAAVAQEIQMELLENVAPAGALGAAAQSYGKGARRKNRFKGSDGSTSSDTTSNSFVRQGSADSYTSRPSDSDVSLEEDREAVRREAERQAQAQLEKAKTKPVAFAVRTNVSYSAAHEDDVPVPGMAISFEAKDFLHVKEKFNNDWWIGRLVKEGCEIGFIPSPVKLENMRLQHEQRAKQGKFYSSKSGGNSSSSLGDIVPSSRKSTPPSSAIDIDATGLDAEENDIPANHRSPKPSANSVTSPHSKEKRMPFFKKTEHTPPYDVVPSMRPVVLVGPSLKGYEVTDMMQKALFDFLKHRFEGRKIP

SEQ ID NO: 10397 - protein, 294 aa, Artificial Sequence
  Synthetic polypeptide
MVQRDMSKSPPTAAAAVAQEIQMELLENVAPAGALGAAAQSYGKGARRKNRFKGSDGSTSSDTTSNSFVRQGSADSYTSRPSDSDVSLEEDREAVRREAERQAQAQLEKAKTKPVAFAVRTNVSYSAAHEDDVPVPGMAISFEAKDFLHVKEKFNNDWWIGRLVKEGCEIGFIPSPVKLENMRLQHEQRAKQGKFYSSKSGGNSSSSLGDIVPSSRKSTPPSSGAKSADEQDQWKTAGLFWRFTTEHTPPYDVVPSMRPVVLVGPSLKGYEVTDMMQKALFDFLKHRFEGRKIP

SEQ ID NO: 10398 - protein, 61 aa, Artificial Sequence
  Synthetic polypeptide
MGESSEDIDQMFSTLLGEMDLLTQSLGVDTLPPPDPNPPRAEFNYSVGFKDLNAMHDGSHL

SEQ ID NO: 10399 - protein, 275 aa, Artificial Sequence
  Synthetic polypeptide
MGESSEDIDQMFSTLLGEMDLLTQSLGVDTLPPPDPNPPRAEFNYSVGFKDLNESLNALEDQDLDALMADLVADISEAEQRTIQAQKESLQNQHHSASLQASIFSGAASLGYGTNVAATGISQYEDDLPPPPADPVLDLPLPPPPPEPLSQEEEEAQAKADKIKLALEKLKEAKVKKLVVKVHMNDNSTKSLMVDERQLARDVLDNLFEKTHCDCNVDWCLYEIYPELQIERFFEDHENVVEVLSDWTRDTENKILFLEKEEKYAVFKNPQGYQP

SEQ ID NO: 10400 - protein, 50 aa, Artificial Sequence
  Synthetic polypeptide
MDEDVLTTLKILIIGESGVGKSSLLLRFTDDTFDPELAATIAVGEEMTAL

SEQ ID NO: 10401 - protein, 134 aa, Artificial Sequence
  Synthetic polypeptide
  misc_feature (1)..(1): Xaa can be any naturally occurring amino acid
XRLPGSRPLPGPSSLGRSPSCSAEKTPFRGPPLGRQSAVKELDLVTAGKFRFSVRSECFSRGPPLKIKCNCYFSFCHILWRQKISVVLSFFTFSLGKIILTVELSISLLLRFTDDTFDPELAATIAVGEEMTAL

SEQ ID NO: 10402 - protein, 49 aa, Artificial Sequence
  Synthetic polypeptide
MDEDVLTTLKILIIGESGVGKSSLLLRFTDDTFDPELAATIVGEEMTAL

SEQ ID NO: 10403 - protein, 133 aa, Artificial Sequence
  Synthetic polypeptide
  misc_feature (1)..(1): Xaa can be any naturally occurring amino acid
XRLPGSRPLPGPSSLGRSPSCSAEKTPFRGPPLGRQSAVKELDLVTAGKFRFSVRSECFSRGPPLKIKCNCYFSFCHILWRQKISVVLSFFTFSLGKIILTVELSISLLLRFTDDTFDPELAATIVGEEMTAL

SEQ ID NO: 10404 - protein, 62 aa, Artificial Sequence
  Synthetic polypeptide
MDEDVLTTLKILIIGESGVGKSSLLLRFTDDTFDPELAATIGKSLNHEKVVSPELEALWPSA

SEQ ID NO: 10405 - protein, 146 aa, Artificial Sequence
  Synthetic polypeptide
  misc_feature (1)..(1): Xaa can be any naturally occurring amino acid
XRLPGSRPLPGPSSLGRSPSCSAEKTPFRGPPLGRQSAVKELDLVTAGKFRFSVRSECFSRGPPLKIKCNCYFSFCHILWRQKISVVLSFFTFSLGKIILTVELSISLLLRFTDDTFDPELAATIGKSLNHEKVVSPELEALWPSA

SEQ ID NO: 10406 - protein, 79 aa, Artificial Sequence
  Synthetic polypeptide
MDEDVLTTLKILIIGESGVGKSSLLLRFTDDTFDPELAATIGRGRGDAWKLRVWDPPRPHPYVFLFLVGPDIVSFVMKL

SEQ ID NO: 10407 - protein, 163 aa, Artificial Sequence
  Synthetic polypeptide
  misc_feature (1)..(1): Xaa can be any naturally occurring amino acid
XRLPGSRPLPGPSSLGRSPSCSAEKTPFRGPPLGRQSAVKELDLVTAGKFRFSVRSECFSRGPPLKIKCNCYFSFCHILWRQKISVVLSFFTFSLGKIILTVELSISLLLRFTDDTFDPELAATIGRGRGDAWKLRVWDPPRPHPYVFLFLVGPDIVSFVMKL

SEQ ID NO: 10408 - protein, 67 aa, Artificial Sequence
  Synthetic polypeptide
MDEDVLTTLKILIIGESGVGKSSLLLRFTDDTFDPELAATIAHQHYKSKAESSGYGNDRWKLHYRKQ

SEQ ID NO: 10409 - protein, 151 aa, Artificial Sequence
  Synthetic polypeptide
  misc_feature (1)..(1): Xaa can be any naturally occurring amino acid
XRLPGSRPLPGPSSLGRSPSCSAEKTPFRGPPLGRQSAVKELDLVTAGKFRFSVRSECFSRGPPLKIKCNCYFSFCHILWRQKISVVLSFFTFSLGKIILTVELSISLLLRFTDDTFDPELAATIAHQHYKSKAESSGYGNDRWKLHYRKQ

SEQ ID NO: 10410 - protein, 55 aa, Artificial Sequence
  Synthetic polypeptide
MDEDVLTTLKILIIGESGVGKSSLLLRFTDDTFDPELAATIGVDQTHDLLLNNRI

SEQ ID NO: 10411 - protein, 139 aa, Artificial Sequence
  Synthetic polypeptide
  misc_feature (1)..(1): Xaa can be any naturally occurring amino acid
XRLPGSRPLPGPSSLGRSPSCSAEKTPFRGPPLGRQSAVKELDLVTAGKFRFSVRSECFSRGPPLKIKCNCYFSFCHILWRQKISVVLSFFTFSLGKIILTVELSISLLLRFTDDTFDPELAATIGVDQTHDLLLNNRI

SEQ ID NO: 10412 - protein, 50 aa, Artificial Sequence
  Synthetic polypeptide
MDEDVLTTLKILIIGESGVGKSSLLLRFTDDTFDPELAATIEPLMGIQPS

SEQ ID NO: 10413 - protein, 134 aa, Artificial Sequence
  Synthetic polypeptide
  misc_feature (1)..(1): Xaa can be any naturally occurring amino acid
XRLPGSRPLPGPSSLGRSPSCSAEKTPFRGPPLGRQSAVKELDLVTAGKFRFSVRSECFSRGPPLKIKCNCYFSFCHILWRQKISVVLSFFTFSLGKIILTVELSISLLLRFTDDTFDPELAATIEPLMGIQPS

SEQ ID NO: 10414 - protein, 225 aa, Artificial Sequence
  Synthetic polypeptide
MDEDVLTTLKILIIGESGVGKSSLLLRFTDDTFDPELAATIGVDFKVKTISVDGNKAKLAIWDTAGQERFRTLTPSYYRGAQGVILVYDVTRRDTFVKLDNWLNELETYCTRNDIVNMLVGNKIDKENREVDRNEGLKFARKHSMLFIEASAKTCDGVQCAFEELVEKIIQTPGLWESENQNKGVKLSHREEGQGGGACAHQHYKSKAESSGYGNDRWKLHYRKQ

SEQ ID NO: 10415 - protein, 161 aa, Artificial Sequence
  Synthetic polypeptide
MDEDVLTTLKILIIGESGVGKSSLLLRFTDDTFDPELAATIGVDFKVKTISVDGNKAKLAIWENREVDRNEGLKFARKHSMLFIEASAKTCDGVQCAFEELVEKIIQTPGLWESENQNKGVKLSHREEGQGGGACAHQHYKSKAESSGYGNDRWKLHYRKQ

SEQ ID NO: 10416 - protein, 180 aa, Artificial Sequence
  Synthetic polypeptide
MDEDVLTTLKILIIGESGVGKSSLLLRFTDDTFDPELAATIVYDVTRRDTFVKLDNWLNELETYCTRNDIVNMLVGNKIDKENREVDRNEGLKFARKHSMLFIEASAKTCDGVQCAFEELVEKIIQTPGLWESENQNKGVKLSHREEGQGGGACAHQHYKSKAESSGYGNDRWKLHYRKQ

SEQ ID NO: 10417 - protein, 715 aa, Artificial Sequence
  Synthetic polypeptide
MFAAGEIKTPTGEGLLDSPSKTMSIKERLALLKKSGEEDWRNRLSRRQEGGKAPASSLHTQEAGRSLIKKEEGGVADDSAISNLLWRVTESRESQMTIEERKQLITVREEAWKTRGRGAANDSTQFTVAGRMVKKGLASPTAITPVASPICGKTRGTTPVSKPLEDIEARPDMQLESDLKLDRLETFLRRLNNKVGGMHETVLTVTGKSVKEVMKPDDDETFAKFYRSVDYNMPRSPVEMDEDFDVIFDPYAPKLTSSVAEHKRAVRPKRRVQASKNPLKMLAAREDLLQEYTEQRLNVAFMESKRMKVEKMSSNSNFSEVTLAGLASKENFSNVSLRSVNLTEQNSNNSAVPYKRLMLLQIKGRRHVQTRLVEPRASALNSGDCFLLLSPHCCFLWVGEFANVIEKAKASELATLIQTKRELGCRATYIQTIEEGINTHTHAAKDFWKLLGGQTSYQSAGDPKEDELYEAAIIETNCIYRLMDDKLVPDDDYWGKIPKCSLLQPKEVLVFDFGSEVYVWHGKEVTLAQRKIAFQLAKHLWNGTFDYENCDINPLDPGECNPLIPRKGQGRPDWAIFGRLTEHNETILFKEKFLDWTELKRSNEKNPGELAQHKEDPRTDVKAYDVTRMVSMPQTTAGTILDGVNVGRGYGLVEGHDRRQFEITSVSVDVWHILEFDYSRLPKQSIGQFHEGDAYVVKWKFMVSTAAQNPEVPAH

SEQ ID NO: 10418 - protein, 1375 aa, Artificial Sequence
  Synthetic polypeptide
MKRKERIARRLEGIENDTQPILLQSCTGLVTHRLLEEDTPRYMRASDPASPHIGRSNEEEETSDSSLEKQTRSKYCTETSGVHGDSPYGSGTMDTHSLESKAERIARYKAERRRQLAEKYGLTLDPEADSEYLSRYTKSRKEPDAVEKRGGKSDKQEESSRDASSLYPGTETMGLRTCAGESKDYALHVGDGSSDPEVLLNIENQRRGQELSATRQAHDLSPAAESSSTFSFSGRDSSFTEVPRSPKHAHSSSLQQAASRSPSFGDPQLSPEARPRCTSHSETPTVDDEEKVDERAKLSVAAKRLLFREMEKSFDEQNVPKRRSRNTAVEQRLRRLQDRSLTQPITTEEVVIAATLQASAHQKALAKDQTNEGKELAEQGEPDSSTLSLAEKLALFNKLSQPVSKAISTRNRIDTRQRRMNARYQTQPVTLGEVEQVQSGKLIPFSPAVNTSVSTVASTVAPMYAGDLRTKPPLDHNASATDYKFSSSIENSDSPVRSILKSQAWQPLVEGSENKGMLREYGETESKRALTGRDSGMEKYGSFEEAEASYPILNRAREGDSHKESKYAVPRRGSLERANPPITHLGDEPKEFSMAKMNAQGNLDLRDRLPFEEKVEVENVMKRKFSLRAAEFGEPTSEQTGTAAGKTIAQTTAPVSWKPQDSSEQPQEKLCKNPCAMFAAGEIKTPTGEGLLDSPSKTMSIKERLALLKKSGEEDWRNRLSRRQEGGKAPASSLHTQEAGRSLIKKRVTESRESQMTIEERKQLITVREEAWKTRGRGAANDSTQFTVAGRMVKKGLASPTAITPVASPICGKTRGTTPVSKPLEDIEARPDMQLESDLKLDRLETFLRRLNNKVGGMHETVLTVTGKSVKEVMKPDDDETFAKFYRSVDYNMPRSPVEMDEDFDVIFDPYAPKLTSSVAEHKRAVRPKRRVQASKNPLKMLAAREDLLQEYTEQRLNVAFMESKRMKVEKMSSNSNFSEVTLAGLASKENFSNVSLRSVNLTEQNSNNSAVPYKRLMLLQIKGRRHVQTRLVEPRASALNSGDCFLLLSPHCCFLWVGEFANVIEKAKASELATLIQTKRELGCRATYIQTIEEGINTHTHAAKDFWKLLGGQTSYQSAGDPKEDELYEAAIIETNCIYRLMDDKLVPDDDYWGKIPKCSLLQPKEVLVFDFGSEVYVWHGKEVTLAQRKIAFQLAKHLWNGTFDYENCDINPLDPGECNPLIPRKGQGRPDWAIFGRLTEHNETILFKEKFLDWTELKRSNEKNPGELAQHKEDPRTDVKAYDVTRMVSMPQTTAGTILDGVNVGRGYGLVEGHDRRQFEITSVSVDVWHILEFDYSRLPKQSIGQFHEGDAYVVKWKFMVSTAAQNPEVPAH

SEQ ID NO: 10419 - protein, 1801 aa, Artificial Sequence
  Synthetic polypeptide
MKRKERIARRLEGIENDTQPILLQSCTGLVTHRLLEEDTPRYMRASDPASPHIGRSNEEEETSDSSLEKQTRSKYCTETSGVHGDSPYGSGTMDTHSLESKAERIARYKAERRRQLAEKYGLTLDPEADSEYLSRYTKSRKEPDAVEKRGGKSDKQEESSRDASSLYPGTETMGLRTCAGESKDYALHVGDGSSDPEVLLNIENQRRGQELSATRQAHDLSPAAESSSTFSFSGRDSSFTEVPRSPKHAHSSSLQQAASRSPSFGDPQLSPEARPSTGKPKHEWFLQKDSEGDTPSLINWPSRVKVREKLVKEESARNSPELASESVTQRRHQPAPVHYVSFQSEHSAFDRVPSKAAGSTRQPIRGYVQPADTGHTAKLVTPETPENASECSWVASATQNVPKPPSLTVLEGDGRDSPVLHVCESKAEEEEGEGEGEEKEEDVCFTEALEQSKKTLLALEGDGLVRSPEDPSRNEDFGKPAVSTVTLEHQKELENVAQPPQAPHQPTERTGRSEMVLYIQSEPVSQDAKPTGHNREASKKRKVRTRSLSDFTGPPQLQALKYKDPASRRELELPSSKTEGPYGEISMLDTKVSVAQLRSAFLASANACRRPELKSRVERSAEGPGLPTGVERERGSRKPRRYFSPGESRKTSERFRTQPITSAERKESDRCTSHSETPTVDDEEKVDERAKLSVAAKRLLFREMEKSFDEQNVPKRRSRNTAVEQRLRRLQDRSLTQPITTEEVVIAATEPIPASCSGGTHPVMARLPSPTVARSAVQPARLQASAHQKALAKDQTNEGKELAEQGEPDSSTLSLAEKLALFNKLSQPVSKAISTRNRIDTRQRRMNARYQTQPVTLGEVEQVQSGKLIPFSPAVNTSVSTVASTVAPMYAGDLRTKPPLDHNASATDYKFSSSIENSDSPVRSILKSQAWQPLVEGSENKGMLREYGETESKRALTGRDSGMEKYGSFEEAEASYPILNRAREGDSHKESKYAVPRRGSLERANPPITHLGDEPKEFSMAKMNAQGNLDLRDRLPFEEKVEVENVMKRKFSLRAAEFGEPTSEQTGTAAGKTIAQTTAPVSWKPQDSSEQPQEKLCKNPCAMFAAGEIKTPTGEGLLDSPSKTMSIKERLALLKKSGEEDWRNRLSRRQEGGKAPASSLHTQEAGRSLIKKRVTESRESQMTIEERKQLITVREEAWKTRGRGAANDSTQFTVAGRMVKKGLASPTAITPVASPICGKTRGTTPVSKPLEDIEARPDMQLESDLKLDRLETFLRRLNNKVGGMHETVLTVTGKSVKEVMKPDDDETFAKFYRSVDYNMPRSPVEMDEDFDVIFDPYAPKLTSSVAEHKRAVRPKRRVQASKNPLKMLAAREDLLQEYTEQRLNVAFMESKRMKVEKMSSNSNFSEVTLAGLASKENFSNVSLRSVNLTEQNSNNSAVPYKRLMLLQIKGRRHVQTRLVEPRASALNSGDCFLLLSPHCCFLWVGEFANVIEKAKASELATLIQTKRELGCRATYIQTIEEGINTHTHAAKDFWKLLGGQTSYQSAGDPKEDELYEAAIIETNCIYRLMDDKLVPDDDYWGKIPKCSLLQPKEVLVFDFGSEVYVWHGKEVTLAQRKIAFQLAKHLWNGTFDYENCDINPLDPGECNPLIPRKGQGRPDWAIFGRLTEHNETILFKEKFLDWTELKRSNEKNPGELAQHKEDPRTDVKAYDVTRMVSMPQTTAGTILDGVNVGRGYGLVEGHDRRQFEITSVSVDVWHILEFDYSRLPKQSIGQFHEGDAYVVKWKFMVSTAAQNPEVPAH

SEQ ID NO: 10420 - protein, 593 aa, Artificial Sequence
  Synthetic polypeptide
MNSSDVSSLKHPSSLASPTAITPVASPICGKTRGTTPVSKPLEDIEARPDMQLESDLKLDRLETFLRRLNNKVGGMHETVLTVTGKSVKEVMKPDDDETFAKFYRSVDYNMPRSPVEMDEDFDVIFDPYAPKLTSSVAEHKRAVRPKRRVQASKNPLKMLAAREDLLQEYTEQRLNVAFMESKRMKVEKMSSNSNFSEVTLAGLASKENFSNVSLRSVNLTEQNSNNSAVPYKRLMLLQIKGRRHVQTRLVEPRASALNSGDCFLLLSPHCCFLWVGEFANVIEKAKASELATLIQTKRELGCRATYIQTIEEGINTHTHAAKDFWKLLGGQTSYQSAGDPKEDELYEAAIIETNCIYRLMDDKLVPDDDYWGKIPKCSLLQPKEVLVFDFGSEVYVWHGKEVTLAQRKIAFQLAKHLWNGTFDYENCDINPLDPGECNPLIPRKGQGRPDWAIFGRLTEHNETILFKEKFLDWTELKRSNEKNPGELAQHKEDPRTDVKAYDVTRMVSMPQTTAGTILDGVNVGRGYGLVEGHDRRQFEITSVSVDVWHILEFDYSRLPKQSIGQFHEGDAYVVKWKFMVSTAAQNPEVPAH

SEQ ID NO: 10421 - protein, 722 aa, Artificial Sequence
  Synthetic polypeptide
MFAAGEIKTPTGEGLLDSPSKTMSIKERLALLKKSGEEDWRNRLSRRQEGGKAPASSLHTQEAGRSLIKKEEGGVADDSAISNLLWRVTESRESQMTIEERKQLITVREEAWKTRGRGAANDSTQFTVAGRMVKKGLASPTAITPVASPICGKTRGTTPVSKPLEDIEARPDMQLESDLKLDRLETFLRRLNNKVGGMHETVLTVTGKSVKEVMKPDDDETFAKFYRSVDYNMPRSPVEMDEDFDVIFDPYAPKLTSSVAEHKRAVRPKRRVQASKNPLKMLAAREDLLQEYTEQRLNVAFMESKRMKVEKMSSNSNFSEVTLAGLASKENFSNVSLRSVNLTEQNSNNSAVPYKRLMLLQIKGRRHVQTRLVEPRASALNSGDCFLLLSPHCCFLWVGEFANVIEKAKASELATLIQTKRELGCRATYIQTIEEGINTHTHAAKDFWKLLGGQTSYQSAGDPKEDELYEAAIIETNCIYRLMDDKLVPDDDYWGKIPKCSLLQPKEVLVFDFGSEVYVWHGKEVTLAQRKIAFQLAKHLWNGTFDYENCDINPLDPGECNPLIPRKGQGRPDWAIFGRLTEHNETILFKEKFLDWTELKRSNEKNPGELAQHKEDPRTDVKAYDVTRMVSMPQTTAGTILDGVNVGRGYGLVEGHDRRQFEITSVSVDVWHILEFDYSRLPKQSIGQFHEGDAYVVKWKFMVSTAEQKHPASSSSLSCSPL

SEQ ID NO: 10422 - protein, 1382 aa, Artificial Sequence
  Synthetic polypeptide
MKRKERIARRLEGIENDTQPILLQSCTGLVTHRLLEEDTPRYMRASDPASPHIGRSNEEEETSDSSLEKQTRSKYCTETSGVHGDSPYGSGTMDTHSLESKAERIARYKAERRRQLAEKYGLTLDPEADSEYLSRYTKSRKEPDAVEKRGGKSDKQEESSRDASSLYPGTETMGLRTCAGESKDYALHVGDGSSDPEVLLNIENQRRGQELSATRQAHDLSPAAESSSTFSFSGRDSSFTEVPRSPKHAHSSSLQQAASRSPSFGDPQLSPEARPRCTSHSETPTVDDEEKVDERAKLSVAAKRLLFREMEKSFDEQNVPKRRSRNTAVEQRLRRLQDRSLTQPITTEEVVIAATLQASAHQKALAKDQTNEGKELAEQGEPDSSTLSLAEKLALFNKLSQPVSKAISTRNRIDTRQRRMNARYQTQPVTLGEVEQVQSGKLIPFSPAVNTSVSTVASTVAPMYAGDLRTKPPLDHNASATDYKFSSSIENSDSPVRSILKSQAWQPLVEGSENKGMLREYGETESKRALTGRDSGMEKYGSFEEAEASYPILNRAREGDSHKESKYAVPRRGSLERANPPITHLGDEPKEFSMAKMNAQGNLDLRDRLPFEEKVEVENVMKRKFSLRAAEFGEPTSEQTGTAAGKTIAQTTAPVSWKPQDSSEQPQEKLCKNPCAMFAAGEIKTPTGEGLLDSPSKTMSIKERLALLKKSGEEDWRNRLSRRQEGGKAPASSLHTQEAGRSLIKKRVTESRESQMTIEERKQLITVREEAWKTRGRGAANDSTQFTVAGRMVKKGLASPTAITPVASPICGKTRGTTPVSKPLEDIEARPDMQLESDLKLDRLETFLRRLNNKVGGMHETVLTVTGKSVKEVMKPDDDETFAKFYRSVDYNMPRSPVEMDEDFDVIFDPYAPKLTSSVAEHKRAVRPKRRVQASKNPLKMLAAREDLLQEYTEQRLNVAFMESKRMKVEKMSSNSNFSEVTLAGLASKENFSNVSLRSVNLTEQNSNNSAVPYKRLMLLQIKGRRHVQTRLVEPRASALNSGDCFLLLSPHCCFLWVGEFANVIEKAKASELATLIQTKRELGCRATYIQTIEEGINTHTHAAKDFWKLLGGQTSYQSAGDPKEDELYEAAIIETNCIYRLMDDKLVPDDDYWGKIPKCSLLQPKEVLVFDFGSEVYVWHGKEVTLAQRKIAFQLAKHLWNGTFDYENCDINPLDPGECNPLIPRKGQGRPDWAIFGRLTEHNETILFKEKFLDWTELKRSNEKNPGELAQHKEDPRTDVKAYDVTRMVSMPQTTAGTILDGVNVGRGYGLVEGHDRRQFEITSVSVDVWHILEFDYSRLPKQSIGQFHEGDAYVVKWKFMVSTAEQKHPASSSSLSCSPL

SEQ ID NO: 10423 - protein, 1808 aa, Artificial Sequence
  Synthetic polypeptide
MKRKERIARRLEGIENDTQPILLQSCTGLVTHRLLEEDTPRYMRASDPASPHIGRSNEEEETSDSSLEKQTRSKYCTETSGVHGDSPYGSGTMDTHSLESKAERIARYKAERRRQLAEKYGLTLDPEADSEYLSRYTKSRKEPDAVEKRGGKSDKQEESSRDASSLYPGTETMGLRTCAGESKDYALHVGDGSSDPEVLLNIENQRRGQELSATRQAHDLSPAAESSSTFSFSGRDSSFTEVPRSPKHAHSSSLQQAASRSPSFGDPQLSPEARPSTGKPKHEWFLQKDSEGDTPSLINWPSRVKVREKLVKEESARNSPELASESVTQRRHQPAPVHYVSFQSEHSAFDRVPSKAAGSTRQPIRGYVQPADTGHTAKLVTPETPENASECSWVASATQNVPKPPSLTVLEGDGRDSPVLHVCESKAEEEEGEGEGEEKEEDVCFTEALEQSKKTLLALEGDGLVRSPEDPSRNEDFGKPAVSTVTLEHQKELENVAQPPQAPHQPTERTGRSEMVLYIQSEPVSQDAKPTGHNREASKKRKVRTRSLSDFTGPPQLQALKYKDPASRRELELPSSKTEGPYGEISMLDTKVSVAQLRSAFLASANACRRPELKSRVERSAEGPGLPTGVERERGSRKPRRYFSPGESRKTSERFRTQPITSAERKESDRCTSHSETPTVDDEEKVDERAKLSVAAKRLLFREMEKSFDEQNVPKRRSRNTAVEQRLRRLQDRSLTQPITTEEVVIAATEPIPASCSGGTHPVMARLPSPTVARSAVQPARLQASAHQKALAKDQTNEGKELAEQGEPDSSTLSLAEKLALFNKLSQPVSKAISTRNRIDTRQRRMNARYQTQPVTLGEVEQVQSGKLIPFSPAVNTSVSTVASTVAPMYAGDLRTKPPLDHNASATDYKFSSSIENSDSPVRSILKSQAWQPLVEGSENKGMLREYGETESKRALTGRDSGMEKYGSFEEAEASYPILNRAREGDSHKESKYAVPRRGSLERANPPITHLGDEPKEFSMAKMNAQGNLDLRDRLPFEEKVEVENVMKRKFSLRAAEFGEPTSEQTGTAAGKTIAQTTAPVSWKPQDSSEQPQEKLCKNPCAMFAAGEIKTPTGEGLLDSPSKTMSIKERLALLKKSGEEDWRNRLSRRQEGGKAPASSLHTQEAGRSLIKKRVTESRESQMTIEERKQLITVREEAWKTRGRGAANDSTQFTVAGRMVKKGLASPTAITPVASPICGKTRGTTPVSKPLEDIEARPDMQLESDLKLDRLETFLRRLNNKVGGMHETVLTVTGKSVKEVMKPDDDETFAKFYRSVDYNMPRSPVEMDEDFDVIFDPYAPKLTSSVAEHKRAVRPKRRVQASKNPLKMLAAREDLLQEYTEQRLNVAFMESKRMKVEKMSSNSNFSEVTLAGLASKENFSNVSLRSVNLTEQNSNNSAVPYKRLMLLQIKGRRHVQTRLVEPRASALNSGDCFLLLSPHCCFLWVGEFANVIEKAKASELATLIQTKRELGCRATYIQTIEEGINTHTHAAKDFWKLLGGQTSYQSAGDPKEDELYEAAIIETNCIYRLMDDKLVPDDDYWGKIPKCSLLQPKEVLVFDFGSEVYVWHGKEVTLAQRKIAFQLAKHLWNGTFDYENCDINPLDPGECNPLIPRKGQGRPDWAIFGRLTEHNETILFKEKFLDWTELKRSNEKNPGELAQHKEDPRTDVKAYDVTRMVSMPQTTAGTILDGVNVGRGYGLVEGHDRRQFEITSVSVDVWHILEFDYSRLPKQSIGQFHEGDAYVVKWKFMVSTAEQKHPASSSSLSCSPL

SEQ ID NO: 10424 - protein, 600 aa, Artificial Sequence
  Synthetic polypeptide
MNSSDVSSLKHPSSLASPTAITPVASPICGKTRGTTPVSKPLEDIEARPDMQLESDLKLDRLETFLRRLNNKVGGMHETVLTVTGKSVKEVMKPDDDETFAKFYRSVDYNMPRSPVEMDEDFDVIFDPYAPKLTSSVAEHKRAVRPKRRVQASKNPLKMLAAREDLLQEYTEQRLNVAFMESKRMKVEKMSSNSNFSEVTLAGLASKENFSNVSLRSVNLTEQNSNNSAVPYKRLMLLQIKGRRHVQTRLVEPRASALNSGDCFLLLSPHCCFLWVGEFANVIEKAKASELATLIQTKRELGCRATYIQTIEEGINTHTHAAKDFWKLLGGQTSYQSAGDPKEDELYEAAIIETNCIYRLMDDKLVPDDDYWGKIPKCSLLQPKEVLVFDFGSEVYVWHGKEVTLAQRKIAFQLAKHLWNGTFDYENCDINPLDPGECNPLIPRKGQGRPDWAIFGRLTEHNETILFKEKFLDWTELKRSNEKNPGELAQHKEDPRTDVKAYDVTRMVSMPQTTAGTILDGVNVGRGYGLVEGHDRRQFEITSVSVDVWHILEFDYSRLPKQSIGQFHEGDAYVVKWKFMVSTAEQKHPASSSSLSCSPL

SEQ ID NO: 10425 - protein, 795 aa, Artificial Sequence
  Synthetic polypeptide
MNLQPIFWIGLISSVCCVFAQTDENRCLKANAKSCGECIQAGPNCGWCTNSTFLQEGMPTSARCDDLEALKKKGCPPDDIENPRGSKDIKKNKNVTNRSKGTAEKLKPEDITQIQPQQLVLRLRSGEPQTFTLKFKRAEDYPIDLYYLMDLSYSMKDDLENVKSLGTDLMNEMRRITSDFRIGFGSFVEKTVMPYISTTPAKLRNPCTSEQNCTSPFSYKNVLSLTNKGEVFNELVGKQRISGNLDSPEGGFDAIMQVAVCGSLIGWRNVTRLLVFSTDAGFHFAGDGKLGGIVLPNDGQCHLENNMYTMSHYYDYPSIAHLVQKLSENNIQTIFAVTEEFQPVYKELKNLIPKSAVGTLSANSSNVIQLIIDAYNSLSSEVILENGKLSEGVTISYKSYCKNGVNGTGENGRKCSNISIGDEVQFEISITSNKCPKKDSDSFKIRPLGFTEEVEVILQYICECECQSEGIPESPKCHEGNGTFECGACRCNEGRVGRHCECSTDEVNSEDMDAYCRKENSSEICSNNGECVCGQCVCRKRDNTNEIYSGKFCECDNFNCDRSNGLICGGNGVCKCRVCECNPNYTGSACDCSLDTSTCEASNGQICNGRGICECGVCKCTDPKFQGQTCEMCQTCLGVCAEHKECVQCRAFNKGEKKDTCTQECSYFNITKVESRDKLPQPVQPDPVSHCKEKDVDDCWFYFTYSVNGNNEVMVHVVENPECPTGPDIIPIVAGVVAGIVLIGLALLLIWKLLMIIHDRREFAKFEKEKMNAKWDTNSLRQVPQDVFQKKASLS

SEQ ID NO: 10426 - protein, 64 aa, Artificial Sequence
  Synthetic polypeptide
  misc_feature (1)..(1): Xaa can be any naturally occurring amino acid
XVAGVVAGIVLIGLALLLIWKLLMIIHDRREFAKFEKEKMNAKWDTNSLRQVPQDVFQKKASLS

SEQ ID NO: 10427 - protein, 25 aa, Artificial Sequence
  Synthetic polypeptide
MNLQPIFWIGLISSVCCVFAQTDFL

SEQ ID NO: 10428 - protein, 33 aa, Artificial Sequence
  Synthetic polypeptide
MNLQPIFWIGLISSVCCVFAQTGKRLERNRQKC

SEQ ID NO: 10429 - protein, 955 aa, Artificial Sequence
  Synthetic polypeptide
MKVTVCFGRTRVVVPCGDGHMKVFSLIQQAVTRYRKAIAKDPNYWIQVHRLEHGDGGILDLDDILCDVADDKDRLVAVFDEQDPHHGGDGTSASSTGTQSPEIFGSELGTNNVSAFQPYQATSEIEVTPSVLRANMPLHVRRSSDPALIGLSTSVSDSNFSSEEPSRKNPTRWSTTAGFLKQNTAGSPKTCDRKDEDGTEEDNSRVEPVGHADTGLEHIPNFSLDDMVKLVEVPNDGGPLGIHVVPFSARGGRTLGLLVKRLEKGGKAEHENLFRENDCIVRINDGDLRNRRFEQAQHMFRQAMRTPIIWFHVVPAANKEQYEQLSQSEKNNYYSSRFSPDSQYIDNRSVNSAGLHTVQRAPRLNHPPEQIDSHSRLPHSAHPSGKPPSAPASAPQNVFSTTVSSGYNTKKIGKRLNIQLKKGTEGLGFSITSRDVTIGGSAPIYVKNILPRGAAIQDGRLKAGDRLIEVNGVDLVGKSQEEVVSLLRSTKMEGTVSLLVFRQEDAFHPRELKAEDEDIVLTPDGTREFLTFEVPLNDSGSAGLGVSVKGNRSKENHADLGIFVKSIINGGAASKDGRLRVNDQLIAVNGESLLGKTNQDAMETLRRSMSTEGNKRGMIQLIVARRISKCNELKSPGSPPGPELPIETALDDRERRISHSLYSGIEGLDESPSRNAALSRIMGKYQLSPTVNMPQDDTVIIEDDRLPVLPPHLSDQSSSSSHDDVGFVTADAGTWAKAAISDSADCSLSPDVDPVLAFQREGFGRQIADETKLNTVDDQKAGSPSRDVGPSLGLKKSSSLESLQTAVAEVTLNGDIPFHRPRPRIIRGRGCNESFRAAIDKSYDKPAVDDDDEGMETLEEDTEESSRSGRESVSTASDQPSHSLERQMNGNQEKGDKTDRKKDKTGKEKKKDRDKEKDKMKAKKGMLKGLGDMFSCEVWIIMVPASQGCFEANGN

SEQ ID NO: 10430 - protein, 985 aa, Artificial Sequence
  Synthetic polypeptide
MKVTVCFGRTRVVVPCGDGHMKVFSLIQQAVTRYRKAIAKDPNYWIQVHRLEHGDGGILDLDDILCDVADDKDRLVAVFDEQDPHHGGDGTSASSTGTQSPEIFGSELGTNNVSAFQPYQATSEIEVTPSVLRANMPLHVRRSSDPALIGLSTSVSDSNFSSEEPSRKNPTRWSTTAGFLKQNTAGSPKTCDRKDEDGTEEDNSRVEPVGHADTGLEHIPNFSLDDMVKLVEVPNDGGPLGIHVVPFSARGGRTLGLLVKRLEKGGKAEHENLFRENDCIVRINDGDLRNRRFEQAQHMFRQAMRTPIIWFHVVPAANKEQYEQLSQSEKNNYYSSRFSPDSQYIDNRSVNSAGLHTVQRAPRLNHPPEQIDSHSRLPHSAHPSGKPPSAPASAPQNVFSTTVSSGYNTKKIGKRLNIQLKKGTEGLGFSITSRDVTIGGSAPIYVKNILPRGAAIQDGRLKAGDRLIEVNGVDLVGKSQEEVVSLLRSTKMEGTVSLLVFRQEDAFHPRELKAEDEDIVLTPDGTREFLTFEVPLNDSGSAGLGVSVKGNRSKENHADLGIFVKSIINGGAASKDGRLRVNDQLIAVNGESLLGKTNQDAMETLRRSMSTEGNKRGMIQLIVARRISKCNELKSPGSPPGPELPIETALDDRERRISHSLYSGIEGLDESPSRNAALSRIMGKYQLSPTVNMPQDDTVIIEDDRLPVLPPHLSDQSSSSSHDDVGFVTADAGTWAKAAISDSADCSLSPDVDPVLAFQREGFGRQSMSEKRTKQFSDASQLDFVKTRKSKSMDLGIADETKLNTVDDQKAGSPSRDVGPSLGLKKSSSLESLQTAVAEVTLNGDIPFHRPRPRIIRGRGCNESFRAAIDKSYDKPAVDDDDEGMETLEEDTEESSRSGRESVSTASDQPSHSLERQMNGNQEKGDKTDRKKDKTGKEKKKDRDKEKDKMKAKKGMLKGLGDMFSCEVWIIMVPASQGCFEANGN

SEQ ID NO: 10431 - protein, 970 aa, Artificial Sequence
  Synthetic polypeptide
MKVTVCFGRTRVVVPCGDGHMKVFSLIQQAVTRYRKAIAKDPNYWIQVHRLEHGDGGILDLDDILCDVADDKDRLVAVFDEQDPHHGGDGTSASSTGTQSPEIFGSELGTNNVSAFQPYQATSEIEVTPSVLRANMPLHVRRSSDPALIGLSTSVSDSNFSSEEPSRKNPTRWSTTAGFLKQNTAGSPKTCDRKDEDGTEEDNSRVEPVGHADTGLEHIPNFSLDDMVKLVEVPNDGGPLGIHVVPFSARGGRTLGLLVKRLEKGGKAEHENLFRENDCIVRINDGDLRNRRFEQAQHMFRQAMRTPIIWFHVVPAANKEQYEQLSQSEKNNYYSSRFSPDSQYIDNRSVNSAGLHTVQRAPRLNHPPEQIDSHSRLPHSAHPSGKPPSAPASAPQNVFSTTVSSGYNTKKIGKRLNIQLKKGTEGLGFSITSRDVTIGGSAPIYVKNILPRGAAIQDGRLKAGDRLIEVNGVDLVGKSQEEVVSLLRSTKMEGTVSLLVFRQEDAFHPRELKAEDEDIVLTPDGTREFLTFEVPLNDSGSAGLGVSVKGNRSKENHADLGIFVKSIINGGAASKDGRLRVNDQLIAVNGESLLGKTNQDAMETLRRSMSTEGNKRGMIQLIVARRISKCNELKSPGSPPGPELPIETALDDRERRISHSLYSGIEGLDESPSRNAALSRIMGKYQLSPTVNMPQDDTVIIEDDRLPVLPPHLSDQSSSSSHDDVGFVTADAGTWAKAAISDSADCSLSPDVDPVLAFQREGFGRQSMSEKRTKQFSDASQLDFVKTRKSKSMDLGSSPSRDVGPSLGLKKSSSLESLQTAVAEVTLNGDIPFHRPRPRIIRGRGCNESFRAAIDKSYDKPAVDDDDEGMETLEEDTEESSRSGRESVSTASDQPSHSLERQMNGNQEKGDKTDRKKDKTGKEKKKDRDKEKDKMKAKKGMLKGLGDMFSCEVWIIMVPASQGCFEANGN

SEQ ID NO: 10432 - protein, 999 aa, Artificial Sequence
  Synthetic polypeptide
MKVTVCFGRTRVVVPCGDGHMKVFSLIQQAVTRYRKAIAKDPNYWIQVHRLEHGDGGILDLDDILCDVADDKDRLVAVFDEQDPHHGGDGTSASSTGTQSPEIFGSELGTNNVSAFQPYQATSEIEVTPSVLRANMPLHVRRSSDPALIGLSTSVSDSNFSSEEPSRKNPTRWSTTAGFLKQNTAGSPKTCDRKKDENYRSLPRDTSNWSNQFQRDNARSSLSASHPMVGKWLEKQEQDEDGTEEDNSRVEPVGHADTGLEHIPNFSLDDMVKLVEVPNDGGPLGIHVVPFSARGGRTLGLLVKRLEKGGKAEHENLFRENDCIVRINDGDLRNRRFEQAQHMFRQAMRTPIIWFHVVPAANKEQYEQLSQSEKNNYYSSRFSPDSQYIDNRSVNSAGLHTVQRAPRLNHPPEQIDSHSRLPHSAHPSGKPPSAPASAPQNVFSTTVSSGYNTKKIGKRLNIQLKKGTEGLGFSITSRDVTIGGSAPIYVKNILPRGAAIQDGRLKAGDRLIEVNGVDLVGKSQEEVVSLLRSTKMEGTVSLLVFRQEDAFHPRELKAEDEDIVLTPDGTREFLTFEVPLNDSGSAGLGVSVKGNRSKENHADLGIFVKSIINGGAASKDGRLRVNDQLIAVNGESLLGKTNQDAMETLRRSMSTEGNKRGMIQLIVARRISKCNELKSPGSPPGPELPIETALDDRERRISHSLYSGIEGLDESPSRNAALSRIMGKYQLSPTVNMPQDDTVIIEDDRLPVLPPHLSDQSSSSSHDDVGFVTADAGTWAKAAISDSADCSLSPDVDPVLAFQREGFGRQIADETKLNTVDDQKAGSPSRDVGPSLGLKKSSSLESLQTAVAEVTLNGDIPFHRPRPRIIRGRGCNESFRAAIDKSYDKPAVDDDDEGMETLEEDTEESSRSGRESVSTASDQPSHSLERQMNGNQEKGDKTDRKKDKTGKEKKKDRDKEKDKMKAKKGMLKGLGDMFSCEVWIIMVPASQGCFEANGN

SEQ ID NO: 10433 - protein, 1029 aa, Artificial Sequence
  Synthetic polypeptide
MKVTVCFGRTRVVVPCGDGHMKVFSLIQQAVTRYRKAIAKDPNYWIQVHRLEHGDGGILDLDDILCDVADDKDRLVAVFDEQDPHHGGDGTSASSTGTQSPEIFGSELGTNNVSAFQPYQATSEIEVTPSVLRANMPLHVRRSSDPALIGLSTSVSDSNFSSEEPSRKNPTRWSTTAGFLKQNTAGSPKTCDRKKDENYRSLPRDTSNWSNQFQRDNARSSLSASHPMVGKWLEKQEQDEDGTEEDNSRVEPVGHADTGLEHIPNFSLDDMVKLVEVPNDGGPLGIHVVPFSARGGRTLGLLVKRLEKGGKAEHENLFRENDCIVRINDGDLRNRRFEQAQHMFRQAMRTPIIWFHVVPAANKEQYEQLSQSEKNNYYSSRFSPDSQYIDNRSVNSAGLHTVQRAPRLNHPPEQIDSHSRLPHSAHPSGKPPSAPASAPQNVFSTTVSSGYNTKKIGKRLNIQLKKGTEGLGFSITSRDVTIGGSAPIYVKNILPRGAAIQDGRLKAGDRLIEVNGVDLVGKSQEEVVSLLRSTKMEGTVSLLVFRQEDAFHPRELKAEDEDIVLTPDGTREFLTFEVPLNDSGSAGLGVSVKGNRSKENHADLGIFVKSIINGGAASKDGRLRVNDQLIAVNGESLLGKTNQDAMETLRRSMSTEGNKRGMIQLIVARRISKCNELKSPGSPPGPELPIETALDDRERRISHSLYSGIEGLDESPSRNAALSRIMGKYQLSPTVNMPQDDTVIIEDDRLPVLPPHLSDQSSSSSHDDVGFVTADAGTWAKAAISDSADCSLSPDVDPVLAFQREGFGRQSMSEKRTKQFSDASQLDFVKTRKSKSMDLGIADETKLNTVDDQKAGSPSRDVGPSLGLKKSSSLESLQTAVAEVTLNGDIPFHRPRPRIIRGRGCNESFRAAIDKSYDKPAVDDDDEGMETLEEDTEESSRSGRESVSTASDQPSHSLERQMNGNQEKGDKTDRKKDKTGKEKKKDRDKEKDKMKAKKGMLKGLGDMFSCEVWIIMVPASQGCFEANGN

SEQ ID NO: 10434 - protein, 1045 aa, Artificial Sequence
  Synthetic polypeptide
MKVTVCFGRTRVVVPCGDGHMKVFSLIQQAVTRYRKAIAKDPNYWIQVHRLEHGDGGILDLDDILCDVADDKDRLVAVFDEQDPHHGGDGTSASSTGTQSPEIFGSELGTNNVSAFQPYQATSEIEVTPSVLRANMPLHVRRSSDPALIGLSTSVSDSNFSSEEPSRKNPTRWSTTAGFLKQNTAGSPKTCDRKKDENYRSLPRDTSNWSNQFQRDNARSSLSASHPMVGKWLEKQEQDEDGTEEDNSRVEPVGHADTGLEHIPNFSLDDMVKLVEVPNDGGPLGIHVVPFSARGGRTLGLLVKRLEKGGKAEHENLFRENDCIVRINDGDLRNRRFEQAQHMFRQAMRTPIIWFHVVPAANKEQYEQLSQSEKNNYYSSRFSPDSQYIDNRSVNSAGLHTVQRAPRLNHPPEQIDSHSRLPHSAHPSGKPPSAPASAPQNVFSTTVSSGYNTKKIGKRLNIQLKKGTEGLGFSITSRDVTIGGSAPIYVKNILPRGAAIQDGRLKAGDRLIEVNGVDLVGKSQEEVVSLLRSTKMEGTVSLLVFRQEDAFHPRELNAEPSQMQIPKETKAEDEDIVLTPDGTREFLTFEVPLNDSGSAGLGVSVKGNRSKENHADLGIFVKSIINGGAASKDGRLRVNDQLIAVNGESLLGKTNQDAMETLRRSMSTEGNKRGMIQLIVARRISKCNELKSPGSPPGPELPIETALDDRERRISHSLYSGIEGLDESPSRNAALSRIMGESGKYQLSPTVNMPQDDTVIIEDDRLPVLPPHLSDQSSSSSHDDVGFVTADAGTWAKAAISDSADCSLSPDVDPVLAFQREGFGRQSMSEKRTKQFSDASQLDFVKTRKSKSMDLGIADETKLNTVDDQKAGSPSRDVGPSLGLKKSSSLESLQTAVAEVTLNGDIPFHRPRPRIIRGRGCNESFRAAIDKSYDKPAVDDDDEGMETLEEDTEESSRSGRESVSTASDQPSHSLERQMNGNQEKGDKTDRKKDKTGKEKKKDRDKEKDKMKAKKGMLKGLGDMFSCEVWIIMVPASQGCFEANGN

SEQ ID NO: 10435 - protein, 1012 aa, Artificial Sequence
  Synthetic polypeptide
MKVTVCFGRTRVVVPCGDGHMKVFSLIQQAVTRYRKAIAKDPNYWIQVHRLEHGDGGILDLDDILCDVADDKDRLVAVFDEQDPHHGGDGTSASSTGTQSPEIFGSELGTNNVSAFQPYQATSEIEVTPSVLRANMPLHVRRSSDPALIGLSTSVSDSNFSSEEPSRKNPTRWSTTAGFLKQNTAGSPKTCDRKKDENYRSLPRDTSNWSNQFQRDNARSSLSASHPMVGKWLEKQEQDEDGTEEDNSRVEPVGHADTGLEHIPNFSLDDMVKLVEVPNDGGPLGIHVVPFSARGGRTLGLLVKRLEKGGKAEHENLFRENDCIVRINDGDLRNRRFEQAQHMFRQAMRTPIIWFHVVPAANKEQYEQLSQSEKNNYYSSRFSPDSQYIDNRSVNSAGLHTVQRAPRLNHPPEQIDSHSRLPHSAHPSGKPPSAPASAPQNVFSTTVSSGYNTKKIGKRLNIQLKKGTEGLGFSITSRDVTIGGSAPIYVKNILPRGAAIQDGRLKAGDRLIEVNGVDLVGKSQEEVVSLLRSTKMEGTVSLLVFRQEDAFHPRELNAEPSQMQIPKETKAEDEDIVLTPDGTREFLTFEVPLNDSGSAGLGVSVKGNRSKENHADLGIFVKSIINGGAASKDGRLRVNDQLIAVNGESLLGKTNQDAMETLRRSMSTEGNKRGMIQLIVARRISKCNELKSPGSPPGPELPIETALDDRERRISHSLYSGIEGLDESPSRNAALSRIMGKYQLSPTVNMPQDDTVIIEDDRLPVLPPHLSDQSSSSSHDDVGFVTADAGTWAKAAISDSADCSLSPDVDPVLAFQREGFGRQIADETKLNTVDDQKAGSPSRDVGPSLGLKKSSSLESLQTAVAEVTLNGDIPFHRPRPRIIRGRGCNESFRAAIDKSYDKPAVDDDDEGMETLEEDTEESSRSGRESVSTASDQPSHSLERQMNGNQEKGDKTDRKKDKTGKEKKKDRDKEKDKMKAKKGMLKGLGDMFSCEVWIIMVPASQGCFEANGN

SEQ ID NO: 10436 - protein, 1042 aa, Artificial Sequence
  Synthetic polypeptide
MKVTVCFGRTRVVVPCGDGHMKVFSLIQQAVTRYRKAIAKDPNYWIQVHRLEHGDGGILDLDDILCDVADDKDRLVAVFDEQDPHHGGDGTSASSTGTQSPEIFGSELGTNNVSAFQPYQATSEIEVTPSVLRANMPLHVRRSSDPALIGLSTSVSDSNFSSEEPSRKNPTRWSTTAGFLKQNTAGSPKTCDRKKDENYRSLPRDTSNWSNQFQRDNARSSLSASHPMVGKWLEKQEQDEDGTEEDNSRVEPVGHADTGLEHIPNFSLDDMVKLVEVPNDGGPLGIHVVPFSARGGRTLGLLVKRLEKGGKAEHENLFRENDCIVRINDGDLRNRRFEQAQHMFRQAMRTPIIWFHVVPAANKEQYEQLSQSEKNNYYSSRFSPDSQYIDNRSVNSAGLHTVQRAPRLNHPPEQIDSHSRLPHSAHPSGKPPSAPASAPQNVFSTTVSSGYNTKKIGKRLNIQLKKGTEGLGFSITSRDVTIGGSAPIYVKNILPRGAAIQDGRLKAGDRLIEVNGVDLVGKSQEEVVSLLRSTKMEGTVSLLVFRQEDAFHPRELNAEPSQMQIPKETKAEDEDIVLTPDGTREFLTFEVPLNDSGSAGLGVSVKGNRSKENHADLGIFVKSIINGGAASKDGRLRVNDQLIAVNGESLLGKTNQDAMETLRRSMSTEGNKRGMIQLIVARRISKCNELKSPGSPPGPELPIETALDDRERRISHSLYSGIEGLDESPSRNAALSRIMGKYQLSPTVNMPQDDTVIIEDDRLPVLPPHLSDQSSSSSHDDVGFVTADAGTWAKAAISDSADCSLSPDVDPVLAFQREGFGRQSMSEKRTKQFSDASQLDFVKTRKSKSMDLGIADETKLNTVDDQKAGSPSRDVGPSLGLKKSSSLESLQTAVAEVTLNGDIPFHRPRPRIIRGRGCNESFRAAIDKSYDKPAVDDDDEGMETLEEDTEESSRSGRESVSTASDQPSHSLERQMNGNQEKGDKTDRKKDKTGKEKKKDRDKEKDKMKAKKGMLKGLGDMFSCEVWIIMVPASQGCFEANGN

SEQ ID NO: 10437 - protein, 758 aa, Artificial Sequence
  Synthetic polypeptide
MVKLVEVPNDGGPLGIHVVPFSARGGRTLGLLVKRLEKGGKAEHENLFRENDCIVRINDGDLRNRRFEQAQHMFRQAMRTPIIWFHVVPAANKEQYEQLSQSEKNNYYSSRFSPDSQYIDNRSVNSAGLHTVQRAPRLNHPPEQIDSHSRLPHSAHPSGKPPSAPASAPQNVFSTTVSSGYNTKKIGKRLNIQLKKGTEGLGFSITSRDVTIGGSAPIYVKNILPRGAAIQDGRLKAGDRLIEVNGVDLVGKSQEEVVSLLRSTKMEGTVSLLVFRQEDAFHPRELKAEDEDIVLTPDGTREFLTFEVPLNDSGSAGLGVSVKGNRSKENHADLGIFVKSIINGGAASKDGRLRVNDQLIAVNGESLLGKTNQDAMETLRRSMSTEGNKRGMIQLIVARRISKCNELKSPGSPPGPELPIETALDDRERRISHSLYSGIEGLDESPSRNAALSRIMGKYQLSPTVNMPQDDTVIIEDDRLPVLPPHLSDQSSSSSHDDVGFVTADAGTWAKAAISDSADCSLSPDVDPVLAFQREGFGRQSMSEKRTKQFSDASQLDFVKTRKSKSMDLVADETKLNTVDDQKAGSPSRDVGPSLGLKKSSSLESLQTAVAEVTLNGDIPFHRPRPRIIRGRGCNESFRAAIDKSYDKPAVDDDDEGMETLEEDTEESSRSGRESVSTASDQPSHSLERQMNGNQEKGDKTDRKKDKTGKEKKKDRDKEKDKMKAKKGMLKGLGDMFSCEVWIIMVPASQGCFEANGN

SEQ ID NO: 10438 - protein, 255 aa, Artificial Sequence [sequence omitted]

SEQ ID NO: 10439 - protein, 228 aa, Artificial Sequence
  Synthetic polypeptide
MLKEERIKELEKRLSEKEEEIQELKRKLHKCQSVLPVPSTHIGPRTTRAQGISAEPQTYRSFHDLRQAFRKFTKSERSKDLIKEAILDNDFMKNLELSQIQEIVDCMYPVEYGKDSCIIKEGDVGSLVYVMEDGKVEVTKEGVKLCTMGPGKVFGELAILYNCTRTATVKTLVNVKLWAIDRQCFQTIMMRTGLIKHTEYMEFLKSVPTFQSLPEEILSKLADVLEES

SEQ ID NO: 10440 - protein, 240 aa, Artificial Sequence
  Synthetic polypeptide
MSELEEDFAKILMLKEERIKELEKRLSEKEEEIQELKRKLHKCQSVLPVPSTHIGPRTTRAQGISAEPQTYRSFHDLRQAFRKFTKSERSKDLIKEAILDNDFMKNLELSQIQEIVDCMYPVEYGKDSCIIKEGDVGSLVYVMEDGKVEVTKEGVKLCTMGPGKVFGELAILYNCTRTATVKTLVNVKLWAIDRQCFQTIMMRTGLIKHTEYMEFLKSVPTFQSLPEEILSKLADVLEES

SEQ ID NO: 10441 - protein, 113 aa, Artificial Sequence
  Synthetic polypeptide
SCIIKEGDVGSLVYVMEDGKVEVTKEGVKLCTMGPGKVFGELAILYNCTRTATVKTLVNVKLWAIDRQCFQTIMMRTGLIKHTEYMEFLKSVPTFQSLPEEILSKLADVLEES

SEQ ID NO: 10442 - protein, 104 aa, Artificial Sequence
  Synthetic polypeptide
MFRQFYLWTCLASGIILGSLFEICLGQYDDDCKLARGGPPATIVAIDEESRNGNICQCLEAFAIVKTWRGGGTLLARDTAKHPMAPSALNNCLTQNVVVPMLRS

SEQ ID NO: 10443 - protein, 109 aa, Artificial Sequence
  Synthetic polypeptide
MFRQFYLWTCLASGIILGSLFEICLGQYDDGWRYMYCKLARGGPPATIVAIDEESRNGNICQCLEAFAIVKTWRGGGTLLARDTAKHPMAPSALNNCLTQNVVVPMLRS

SEQ ID NO: 10444 - protein, 540 aa, Artificial Sequence
  Synthetic polypeptide
MDTKDMNEFETEGFFALHQRRGAIKQAKVHHVKCHEFTATFFPQPTFCSVCHEFVWGLNKQGYQCRQCNAAIHKKCIDKVIAKCTGSAINSRETMFHKERFKIDMPHRFKVYNYKSPTFCEHCGTLLWGLARQGLKCDACGMNVHHRCQTKVANLCGINQKLMAEALAMIESTQQARCLRDTEQIFREGPVEIGLPCSIKNEARPPCLPTPGKREPQGISWESPLDEVDKMCHLPEPELNKERPSLQIKLKIEDFILHKMLGKGSFGKVFLAEFKKTNQFFAIKALKKDVVLMDDDVECTMVEKRVLSLAWEHPFLTHMFCTFQTKENLFFVMEYLNGGDLMYHIQSCHKFDLSRATFYAAEIILGLQFLHSKGIVYRDLKLDNILLDKDGHIKIADFGMCKENMLGDAKTNTFCGTPDYIAPEILLGQKYNHSVDWWSFGVLLYEMLIGQSPFHGQDEEELFHSIRMDNPFYPRWLEKEAKDLLVKLFVREPEKRLGVRGDIRQHPLFREINWEELERKEIDPPFRPKVHLAQAMTWRK

SEQ ID NO: 10445 - protein, 665 aa, Artificial Sequence
  Synthetic polypeptide
MSPFLRIGLSNFDCGSCQSCQGEAVNPYCAVLVKEYVESENGQMYIQKKPTMYPPWDSTFDAHINKGRVMQIIVKGKNVDLISETTVELYSLAERCRKNNGKTEIWLELKPQGRMLMNARYFLEMSDTKDMNEFETEGFFALHQRRGAIKQAKVHHVKCHEFTATFFPQPTFCSVCHEFVWGLNKQGYQCRQCNAAIHKKCIDKVIAKCTGSAINSRETMFHKERFKIDMPHRFKVYNYKSPTFCEHCGTLLWGLARQGLKCDACGMNVHHRCQTKVANLCGINQKLMAEALAMIESTQQARCLRDTEQIFREGPVEIGLPCSIKNEARPPCLPTPGKREPQGISWESPLDEVDKMCHLPEPELNKERPSLQIKLKIEDFILHKMLGKGSFGKVFLAEFKKTNQFFAIKALKKDVVLMDDDVECTMVEKRVLSLAWEHPFLTHMFCTFQTKENLFFVMEYLNGGDLMYHIQSCHKFDLSRATFYAAEIILGLQFLHSKGIVYRDLKLDNILLDKDGHIKIADFGMCKENMLGDAKTNTFCGTPDYIAPEILLGQKYNHSVDWWSFGVLLYEMLIGQSPFHGQDEEELFHSIRMDNPFYPRWLEKEAKDLLVKLFVREPEKRLGVRGDIRQHPLFREINWEELERKEIDPPFRPKVHLAQAMTWRK

SEQ ID NO: 10446 - protein, 602 aa, Artificial Sequence
  Synthetic polypeptide
MSPFLRIGLSNFDCGSCQSCQGEAVNPYCAVLVKEYVESENGQMYIQKKPTMYPPWDSTFDAHINKGRVMQIIVKGKNVDLISETTVELYSLAERCRKNNGKTEIWLELKPQGRMLMNARYFLEMSDTKDMNEFETEGFFALHQRRGAIKQAKVHHVKCHEFTATFFPQPTFCSVCHEFVWGLNKQGYQCRQCNAAIHKKCIDKVIAKCTGSAINSRETMFHKERFKIDMPHRFKVYNYKSPTFCEHCGTLLWGLARQGLKCDACGMNVHHRCQTKVANLCGINQKLMAEALAMIESTQQARCLRDTEQIFREGPVEIGLPCSIKNEARPPCLPTPGKREPQGISWESPLDEVDKMCHLPEPELNKERPSLQIKLKIEDFILHKMLGKGSFGKVFLAEFKKTNQFFAIKALKKDVVLMDDDVECTMVEKRVLSLAWEHPFLTHMFCTFQTKENLFFVMEYLNGGDLMYHIQSCHKFDLSRATFYAAEIILGLQFLHSKGIVYRDLKLDNILLDKDGHIKIADFGMCKENMLGDAKTNTFCGTPDYIAPELFVREPEKRLGVRGDIRQHPLFREINWEELERKEIDPPFRPKVHLAQAMTWRK

SEQ ID NO: 10447 - protein, 102 aa, Artificial Sequence
  Synthetic polypeptide
LQAFMYILGICLIMELIGGVVALTFRNQTIDFLNDNIRRGIENYYDDLDFKNIMDFVQKKFKCCGGEDYRDWSKNQYHDCSAPGPLACGVPYTCCIRNTGHG

SEQ ID NO: 10448 - protein, 193 aa, Artificial Sequence
  Synthetic polypeptide
MPRGDSEQVRYCARFSYLWLKFSLIIYSTVFWLIGALVLSVGIYAEVERQKYKTLESAFLAPAIILILLGVVMFMVSFIGVLASLRDNLYLLQAFMYILGICLIMELIGGVVALTFRNQTIDFLNDNIRRGIENYYDDLDFKNIMDFVQKKFKCCGGEDYRDWSKNQYHDCSAPGPLACGVPYTCCIRNTGHG

SEQ ID NO: 10449 - protein, 118 aa, Artificial Sequence
  Synthetic polypeptide
LQAFMYILGICLIMELIGGVVALTFRNQTIDFLNDNIRRGIENYYDDLDFKNIMDFVQKKFKCCGGEDYRDWSKNQYHDCSAPGPLACGVPYTCCIRNTTEVVNTMCGYKTIDKEGHG

SEQ ID NO: 10450 - protein, 209 aa, Artificial Sequence
  Synthetic polypeptide
MPRGDSEQVRYCARFSYLWLKFSLIIYSTVFWLIGALVLSVGIYAEVERQKYKTLESAFLAPAIILILLGVVMFMVSFIGVLASLRDNLYLLQAFMYILGICLIMELIGGVVALTFRNQTIDFLNDNIRRGIENYYDDLDFKNIMDFVQKKFKCCGGEDYRDWSKNQYHDCSAPGPLACGVPYTCCIRNTTEVVNTMCGYKTIDKEGHG

SEQ ID NO: 10451 - protein, 157 aa, Artificial Sequence
  Synthetic polypeptide
LQAFMYILGICLIMELIGGVVALTFRNQTIDFLNDNIRRGIENYYDDLDFKNIMDFVQKKFKCCGGEDYRDWSKNQYHDCSAPGPLACGVPYTCCIRNTTEVVNTMCGYKTIDKERFSVQDVIYVRGCTNAVIIWFMDNYTIMAGILLGILLPQGHG

SEQ ID NO: 10452 - protein, 248 aa, Artificial Sequence
  Synthetic polypeptide
MPRGDSEQVRYCARFSYLWLKFSLIIYSTVFWLIGALVLSVGIYAEVERQKYKTLESAFLAPAIILILLGVVMFMVSFIGVLASLRDNLYLLQAFMYILGICLIMELIGGVVALTFRNQTIDFLNDNIRRGIENYYDDLDFKNIMDFVQKKFKCCGGEDYRDWSKNQYHDCSAPGPLACGVPYTCCIRNTTEVVNTMCGYKTIDKERFSVQDVIYVRGCTNAVIIWFMDNYTIMAGILLGILLPQGHG

SEQ ID NO: 10453 - protein, 161 aa, Artificial Sequence; identical to SEQ ID NO: 986
  Synthetic polypeptide

SEQ ID NO: 10454 - protein, 161 aa, Artificial Sequence; identical to SEQ ID NO: 987
  Synthetic polypeptide

SEQ ID NO: 10455 - protein, 173 aa, Artificial Sequence
  Synthetic polypeptide
MVAERTHKAAATGARGPGELGAPGTVALVAARAERGARLPSPGSCGLLTLALCSLALSLLAHFRTAELQARVLRLEAERGEQQMETAILGRVNQLLDEKWKLHSRRRREAPKTSPGCNCPPAFQGPTGRPGLPGDKGAIGMPGRVLLPFGSSLSRSSSPYLPAPRSLSPFLSP

SEQ ID NO: 10456 - protein, 173 aa, Artificial Sequence
  Synthetic polypeptide
MVAERTHKAAATGARGPGELGAPGTVALVAARAERGARLPSPGSCGLLTLALCSLALSLLAHFRTAELQARVLRLEAERGEQQMETAILGRVNQLLDEKWKLHSRRRREAPKTSPGCNCPPGPPGPTGRPGLPGDKGAIGMPGRVLLPFGSSLSRSSSPYLPAPRSLSPFLSP

SEQ ID NO: 10457 - protein, 512 aa, Artificial Sequence
  Synthetic polypeptide
MAARLLLLGILLLLLPLPVPAPCHTAARSECKRSHKFVPGAWLAGEGVDVTSLRRSGSFPVDTQRFLRPDGTCTLCENALQEGTLQRLPLALTNWRAQGSGCQRHVTRAKVSSTEAVARDAARSIRNDWKVGLDVTPKPTSNVHVSVAGSHSQAANFAAQKTHQDQYSFSTDTVECRFYSFHVVHTPPLHPDFKRALGDLPHHFNASTQPAYLRLISNYGTHFIRAVELGGRISALTALRTCELALEGLTDNEVEDCLTVEAQVNIGIHGSISAEAKACEEKKKKHKMTASFHQTYRERHSEVVGGHHTSINDLLFGIQAGPEQYSAWVNSLPGSPGLVDYTLEPLHVLLDSQDPRREALRRALSQYLTDRARWRDCSRPCPPGRQKSPRDPCQCVCHGSAVTTQDCCPRQRGLAQLEVTFIQAWGLWGDWFTATDAYVKLFFGGQELRTSTVWDNNNPIWSVRLDFGDVLLATGGPLRLQVWDQDSGRDDDLLGTCDQAPKSGSHELIGYR

SEQ ID NO: 10458 - protein, 491 aa, Artificial Sequence
  Synthetic polypeptide
MAARLLLLGILLLLLPLPVPAPCHTAARSECKRSHKFVPGAWLAGEGVDVTSLRRSGSFPVDTQRFLRPDGTCTLCENALQEGTLQRLPLALTNWRAQGSGCQRHVTRAKVSSTEAVARDAARSIRNDWKVGLDVTPKPTSNVHVSVAGSHSQAANFAAQKTHQDQYSFSTDTVECRFYSFHVVHTPPLHPDFKRALGDLPHHFNASTQPAYLRLISNYGTHFIRAVELGGRISALTALRTCELALEGLTDNEVEDCLTVEAQVNIGIHGSISAEAKACEEKKKKHKMTASFHQTYRERHSEVVGGHHTSINDLLFGIQAGPEQYSAWVNSLPGSPGLVDYTLEPLHVLLDSQDPRREALRRALSQYLTDRARWRDCSRPCPPGRQKSPRDPCQCVCHGSAVTTQDCCPRQRGLAQLEVTFIQAWGLWGDWFTATDAYVKLFFGGQELRTSTVWDNNNPICSSAIVSASGFYMWPNTILLPTWPREAKRLD

SEQ ID NO: 10459 - protein, 210 aa, Artificial Sequence
  Synthetic polypeptide
MAARLLLLGILLLLLPLPVPAPCHTAARSECKRSHKFVPGAWLAGEGVDVTSLRRSGSFPVDTQRFLRPDGTCTLCENALQEGTLQRLPLALTNWRAQGSGCQRHVTRAKVSSTEAVARDAARSIRNDWKVGLDVTPKPTSNVHVSVAGSHSQAANFAAQKTHQDQYSFSTDTVECRFYSSSAIVSASGFYMWPNTILLPTWPREAKRLD

SEQ ID NO: 10460 - protein, 34 aa, Artificial Sequence; identical to SEQ ID NO: 1348
  Synthetic polypeptide

SEQ ID NO: 10461 - protein, 1017 aa, Artificial Sequence; identical to SEQ ID NO: 77
  Synthetic polypeptide

SEQ ID NO: 10462 - protein, 1057 aa, Artificial Sequence; identical to SEQ ID NO: 66
  Synthetic polypeptide

SEQ ID NO: 10463 - protein, 604 aa, Artificial Sequence
  Synthetic polypeptide
  misc_feature (1)..(1): Xaa can be any naturally occurring amino acid
XDIRIRVAIPLDYETVDRYDFDLFANESVPDHVGYAKVKITLINENDNRPIFSQPLYNISLYENVTVGTSVLTVLATDNDAGTFGEVSYFFSDDPDRFSLDKDTGLIMLIARLDYELIQRFTLTIIARDGGGEETTGRVRINVLDVNDNVPTFQKDAYVGALRENEPSVTQLVRLRATDEDSPPNNQITYSIVSASAFGSYFDISLYEGYGVISVSRPLDYEQISNGLIYLTVMAMDAGNPPLNSTVPVTIEVFDENDNPPTFSKPAYFVSVVENIMAGATVLFLNATDLDRSREYGQESIIYSLEGSTQFRINARSGEITTTSLLDRETKSEYILIVRAVDGGVGHNQKTGIATVNITLLDINDNHPTWKDAPYYINLVEMTPPDSDVTTVVAVDPDLGENGTLVYSIQPPNKFYSLNSTTGKIRTTHAMLDRENPDPHEAELMRKIVVSVTDCGRPPLKATSSATVFVNLLDLNDNDPTFQNLPFVAEVLEGIPAGVSIYQVVAIDLDEGLNGLVSYRMPVGMPRMDFLINSSSGVVVTTTELDRERIAEYQLRVVASDAGTPTKSSTSTLTIHGCSEGCMWSCMGSTQHGLGTLDKLVNGH

(The sequence listing continues in the following parts.)

1. A chimeric polypeptide comprising or consisting of any one of SEQ ID NO:1 to 21542, or a fragment thereof, optionally of at least 4, 5, 6, 7 or 9 amino acids, wherein said chimeric polypeptide is expressed at the cell membrane.

2. The chimeric polypeptide according to claim, 1 which is expressed in more than 1%, notably more than 5%, and typically more than 10% of the tumor samples.

3. The chimeric polypeptide according to any one of claim 1 or 2, which is expressed at higher levels in tumor samples as compared to normal samples.

4. The chimeric polypeptide according to any one of claims 1 to 3, which is expressed in less than 20%, notably less than 10%, less than 5% or less than 1% of the normal samples.

5. The chimeric polypeptide according to any one of claims 1 to 4, wherein the part of the sequence derived from the TE nucleotide sequence is exposed at the cell surface.

6. An antigen binding domain that binds a chimeric polypeptide or a fragment thereof according to any one of claims 1 to 5 with a Kd binding affinity of less than about 10⁻⁵ M

7. The antigen binding domain according to claim 6 which binds a neoantigenic peptide sequence from any one of the chimeric polypeptides of claims 1 to 5, wherein neoantigenic peptide sequence a) is from any one of SEQ ID NO:1-21542 or a fragment thereof and comprises at least a sequence derived from the TE-derived amino acid sequence, optionally (i) a fragment that overlaps the breakpoint between, the TE-derived amino acid sequence and an exon-derived amino acid sequence or, optionally (ii) a pure TE sequence; or b) is from any one of SEQ ID NO:1-1423, 8203-12830 or a fragment thereof and is encoded by a non-canonical ORF downstream of the junction between the TE-derived amino acid sequence and the exon-derived amino acid sequence.

8. The antigen binding domain according to any one of claim 6 or 7 which comprises one or more, typically one or two immunoglobulin region(s).

9. The antigen binding domain according to any one of claims 6 to 8, which comprises a heavy chain variable region (VH) of an antibody, or optionally three CDRs of a VH.

10. The antigen binding domain according to any one of claims 6 to 9, which comprises a light chain variable region (VL) of an antibody, or optionally three CDRs of a VL.

11. An antibody comprising an antigen binding domain according to any one of claims 6 to 10, optionally wherein the antibody is selected from an intact IgG, an scFv, a BiTE, or a multispecific antibody.

12. A chimeric antigen receptor (CAR) or a recombinant non-HLA restricted T cell receptor (TCR) comprising an antigen-binding domain as defined in any one of claims 6 to 10.

13. A recombinant non-HLA restricted TCR according to claim 12, wherein the extracellular antigen-binding domain is capable of dimerizing with a second extracellular antigen-binding domain.

14. The recombinant non-HLA restricted TCR according to claim 13, wherein the second extracellular antigen-binding domain binds a tumor antigen, preferably wherein the tumor antigen is selected from pHER95, CD19, MUC16, MUC1, CAIX, CEA, CD8, CD7, CD10, CD20, CD22, CD30, CD70, CLL1, CD33, CD34, CD38, CD41, CD44, CD49f, CD56, CD74, CD133, CD138, EGP-2, EGP-40, EpCAM, Erb-B2, Erb-B3, Erb-B4, FBP, Fetal acetylcholine receptor, folate receptor-a, GD2, GD3, HER-2, hTERT, IL-13R-a2, κ-light chain, KDR, LeY, L1 cell adhesion molecule, MAGE-A1, Mesothelin, MAGEA3, p53, MART1, GP100, Proteinase3 (PR1), Tyrosinase, Survivin, hTERT, EphA2, NKG2D ligands, NY-ESO-1, oncofetal antigen (h5T4), PSCA, PSMA, ROR1, TAG-72, VEGF-R2, WT-1, BCMA, CD123, CD44V6, NKCS1, EGF1R, EGFR-VIII, CD99, CD70, ADGRE2, CCR1, LILRB2, LILRB4, PRAME, and ERBB.

15. A CAR according to claim 12 comprising:
a) an extracellular comprising the antigen-binding domain of any one of claims 6 to 10,
b) a transmembrane domain,
c) optionally one or more costimulatory domains
d) an intracellular signaling domain comprising a modified CD3zeta intracellular signaling domain in which ITAM2 and ITAM3 have been inactivated,

16. The CAR of claim 15 wherein the transmembrane domain is from CD28, CD8 or CD3-zeta.

17. The CAR of any one of claim 15 or 16, wherein the one or more costimulatory domains are selected from the group consisting of: 4-1BB, CD28, ICOS, OX40 and DAP10.

18. The CAR of any one of claims 15 to 17, wherein the intracellular signaling domain comprises the intracellular signaling domain of a CD3-zeta polypeptide, or a fragment thereof, optionally a CD3-zeta polypeptide wherein immunoreceptor tyrosine-based activation motif 2 (ITAM2) and immunoreceptor tyrosine-based activation motif 3 (ITAM3) are inactivated.

19. A method of producing an antibody, a non-HLA restricted TCR or a CAR as defined in claims 11-18 comprising an antigen-binding domain as defined in any one of claims 6-10, comprising the step of selecting an antibody, a non-HLA restricted TCR or a CAR that binds to a neoantigenic peptide, or a cell expressing a neoantigenic peptide, of any of claims 1-5 with a Kd binding affinity of about 10⁻⁶ M or less.

20. An antibody, a TCR or a CAR produced by the method of claim 19, optionally wherein the TCR is a non-HLA restricted TCR.

21. A polynucleotide encoding a neoantigenic peptide as defined in claims 1-5, or an antibody, a CAR or a non-HLA restricted TCR as defined in any one of claims 11-18, optionally linked to a heterologous regulatory control sequence.

22. A vector comprising the polynucleotide of claim 21.

23. An immune cell comprising a CAR or a non-HLA restricted TCR as defined in any one of claims 12-18

24. The immune cell of claim 23, which is an allogenic or autologous cell selected from T cells, Natural Killer T cells, CD4+/CD8+ T cells, TILs/tumor derived CD8 T cells, central memory CD8+ T cells, Treg, MAIT, Yδ T cells, human embryonic stem cells, and pluripotent stem cells from which lymphoid cells may be differentiated.

25. The immune cell of any one of claims 23-24 which is defective for Suv39h1.

26. A pharmaceutical composition comprising an effective amount of an immune cell as defined in any one of claims 23-25 and a pharmaceutically acceptable excipient.

27. The chimeric polypeptide of any one of claims 1-5, the antigen binding domain of any one of claims 6-10, the antibody of claim 11, the non-HLA restricted TCR or the CAR of any one of claims 12-18, the polynucleotide of claim 21, the vector of claim 22, the immune cell of any one of claims 23-25, or the composition comprising thereof for use for inhibiting cancer cell proliferation, or for use in the treatment of cancer in a subject in need thereof, optionally wherein the composition further comprise a pharmaceutical excipient.

28. The chimeric polypeptide of any one of claims 1-5, the antigen binding domain of any one of claims 6-10, the antibody of claim 11, the non-HLA restricted TCR or the CAR of any one of claims 12-18, the polynucleotide of claim 21, the vector of claim 22, the immune cell of any one of claims 23-25, or the composition comprising thereof optionally in combination with a pharmaceutical excipient for use in in cell therapy of cancer.

29. The chimeric polypeptide of any one of claims 1-5, the antigen binding domain of any one of claims 6-10, the antibody of claim 11, the non-HLA restricted TCR or the CAR of any one of claims 12-18, the polynucleotide of claim 21, the vector of claim 22, the immune cell of any one of claims 23-25, or the composition comprising thereof optionally in combination with a pharmaceutical excipient for use according to claim 27 or 28, which is administered in combination with at least one further therapeutic agent.

30. The neoantigenic peptide of any one of claims 1-5, the antigen binding domain of any one of claims 6-10, the antibody of claim 11, the non-HLA restricted TCR or the CAR of any one of claims 12-18, the polynucleotide of claim 21, the vector of claim 22, the immune cell of any one of claims 23-25, or the composition comprising thereof optionally in combination with a pharmaceutical excipient for use according to claim 29, wherein said at least one further therapeutic agent is a chemotherapeutic agent, or an immunotherapeutic agent, optionally a checkpoint inhibitor.
